United States Patent Application Publication US 2011/0183924 A1 - sequence listing, part 195

SEQ ID NO: 462462 - DNA, 985 bp, Homo sapiens
cctccaggaaaaacaacagcagcagtatttatttgtcggtaccgaaactcgtatgctctcagctcaccgtcatggatgctctatcagaagcaaatggcacatttgcattaaaccttttgaaaaagctaggggaaaacaactcaaacaacttatttttttccccatgagcatatcatcagccttggccatggttttcatgggggcaaagggaaacactgcagctcagatgtctcaggcactttgttttagtaaaatcggaggtgaagatggagatattcatcgaggttttcagtcacttcttgttgcaattaacagaactgacactgaatatgtgcttagaactgccaacgggctctttggagaaaagtcttatgatttcctcacaggttttacagattcctgtggcaaattctaccaagcaacgataaaacagctagactttgtgaatgatacagagaagtccacaacacgtgtaaactcctgggttgctgataaaactaaagtccacaagggaacgaagaaacaccaccaacagcgtccacatggccttcacgacatggccctgtggacacatcagacgttgtcttgcagtgcctcatccacactatctgtaccactgcaggcctggatacgtcatggttttcatggtgctatcttgtgcctctttgcacctgcacgcactgtgtttcctacatgggatatctgtgtttacaaccaaactcccaggggccaaattatatcctttgtaaaggacttcaaaccaccaggcatttgctggaagtttcacggaggaaaacaagcatttttcatcttttaatctgttttgctggtcaaagaggaaaaggagtggatggacaaagtggggcccaaagtctggatctagttctgaccaacaaggagaaattgatgcacaatggggaagtgaccttggcattttcaactggcagagccggtaagtttgggcacagttcaaatgtgagtctgt

SEQ ID NO: 462463 - DNA, 2127 bp, Homo sapiens
gcaaatgcgtgctacgtcactgtgcgatcgggttgtgcttagcttggggtctcctggccccttgacgcgtcaggttgctgtacccctgcatcggatgcgctgtaccctgcgctggctccgtgaaccttagggacaacaccgggacacccgcgaggccggaaaatggactcagtggcttttgaggatgtgtctgtgagcttcagccaggaggagtgggctctgctggctccttcacagaagaaactctacagagatgtgatgcaggaaacattcaagaacctggcatctataggggaaaaatgggaagacccgaatgttgaagatcaacacaaaaaccaaggacgaaatctaagaagccatacgggagagagactctgtgaaggtaaagaaggtagtcaatgtgcagaaaacttcagtcccaatctcagtgtgacgaagaagactgccggagtaaaaccatatgagtgtactatctgtggaaaagccttcatgcgtctctcatcccttactagacacatgaggtctcacactggatacgagctatttgagaagccatataaatgtaaggagtgtgagaaagcctttagttatctcaaatcctttcaaagacatgaaaggagtcacactggagaaaaaccctataaatgtaaacaatgtggaaaaaccttcatatatcaccagccctttcaaagacatgagcggactcacattggagaaaaaccctatgaatgtaagcaatgtggaaaagctcttagttgttccagttcgcttcgagttcatgaaaggattcacactggagaaaagccctatgaatgtaaacaatgtgggaaagccttcagttgttccagttctattcgagtacacgaaagaactcacactggagagaaaccctatgcatgtaaggaatgtgggaaagccttcatttcccacacaagtgttctaacacacatgataacacacaacggagatagaccttataaatgcaaagaatgtggaaaggcattcatttttcccagttttttacgagtacatgaaagaattcacactggagagaaaccctataaatgtaaacaatgtggtaaagccttcagatgttccacctccattcaaattcatgaaagaattcatactggagagaagccctataaatgtaaagaatgtgggaaatctttcagtgcacgcccagcctttcgagtacacgtgagagtgcatactggagagaaaccctataagtgtaaagaatgtgggaaagcctttagtagaatcagttactttcgaatacatgaaaggactcacactggagagaaaccctacgaatgtaaaaaatgtgggaaaactttcaattatcctctagatttgaaaatccacaagagaaatcacactggagaaaaaccctatgagtgtaaggaatgtgcaaaaaccttcatttctcttgagaactttcgaagacacatgatcacccacactggagacggaccttataaatgtagggactgtgggaaggtgttcatttttcctagtgcgttacgaacacatgaaagaactcacactggagagaaaccctatgaatgtaaacaatgtggaaaagcctttagttgttctagttacattcggatacataaaagaactcacactggggagaaaccttatgaatgtaaggaatgcgggaaggcctttatttatcccacaagctttcaaggacacatgagaatgcatactggagagaaaccctataaatgtaaagaatgtgggaaggcctttagtcttcacagttcctttcaaagacatacaagaattcacaattatgagaaacctcttgaatgtaagcaatgtggaaaagccttcagtgtgtccacatccttaaaaaaacatatgagaatgcacaatcgatagaaactctataaatgtgagaaataggagaaagttttcaattctaacagatgctttcaaagttgtgaaaattcccactgaagagagaaatcctgtcaatgtaagtaatatagaaagcgagatacaagatgattcatgtatagtcaggtaccacataatcatgtttcagtcagcaatggaccatataggttggtagccccataagattatataacacctaaaacatttctatcaacc

SEQ ID NO: 462464 - DNA, 964 bp, Homo sapiens
ctgacacctcctaagatgaactgcagccacgatgcttcttcctaacggctcaatatggggtacagcgcgcggccatcttatttttttgctcaggctgtgccctgaaattaattcactgtcttccaacgccgtggtaacagcccttccgggttctctggtgggagtcgccgagatgggcgtggccatgatacgtcacaatacgaggccgagggaggaattctgtcgtctgggaacggctggtttcgcggtcagacgccgagggccctcgaagtccctagcaacggctgcggagggagatgtaagtcgttttggacgcaggctcagtgtttggtcccagcgttcggtggagtccggagagactcaggatcagatgagtcggggtctggatgtggctccaagtgaaaggcctgtgggggtcagtgaaggggagccccctgttctgagaccgtgtgggaccccgcgtcctggggttctttctgggtttactcaatggagaagcctggctttggtgatagggcgcctggcgctggactacatataaaatttttcaatggcagtatcacatcagaaggttgtaccagtggcttagtaaatggagtcacattaaatgtttgccttaattaggatggaattgacatgtataaaatattcaattctatttctatattttctatctatatataacattctgatactccaattactcaagttcttctgttcccaccccaagatttgtgattcacttttttatgtcctagatcttatggttacatttattcttaagtggcttatactgttttttttgataattcctctagaagaggaagtcattttttaaaaattgagacagagtctcacaccgttgcccaggctagagttgcagtgagccaaaatcacaccactgcagtccagcctgggcaatagagccagaccctgtctcaaaaaaaaaaaaaaaaaaaaaaaa

SEQ ID NO: 462465 - DNA, 514 bp, Homo sapiens
gcggcgcctactactactaaattcgcggccgcgtcgactgctgcgctgcctgcaatttactttcaaatagctcagcagaaacgatacgcagggacaaggagagagcagacctggtgaaacgttaacaactgatgaatccaagtgaagagtgcatgcccttacttgtactgttgtttcaacttttctgcaggaggttcttatttccccctcattgagtctgggctggccgtgtggctgttcaaccaacagaaagcagcagaagtgtactgtgcagtccggggcccaggcttttagagaactgtggctttctctgcctccttcttggaatccacttaccatgttgagaggggcccaagccacatagaggccaacagccaagtatttgcagccatctgggtgagccatctaggacattccacgccaatcagacccctggattggagcagtggagcagacatggagcagatgcagcccagcgaaggccagtatcacaggccagaacaaaatgttttaa

SEQ ID NO: 462466 - DNA, 1600 bp, Homo sapiens
ttggggcagtaatgatttctgagaagcaggtgattgataacgcgcaaattcaaagccccttgggggctgcattgtagcatggtgtggggatggggagacagagggctggtaggatcccgaattcctagtttttctctccctctcccttgcttcttcattttcttccttcaggctttcttccatttctttcttccatcaaatatttgtggagctggaactgggcttcactatcatattccaaggccctgtactgggaacagacaaagaagctcctcccagagactggaagaatggtacaaggtgtgaaaaccaaggcttaaagcatgcaagttatttgcccgaggtttttcagccacaaatgaagaagctgggtctgctccacacctgtgaaccaggctatttccaccataacctgaactcagatgagcaccagcccatggagaatagtccagaaggctgcccatagccttaaaggacagtggatgagcggttgcaggcagagatgacagcatgagatatttcaccaaagagtgggtgtttaaccaccacttgtctaggagatgggcaacatgtcccagagatgattctaacagggaactcttcctggcagagtccagtgaagggaaccaggaaattcgggggcagggcaatcccactctctctgtcaggctctgcaagctccacttccttctccactttcccacaaatatagtgtttcttaaaagcaaatctggttgcatcacactgctgtttgaaaatgccaatgattccttgttgtctatgactcattcccacactgggtcctcagggccacctggatgtagacttttgggtcccaccagggagaactttgatggtgtgcttcaagtcaacagtgatgtctgtggctcggatgaagatggacaggccatgctcagagaattctcaagacttgaaggagtgaatagcttcctggaggacagatggaagaaccccaaagcatccaaaacactaatcctgtgaaatttcatggggaataagggccagttctttctttggttataaatgatcaattgctcaagggatgggggatatctggcttgatcaaacccaaggcgatttcgtgctgaagtacttggggtgattgctgcgctgcctgcaatttactttcaaatagctcagcagaaacgatacgcagggacaaggagagagcagacctggtgaaacgttaacaactgatgaatccaagtgaagagtgcatgcccttacttgtactgttgtttcaacttttctgcaggaggttcttatttccccctcattgagtctgggctggccgtgtggctgttcaaccaacagaaagcagcagaagtgtactgtgcagtccggggcccaggcttttagagaactgtggctttctctgcctccttcttggaatccacttaccatgttgagaggggcccaagccacatagaggccaacagccaagtatttgcagccatctgggtgagccatctaggacattccacgccaatcagacccctggattggagcagtggagcagacatggagcagatgcagcccagcgaaggccagtatcacaggccagaacaaaatgttttaa

SEQ ID NO: 462467 - DNA, 1142 bp, Homo sapiens
cagcctggctaacatggcgaaacaccgtctctactaaaaatacgaaaattaggcgtggtggcaaatgcctgtaatcccagctccttgggaggctgaggcacgagaattgcttgaacccgggagccggaggttgccgtgagccgagatcgcgccgtcgcattccaatatgcgcgacagagcgagactccatcgcaaaaaaaaaaaagtattgttctctccaagccagaactgatcacctgtctggagcaaggaaaaaaacctctgaccgtgaagagacatgagatgattgccaaacccccagatggaattaaattcacctgtctcggccttccaaaatgctgggataacaggcatgagccaccgcacccagcccagttatttcaacaagtgcatgctcaagagtgtgttgtatcatttctatatagctgtaaatttatcaattatttatattattgttttatactctaattccattttttgtcgtagaaggtaatctatgaaatttcggttttaaaaaatgtgttaagtctttgtttttggcctatcaggtggtttataaagaagaatgttgaatgagctattgagaaggctgtgtatcccgatgttgttgaggagtgttctctataccttcattagaaattattgtttttgactgccttttagtcctctgttcccttactaatatcatcttgttgtattcattattacagaaagtggggtattggaaatatcctactataattatattgctctctctgtgtttattcagttttgttagtatttactttatatatctgaaagcctaatttgagacaccacacacaaatacatgcatgtataaacaaatttgtcatacattcacagggaatgaatctatgtattgttaaatgtccttttttgtctgtttgaagttttgacttaaagtacattttataaaatatgacagttttttacttaagatgtagcttgtgtaatattattttgagctcttctgctctaatttggttaatatttacattaaatttctacttccatctcaccactttcagtctttttttgtcattagatctcaactgactcttgtagaaagtcaagttgaatcttgatttcacagaatttttaataaacctttttattgaaag

SEQ ID NO: 462468 - DNA, 1746 bp, Homo sapiens
  misc_feature (545)..(545): n is a, c, g, or t
ggcatcataaacagaattcgaaaacaaaattcccttatgggatatgccagtagaactgcaagtaactatcctaaatcaacatgctaattggagccttaggcagaaacaagatgggaagaggctaccttttgggttttggactcagaaactgccagaggctggaaaaccttatactcctttcaagaagaaattcttagcttgctattgggctttgctggaaacagaacacctctgcttcaaccatgatgtctttatgagacctgaaattcctactatgacttgggtcatgagttccacacaatctcatcagatagggcacgcccaagaaagtagcatcataaaatggaaatggtacatacaagatcagtctaagccaaaaccaaaggggttatcacttttacatgagggtgtaaaaaacttgacagctcatggccttaatgctccacttaaaagatacagaatagcagaatggataagaatttaataaccaaaaatctgctgtcttccagagactcacccaacacacaaagacacacatgaagttnaggtactgagggggcagagccttaagcataatccaatcagggaggctggtctggaaaccctccaatcaggcaggcagctggagcgaagaggacggctttctggtatggcgcggcctttgtctcttgctgccgctggagctccagatctcttgttcactgctctgtgttctctgctcatagaggcccagcctctgaggccctttgacctgcaggtattgggagatccacagccaagagccaggaccccctagaagtctagaaatggtattgttctctccaagccagaactgatcacctgtctggagcaaggaaaaaaacctctgaccgtgaagagacatgagatgattgccaaacccccagatggaattaaattcacctgtctcggccttccaaaatgctgggataacaggcatgagccaccgcacccagcccagttatttcaacaagtgcatgctcaagagtgtgttgtatcatttctatatagctgtaaatttatcaattatttatattattgttttatactctaattccattttttgtcgtagaaggtaatctatgaaatttcggttttaaaaaatgtgttaagtctttgtttttggcctatcaggtggtttataaagaagaatgttgaatgagctattgagaaggctgtgtatcccgatgttgttgaggagtgttctctataccttcattagaaattattgtttttgactgccttttagtcctctgttcccttactaatatcatcttgttgtattcattattacagaaagtggggtattggaaatatcctactataattatattgctctctctgtgtttattcagttttgttagtatttactttatatatctgaaagcctaatttgagacaccacacacaaatacatgcatgtataaacaaatttgtcatacattcacagggaatgaatctatgtattgttaaatgtccttttttgtctgtttgaagttttgacttaaagtacattttataaaatatgacagttttttacttaagatgtagcttgtgtaatattattttgagctcttctgctctaatttggttaatatttacattaaatttctacttccatctcaccactttcagtctttttttgtcattagatctcaactgactcttgtagaaagtcaagttgaatcttgatttcacagaatttttaataaacctttttattgaaag

SEQ ID NO: 462469 - DNA, 1426 bp, Homo sapiens
  misc_feature (545)..(545): n is a, c, g, or t
ggcatcataaacagaattcgaaaacaaaattcccttatgggatatgccagtagaactgcaagtaactatcctaaatcaacatgctaattggagccttaggcagaaacaagatgggaagaggctaccttttgggttttggactcagaaactgccagaggctggaaaaccttatactcctttcaagaagaaattcttagcttgctattgggctttgctggaaacagaacacctctgcttcaaccatgatgtctttatgagacctgaaattcctactatgacttgggtcatgagttccacacaatctcatcagatagggcacgcccaagaaagtagcatcataaaatggaaatggtacatacaagatcagtctaagccaaaaccaaaggggttatcacttttacatgagggtgtaaaaaacttgacagctcatggccttaatgctccacttaaaagatacagaatagcagaatggataagaatttaataaccaaaaatctgctgtcttccagagactcacccaacacacaaagacacacatgaagttnaggtactgagggggcagagccttaagcataatccaatcagggaggctggtctggaaaccctccaatcaggcaggcagctggagcgaagaggacggctttctggtatggcgcggcctttgtctcttgctgccgctggagctccagatctcttgttcactgctctgtgttctctgctcatagaggcccagcctctgaggccctttgacctgcaggtattgggagatccacagccaagagccaggaccccctagaagtctagaaatgagtctcactctgttgctgaggctggggtgcaatggcatgatctcggctcactgcaaccgctgcctcccgggttcaagcgattcttctgcctcagcctcttgagtagctgggattacaggtattgttctctccaagccagaactgatcacctgtctggagcaaggaaaaaaacctctgaccgtgaagagacatgagatgattgccaaacccccagagatggagtctcgctctgtcacctagactgaagtgcagtggtgcgatctcagctcactgcaacctctgccttttgggttcaagaaattctcctgcttcagcctctctagtaactcggattacaggtgcccgccaaaacgctcagctaattttctgtatttttagtaagatagcgtacattatgttggccaagctggtctcaaactcctgacctcaggtgattgccactggctccaagtgtaggttacggttagcatggactggctggttccttttcggtttgtttcgggggcttttcctttctcgggccctttgttcccccccccgggtctttttgcccccggggtttcaaatttggccagggggggaggggggcccccgggaggcggccggccccggggagg

SEQ ID NO: 462470 - DNA, 2205 bp, Homo sapiens
  misc_feature (545)..(545): n is a, c, g, or t
ggcatcataaacagaattcgaaaacaaaattcccttatgggatatgccagtagaactgcaagtaactatcctaaatcaacatgctaattggagccttaggcagaaacaagatgggaagaggctaccttttgggttttggactcagaaactgccagaggctggaaaaccttatactcctttcaagaagaaattcttagcttgctattgggctttgctggaaacagaacacctctgcttcaaccatgatgtctttatgagacctgaaattcctactatgacttgggtcatgagttccacacaatctcatcagatagggcacgcccaagaaagtagcatcataaaatggaaatggtacatacaagatcagtctaagccaaaaccaaaggggttatcacttttacatgagggtgtaaaaaacttgacagctcatggccttaatgctccacttaaaagatacagaatagcagaatggataagaatttaataaccaaaaatctgctgtcttccagagactcacccaacacacaaagacacacatgaagttnaggtactgagggggcagagccttaagcataatccaatcagggaggctggtctggaaaccctccaatcaggcaggcagctggagcgaagaggacggctttctggtatggcgcggcctttgtctcttgctgccgctggagctccagatctcttgttcactgctctgtgttctctgctcatagaggcccagcctctgaggccctttgacctgcaggtattgggagatccacagccaagagccaggaccccctagaagtctagaaatggtattgttctctccaagccagaactgatcacctgtctggagcaaggaaaaaaacctctgaccgtgaagagacatgagatgattgccaaacccccagagatggagtctcgctctgtcacctagactgaagtgcagtggtgcgatctcagctcactgcaacctctgccttttgggttcaagaaattctcctgcttcagcctctctagtaactcggattacaggtgcccgccaaaacgctcagctaattttctgtatttttagtaagatagcgtacattatgttggccaagctggtctcaaactcctgacctcaggtgatttgcccaccttggcctcccaaagtgctaggattacaggcttaagccactgcacctggcctgtgttacatattttgtatatagatatataaatgaggaacattaataacattttaaaataatgactacatctttgttttccaccaacaaccaacatgggtttcatttttattgcatcatcaacagagttggcattttttaaaaaatatatagtggccattctaatgggtgtgagatgatttcgctgtcattgtgtttttttttcatttctctgcaaatgagtaattttgtgcatcctgtcaaatgtttcttcccatttgtgtagttttttgatgaaagttttgtttgttcatttataaatcaagttattgaactttatggtttagtttttagagttgttgatatatttttaatattaacttttttcacatgtaatttgcaaatatattcacccattttctaaatatgttgtcattctcgaattttcttttgatgtacagaaattttgacatctactatagttaatggtttctattcttgtatttgttgctcatgcatttaatgtcatatctaagaaaatggtgccaagacaatgtcatgtctttttcctgtattttttctgaaagatttgttagttttttgtgtctaagtattttatttaaaatatatttttgtatcattcaagaaaataatccaactttattttatcgatgttgatattcagttttcaacaccattttttgaagagatgatttttctctattttgtactcatggcaaccttttggaagatcatttgatcatatacagaagggttcattccggagctctctattctgttctttcatctgtttatctttgtgtcagtatcacattgtttatgttactgtagcttttaactgtaggttgtattaacatctttgaaaaataaagttttttgacccctgagcaagaatatgttgaagaatgtgtcttatattcacatatttttgaatttgcctgtttggcttgtgcttttaattcctagtttcattcagtttttgttagaaaacacaagagtgtgtaattttagtgttttttaa

SEQ ID NO: 462471 - DNA, 1700 bp, Homo sapiens
  misc_feature (545)..(545): n is a, c, g, or t
ggcatcataaacagaattcgaaaacaaaattcccttatgggatatgccagtagaactgcaagtaactatcctaaatcaacatgctaattggagccttaggcagaaacaagatgggaagaggctaccttttgggttttggactcagaaactgccagaggctggaaaaccttatactcctttcaagaagaaattcttagcttgctattgggctttgctggaaacagaacacctctgcttcaaccatgatgtctttatgagacctgaaattcctactatgacttgggtcatgagttccacacaatctcatcagatagggcacgcccaagaaagtagcatcataaaatggaaatggtacatacaagatcagtctaagccaaaaccaaaggggttatcacttttacatgagggtgtaaaaaacttgacagctcatggccttaatgctccacttaaaagatacagaatagcagaatggataagaatttaataaccaaaaatctgctgtcttccagagactcacccaacacacaaagacacacatgaagttnaggtactgagggggcagagccttaagcataatccaatcagggaggctggtctggaaaccctccaatcaggcaggcagctggagcgaagaggacggctttctggtatggcgcggcctttgtctcttgctgccgctggagctccagatctcttgttcactgctctgtgttctctgctcatagaggcccagcctctgaggccctttgacctgcaggtattgggagatccacagccaagagccaggaccccctagaagtctagaaatgcaagccgaggtacttctatagaagggtgcacccttacagatggagcaatgatggaattaaattcacctgtctcggccttccaaaatgctgggataacaggcatgagccaccgcacccagcccagttatttcaacaagtgcatgctcaagagtgtgttgtatcatttctatatagctgtaaatttatcaattatttatattattgttttatactctaattccattttttgtcgtagaaggtaatctatgaaatttcggttttaaaaaatgtgttaagtctttgtttttggcctatcaggtggtttataaagaagaatgttgaatgagctattgagaaggctgtgtatcccgatgttgttgaggagtgttctctataccttcattagaaattattgtttttgactgccttttagtcctctgttcccttactaatatcatcttgttgtattcattattacagaaagtggggtattggaaatatcctactataattatattgctctctctgtgtttattcagttttgttagtatttactttatatatctgaaagcctaatttgagacaccacacacaaatacatgcatgtataaacaaatttgtcatacattcacagggaatgaatctatgtattgttaaatgtccttttttgtctgtttgaagttttgacttaaagtacattttataaaatatgacagttttttacttaagatgtagcttgtgtaatattattttgagctcttctgctctaatttggttaatatttacattaaatttctacttccatctcaccactttcagtctttttttgtcattagatctcaactgactcttgtagaaagtcaagttgaatcttgatttcacagaatttttaataaacctttttattgaaag

SEQ ID NO: 462472 - DNA, 797 bp, Homo sapiens
aaccacagtcatccattctcatgtacttgttatctcatcagagtattgaaagaagtagaaaatcaattgctttcatccatgaacagaataacaactttttagaactgtcttgttggactcaacaacatgaaagggatgaggaagaagcaggactggcagaagaaaagctgagcttcaatgcaggccccaccaccttgtctgtcctttggatgtccatgacaggggcagcatttgtttctatagtaacgatgatgctccttcacggatctccaatacctcgatgttctaacacagccattcaggataccctgcctttcatcatttttagtcagacaggaaaaactgaagggattctttttaacaaaggtgtatctcagaacagaatcaacgttacatgttttcttggccctgttaagtatgctgtacatctggaggcattgcttttaaagtagagcatggctttgcaatacaagattaacattcttcccaaagtctatacggcattgcgaatatcatacattagtaggccccacaaaatctgcatctgttcctgctgctcaagatcaaaaacttttgaatgccagggaaacgtcttattaagtccagactgcttgactcaacactaccacagcacactgccttaaggacaatatccttaaaagagaaattatgctttatggagagcttgttgtatgctggaaactggaccgagctctggccatgccttatactttcttttaacttattgttctgccctttgaattcaataaataaatacctcattcaaaaatgtattt

SEQ ID NO: 462473 - DNA, 1253 bp, Homo sapiens
ggaaacctccacgccattggctgccgaaagaggtccctgtcgcccattgggccggccaggcgaggatctcagccagtgggtgctgaggcacgagaacttcttcgcagccttgggcctgacttggatccactgtctcagatataagaggagcgggtccttctacagggaagagaccacagttctccaggaagccacgatatttcctcggggtgcattgtacgaccctccaacggttgctatggcaggaaaaaacttgagctctggaaaccgtggctgaccccaggcaacagggaccagttcctccttgtgtggttaccaggacacccccaacaccaggtcctaaccccggatttgtagccccacagccagctttgagattctgtgaatccgtgactcttggatccggcatctaagggacaccaatccatgagggatttgacatgactggggactgcacgccagtgctggtgctgatggccgcagtgctgaccgtgactggagcagttcctgtcgccaggctccacggggctctcccggatgcaaggggctgccacatagcccagttcaagtccctgtctccacaggagctgcaggcctttaagagggccaaagatgccttagaagagtcgcttctgctgaaggactgcaggtgccactcccgcctcttccccaggacctgggacctgaggcagctgcaggtgagggagcgccccatggctttggaggctgagctggccctgacgctgaaggttctggaggccaccgctgacactgacccagccctggtggacgtcttggaccagccccttcacaccctgcaccatatcctctcccagttccgggcctgtatccagcctcagcccacggcagggcccaggacccggggccgcctccaccattggctgtaccggctccaggaggccccaaaaaaggagtcccctggctgcctcgaggcctctgtcaccttcaacctcttccgcctcctcacgcgagacctgaattgtgttgccagtggggacctgtgtgtctgaccctcccaccagtcatgcaacctgagattttatttataaattagccacttgtcttaatttattgccacccagtcgctatttatgtatttgtgtgtgtaaatccaactcacctccaggaaaatgtttatttttctactttttataacccttgttgaaataaacaaaggaaaagacactcatgacgttggactgtgtgtctgttggtgtgtatttcctttgtgt

SEQ ID NO: 462474 - DNA, 1328 bp, Homo sapiens
actaaaaagcaaacaaacaaacaaacaaacaaaccctgaagctggaaaccatcattctcagcaaactaacataggaacagaaaactaaacaccacatgttctcactcataagtgggagatgaacaatgagaacacatggacacaaggaggggaacatcacacaccagggcgtgtcggggggacagaaagctccgcaccggagatcctccggtccctgcaccacctgctgtgtgccttcattaggctctgctacctggaaaactgatgggagggaggcattgagtacaagagctctgctcggtgaagcatttcagaactgctgcttgcacactgtccaggcattttacaccatcaattgtgcgagctcccacttattgccactaattgctgcagagagaacgatgctgaccacggcagagcagctactaaaccaaggaagaacattcctgccacttcagttcaacagccatctgaagcccacctgtgagctggtccaggaaatgatggactctgatttccacacccctttcctgtgaacttgtctccaatttagtctgtcaaggtccctttcttgtgagttaatttctccctagtgctacttctcagattggccagtgactcacagagtggcacaagtacaaatccagcctgccttgcatccaacacagattccaggaccactgaaaccagctgaggcatcctgaaagcctaagattgaccacaccagaggaaccagactgcccttcacaaggatggaaattatctggttccacccctggatatgatcaaccttcatagactgtgcattatacatgccatctctgcgacctgcaaagatgaaaagggaaagcaggagatggaaactggtcagcagccttctggtttatcagccacacttacaaaggtcaaatgtgcaaagcgtcagaagacagtggttagagtgagattctacatgctctcaatgaagaataaagcatgcaggaagaacctttcaaaaggttacaaccagagacctgaaggaagcaaggaagaaagccacatggttgtcaaagagaagaggaaaggagatcactaagctggatgacgttttctgtttctttgaaaacagagaagatgacaagttagggagagatcagaggtcatactgtgaagcacctttggataaacggcagggactttggattttctttttgaatataagcataatccattgaaaggtctcatgcagggaagtggcaaaacacttttaaaatttttcatcttttctttctgaagcagagttcactctccatttatttgtcttctttgatatctctcaatagaatgtt

SEQ ID NO: 462475 - DNA, 868 bp, Homo sapiens
actaaaaagcaaacaaacaaacaaacaaacaaaccctgaagctggaaaccatcattctcagcaaactaacataggaacagaaaactaaacaccacatgttctcactcataagtgggagatgaacaatgagaacacatggacacaaggaggggaacatcacacaccagggcgtgtcggggggacagaaagctccgcaccggagatcctccggtccctgcaccacctgctgtgtgccttcattaggctctgctacctggaaaactgatgggagggaggcattgagtacaagagctctgctcggtgaagcatttcagaactgctgcttgcacactgtccaggcattttacaccatcaattgtgcgagctcccacttattgccactaattgctgcagagagaacgatgctgaccacggcagagcagctactaaaccaaggaagaacattcctgccacttcagttcaacagccatctgaagcccacctgtgagctggtccaggaaatgatggactctgatttccacacccctttcctgtgaacttgtctccaatttagtctgtcaaggtccctttcttgtgagttaatttctccctagtgctacttctcagattggccagtgactcacagagtggcacaagtacaaatccagcctgccttgcatccaacacagattccaggaccactgaaaccagctgaggcatcctgaaagcctaagattgaccacaccagaggaaccagactgcccttcacaaggggaagactcctgaacttgcctcacccaaagatatgatgtacgcttcagacaatgctggactgatgtgttcaattaaacaaatgcaccaataaaatgctgcatgtaaaaagagtaaa

SEQ ID NO: 462476 - DNA, 3345 bp, Homo sapiens
gaggagagaaaccaaggagagttggcttaggttgtagcaggacagcgcccagtgagaaagcagaaggaccttggacagggggagctggcaaatgccctgtgggcaggtccccaagtcaactggagcggactcccttattctctgccccaaagatccttggacttttacatctattcgcatgttcattaactcccaagaacgccagttggctgacatgtccctgttcattgcagattcctggctctgttactctgggatcatctgctggaagtctctggagcaccaggcctggattgcagggaggaacaaaaaccaacatcctgcctttgtgaagtcacaagatgatgccttaaaaccaacaaatacttttcaacctgggcgtccccacacacgatcatgtccagaggggtgcaagtctcagctgtgtctacatggaaggaaaagggggaaacatctggatgaaagccagcaacgtcctgccactctgccagatgctgcccacatctggacattcaaaaagtgatctgttcggtggcttagcagtcgagaagcaaatggtcagcccacatcaccctatccatcagaacacagagcccgagtccctatgcacaattacccagattactgaaggactcataagactctcacggggactcagctccggcccagccatggctcagaagccttgagtacccagcccaggccactgactgatgaacgcaggtgagggtaccgcccttcacttctggcctgtctggcagaggaatttacattcttttgaaacccatcatataaacaggtttctcgacaagaaaatatttattgaatgacagtaaccaaaacaatacagggtacttggcaaaatgggggtttttgcttcattcagatcaaaatctgatcccagcttggcctcttctcgctgtgtgaccttgggcaagtctcttcacttctctgaactttgtttttcccacacattaagtgaggatgacaattcatgtgacatgagatggtggcaaggcttaagtgagacagtccatgtaaatgcttagcacctggcacatagtaggtatttaacacatggcagctatgattggttgtattgttattgtcaaccatcactactaccaccccaccattttggggtgcctacttttattgctggcagtgggctgactgatggcccttagggacaccacctccttgctcagcatctcatttggctcatctgtgaaggctatttttgccatccccagctcatagggctatgaaaagaggctgcttagccacatggtggtgatggccatcttccctcttggcatcagagcctggccagcaaccaactgcccatgggcagtctacttgcttgggtccaaggacatgaggctgattgcaaagcccctactcactgggcaggacctctaaagctgctctcagctgttcccttctctgtggccatttacaaccagcccagtgtctgccacttgggaggaaggaccttaactcagacaattccatccaccgcctttgaggactaggggaataggggatggggaggatggggagacgagggaagtatgtctatactagcagagaaaggggcttaaaccatccaaggacctggcgatcatgagatccaggtttaaatcttctattcattcatttgtccattcattcattcattcaccacacatctaccagcagaaccagtggtatatgcagaggatatatagacagtagaagtaatgcctgccccaatgaagattgcacttcagcagtatgacctcaagaaaattacttgacatctctggtcctattaaggaaatcatctaaacatccctcactcagggaacaggatgacttcactagtggtgggtgctctaaggaaggggaaaggtagggtaatctttggggttagaatcacaattttcaatcccacccacactcaagagactcactagagagtcaatgttccagattattagggccagaaagtgaccctacaggtcacctcaggcagtcctttaacagacgggaaacctgaagctcagagaagggaagtagtttgcccaagggcaaactgggagtctgtggttaagctcggactaggatccaggtcccctcacttccagtccagtgctccttccaccacaccatgctgggactactcttctttcaacccagtttctggatttgaaggacaacagcaggagaggtgtcaaagggcaagccaggtcatggctaccagatctcatggctagccagatctcgaggggggttccagaatgcttcacccaaagttcttggccccttggagagatcactggggctctgtggcatctggccctagaaaacttcctggggaggggaacagaagctgctgaggccacggtggagggtcgtcagatttccaaagagagagtaacggggacatggaacctgcagtgaagaaggcaagtctgagagaatggagtcagctccccctaagggtcagctgtgcccacatcccagcaaagactgggtcagacccagcctaaggaaagttggggagagaagtgaagacagtggggaaggatgactggaaagaccaaaaaaagagggtgcatgtgcgtgtgtgtgtgtgtatgtgtgtgagagagagagagagagagagagagaaacctgggggagggaacagagcagggaaacagagggtacaagcaaagaatgcggaccctgattgtacatgtgtgtgtctggactaaggttagagaaagaggagtgagtattgaggtagagagccaagcaaaatggaccctgggctgaaaatggagattctgtaaggcacctgtccaggctgggcttctgcctggagcttccaccgagccacagcctcctccctccctccagaagatcccctggtcccctggcaggtgtagtagtaggaggtggggagggggtgtttgctctaaatccccatgcttcgcccataggagcaggacagtgtgtgtgtgtgtgtgtgtgtgtgtgtgtgtgtgtgcacgcgcgcgctgggggtggaagtgtgtctgtgcttgggagtctgagtggctttgtgagtcactgggcatcggtgagaacaccaggtggtgggctctggaatctggggcttagtcagtgagtccggagacagcaacctcgagtgcagagcgggggcgaagatgctgcccaggtccacgaacgtgtgtgcttgtgagatctgtccgcccacgtgcgtgtgaaccgtgggtctgcgtggattgtgtgcgcctgaggattgtgggtgggtgtgtacttgcgcgagtgtatgtgtgtggactgttttccagtggtctgtagatatgtgtgtgc

SEQ ID NO: 462477 - DNA, 1238 bp, Homo sapiens
ccccctttgccacccacagtcccctcctgtcccctaggggggcaggaatgaggggctcgagggagactgggaggtcgcgatgctgagttccacgagggtggggccgggccggggccggtggggccgggatggccggatgccgaggccacgggtggggcaagcccgtggctccctcctccctcgggagctgttggacctgttgtcccccctccacttccgggctgctggggagggggaccgggcggcctctctcctccctcttcccctgccacctgtctcataggcagaagcggccgtgcccagcgcgcagagcggagcgcgccgaagcctgagctggtgagggggccgaggctgtggggaggtggcagttggacttcggaatctcaaggactccgactcctggcttgttcagagaaggagagccccgactcctggatccctgggagtcccagcggccatggggacgcgaagcagccccgaggaggggaccccgccgccgctggtcccggaatgcgacgtggaggtccagccccagggccatcccgaggagtcccgggaacaggaggcatccgaagtcctggcggaaccttcgagccgcgggggagctgagcagcaggcagaggaagaagaagtgggagaaggcagcagcactgagagcagccgcgacgcgcccgaggctacgcctccgatagctatggcggccacacctcccgcatccacctcttcgcgggaaggggtgcgaggggcggcgcggcgcctgcaaggacagcagctggaggcattgactcgtgtggccctgatggagcagcgagtgaaggagctacagcgccagaggaaggagctgaggatcgagatggaggtggaggtggccttgctgcggggtgagctggctggggagcgagtggccgctcgccgggaggaggagcagctgcgggagctgctggagcagcaggcggcctcggagcagcgcggccgccagcagcgggaacaggtctgtttggctcaccgggtcttcatcagcagtgtccttcctggtccatggatgttggtgtgctcctagccacctgcgccccggggttgtccccattccccaaaggaagacatttgggctcctgagagagtgaggggcagatgcccctcctggttttccttctccctccctgggcgagatttttggggctcttcctttgtcccctgtccgtttgctatttaaatgtgggtgtgtaaaaacttccaaa

SEQ ID NO: 462478 - DNA, 1696 bp, Homo sapiens
ccccctttgccacccacagtcccctcctgtcccctaggggggcaggaatgaggggctcgagggagactgggaggtcgcgatgctgagttccacgagggtggggccgggccggggccggtggggccgggatggccggatgccgaggccacgggtggggcaagcccgtggctccctcctccctcgggagctgttggacctgttgtcccccctccacttccgggctgctggggagggggaccgggcggcctctctcctccctcttcccctgccacctgtctcataggcagaagcggccgtgcccagcgcgcagagcggagcgcgccgaagcctgagctggtgagggggccgaggctgtggggaggtggcagttggacttcggaatctcaaggactccgactcctggcttgttcagagaaggagagccccgactcctggatccctgggtgaggcggcgtgggcacggttgccctgcacagtggggtcgggactaagactacggggctccgggaaggatggggcgggagccgaactgctgagtctcggagggagaagatgggtcgctctaagcgaatccaagagattgtagggggctgctgggagggtacaaggcctgacacctagagatgagggaggggaggcggggtcgaagaggtcagtagggggcgtgctacgacccggactcaaattccggtcccgtctccggtggcgtgtcgccttggagccatcaagccccgcctctggaaacttcaggacacgcctccgtaacgctcagttccatcctttgaactcttaggccccgcctccttggggggggggtctccgcgccccgtagcagacgcgagcggcgctcagccgtccttagggcccggccccggagcttctggtcccgcccaccccgcaggagtcccagcggccatggggacgcgaagcagccccgaggaggggaccccgccgccgctggtcccggaatgcgacgtggaggtccagccccagggccatcccgaggagtcccgggaacaggaggcatccgaagtcctggcggaaccttcgagccgcgggggagctgagcagcaggcagaggaagaagaagtgggagaaggcagcagcactgagagcagccgcgacgcgcccgaggctacgcctccgatagctatggcggccacacctcccgcatccacctcttcgcgggaaggggtgcgaggggcggcgcggcgcctgcaaggacagcagctggaggcattgactcgtgtggccctgatggagcagcgagtgaaggagctacagcgccagaggaaggagctgaggatcgagatggaggtggaggtggccttgctgcggggtgagctggctggggagcgagtggccgctcgccgggaggaggagcagctgcgggagctgctggagcagcaggcggcctcggagcagcgcggccgccagcagcgggaacaggtctgtttggctcaccgggtcttcatcagcagtgtccttcctggtccatggatgttggtgtgctcctagccacctgcgccccggggttgtccccattccccaaaggaagacatttgggctcctgagagagtgaggggcagatgcccctcctggttttccttctccctccctgggcgagatttttggggctcttcctttgtcccctgtccgtttgctatttaaatgtgggtgtgtaaaaacttccaaa

SEQ ID NO: 462479 - DNA, 1128 bp, Homo sapiens
  misc_feature (3)..(3): n is a, c, g, or t
  misc_feature (5)..(6): n is a, c, g, or t
  misc_feature (8)..(8): n is a, c, g, or t
  misc_feature (11)..(11): n is a, c, g, or t
tgntnngnttncaggtggagccaatggagggtcctggtgcgggggagtcggcgttggcgggtgattgatggtttaatatctcgcgctgcgacccgggcccctcctcgcccacgcctctgcgggcggcccccagtgagaggtggtgtgtcgggagtttgttccttctgatgttcggatgtgtttggaatttcttctttctggcgggctggtggtcccgctggcttcggcagtgaagctgcagaccttcacggcgagtgttgcagctcttaaggcagcacacataaaggttctccaagtcccactggactcaggagtccagctggcttcacatagtggatcccgcaccagggcagcaggtggagctgcctgccagtcccgcgctgtgcgcccgcacttctcagctcttgggtggtcggtgggacccggcgccgcggagcagggggcggcgctggtaggggaggctcaggccgcacaagaggccatggccgagaattcgagcacagcgccgggacccggcgaaccctccgcagctgctggcccgggtgccaagcccctcactgcccagggccggcagcgccagcctgctgctccgagtgcggggccacggagcccacacccacctggaactcacgctggcctgcaagtgcagcgggcagccctggtttccaccagtccgcacctccccacaagctgagggagctggctccggcctcagccaacccagagaggggcttcatgtccattttgggtcgttgcaaggaggttctgctcatcatagtctccgatggaacagccacattctggaacattatgaaacattgcttgctgtcacgctggaaggaagaaaggcaagagcaggaaatatctggccaacagaacgaatggcctccaactaacagcatcttgtgaaaataaaatgagttaatgaaagttaactcacttaagacagcacctggtatatagaatgtggcaggcatgtgccacgtatatgccaggtgtgcaccaggtatgtgctgtgtgccaggtatacaccaggtgtgcaccaggaatgtgcaaccactgaggcacaggtcagggcacactggtgcctggttctgaactctgaccacactcatgtctggtcatagc

SEQ ID NO: 462480 - DNA, 796 bp, Homo sapiens
gttgagttgccttttgagtgttaaggatctgtcagagaaccgttgactgtgagggggaagcttgccccagtcctcagaacctgtgaatacaatgctttgcatggcaaaggggactttgcagatgtgattaagttaagggtcttgagatgggaggattagcctggataatccaggtgggccctgtataatcacagcggtccttatttgagggaggcaggagggccggggttagagaagatgggatgagagaagtgatgtgcttgctggccatgggccaaggaattctcgcagcctctggacgctggaaaagatgaggaagtggatttgtccccagagcctccagaaggaaggcatccctgccggcaccatgacttcagcccagccctgtgagtgcctcgtcgtgcgtgtggccccagacctcggagaaaggatcacgctaagcggtgacaaatccttgatagaagaagtatttccagagatcggcgacgtgatgtgtaactctgtcaatgcaggctggaatcacgactcgacgcacgtcatcaggtttccactaaatggctactgtcacctcaactcagtccagatggagaagtgtaggggagcaagagatgtgggggtggaattgagaactcagaggctaatgtgtgctgagcaccgactctctgccctaccctgggccatggcctgagcatgtgttgtcttcttacaaccctaacaggtcctcgagaggttgcagcaaagaggatttgaaatcgtgggctcctgtgggggaggagtagactcgtcccagttcagc

SEQ ID NO: 462481 - DNA, 2507 bp, Homo sapiens
tagaaaagtttgaaaaaaaagaggctgaacggtcggaattcccgggatgagggagggggcgacgggcggcctctcggggaaaggcgagagcaggctcccgctgacagcagggctcagagatggggtcccctctgataattctgtaatcatcctctgttgaaaataaaggtctacaaagtgtccgttaccctggagctgtacaagtcacacacagctccattggagagaaaactggatggaaccatttgactgaaaatccatgtcaaaaggccaacaagaaagagctgagacactgcagaaagagcaggaataaataagaggtgaagacagacagagaccagacaaggaggactcaattacagactgacagaagactcaaggaagaaaatgaagctggacctgtgaagaactgtcgaaacagctgtagaggaattgtggtggaggcagtaatggctcctttagtagcagagaatagaaagatctcgaaaataaagcctattgtcaggagacttgcacccatcctggcctacttccaagtagaaacaaaaacagaaacgaagatatccatgatacctaatgttacaaggagaagaaagcacttgtaatcacaagggtactgagaaaaggtaacagacacatttatatatgtggaaccaggaatctttctgatgactttcagaaagggtggacatacaaataaaaatcaaccttcttcttggtgaggatttgaccctggttccatattaacccaagagctgataagcacaaacctggagtccagtttttatgcaaatataacaactctgcttataccttgaattacttgtatgaagcggggaaaattttttactctctctgaacccataattaaaaaaaatctgtatgacttggataataaacccacttcctagaatttttatgaatatgaaatattgtgtgaactacctaatttggctcttttctatatatctttcttcgtttcaattcatgatattaatttttggcctagtattgtaattgggaaagcaaatcatagaggaaactctgattatgtttcaccctaaatcacaggtaataataaagaatatcaacaggtacacttcaactatggtagatttaaaaaagcatagaactattattactaatatcagctgtgtctagtgattgatgtcttaataaatatcaaatatccagccttgatccaggatattttatcaaaagcatatttgaattttggcaagtaattaatgcaaataaaaaattaaagggctgattgattcagatttcaaagatatgactctatttgctagtgaagaaatgacccaagttaacagattgttatgataatgctaaatatttattacattttaataaatttaccatacactctgagcacttcaaaaagtgattctttgttagatgaatttgagttgtttacagatataaaaagtagacaaaaaagcctaccttgcatttctataaaatcaaaatccagaattttcataaacttgaattatctttcccaacagttagatggaattaatgaggtttcactgaatttctaaactcttttttacttaccaacagatgtgtacaaatgtctcttttggaggaatgtaaaccatcatggtctcaggaaactgggccatgattgagacatttcaaggaaaacaaagtgttgaagaacagctgactgcataactaagaaatcaatcattgctcaggatgctttattggcataattggcaatgatttatagaatgatggcaagagtccaattgggcatgtgtatccttaatatccttagcactctggcatggaatctttgttaagacaacataattggactggggaagaagtttcagaggtacctatttaaattagttaataaccaagaaaaaaaattcctattaatttgtctaatagtgtgaacatttgtgagattttaatggaatctggaagcaaagttgtgctcaaagcaaatacatctgaaaatatctctcaaacagttgtgtaatatctagtgttttgcatataactagtgtgatattgctttattaatcaatattgttacataaaaaagttgtgtacagaaaatacgtctgttgaatcctgaggacacgaaaaggggaatagaggcagtgagtgtgaaattggccaactgatagattcagttcatttaaaaggagtaatgtaaggtttatctactgcattgcatcttgtaacttacttgttaaatttattcaggaaagatggctttagtgatttttctggaaactaactagtgggttgtgagagataattaacaaaacttcctgtttcttctcttggaacagatggatatttttgaaatgcagcagaacactgagctcagtttgagggcatgcatagttgagttgcttctatttgtataatgaggagctacttgcttgtattccagaggtctacagacttatctgcagagttgtaccactcatttccagggaactaagctgctaaatgcagcc

SEQ ID NO: 462482 - DNA, 3135 bp, Homo sapiens
catctctccttctactctccttatatctcacctcctttgaaactttcaaaaagaggagccaatgttaatagccaagacaatgggaaaaatgtctccagggtatttcagagatcttcacagcagaccctctcatcacaggcctggaggcctgggaaggaaaaatagtttttttgcaccaggaccaagaccctactgctctgtgcaaccttgggacatggtgtcatgtgtcccagcagttccagctccagctgtggataaaagggcccaaggtacagctcaggctgttgcttcagagggtgcaagacccaagcctttgtggcttccaggtggtgttgggcctggcaatgcgagggaaaatgtggggttggagtccccacacagagtccccactggggcactgcctagtggagctatgaaaagagggtcactgcccttcagaccccagaatcatagatcaactgacagcttgcactatgcacctggaaaagctgcaggctttcaatgccagcttgtgaaagcagttgtggggctgtacactgcagaaccacagggactgagctgcctatggccctgggagcccactccttgcatcagtgtgccctgggtcctttctccagatatctatgttgtccatctccctgttcattcaggactctgttcaaatgatactccttcccggcaagcctatcacaaaaggaaccttctgctcataaattgaagtttaacttcattttttctggttttgttctttcaaaaacgaagataattctgtaatcatcctctgttgaaaataaaggtctacaaagtgtccgttaccctggagctgtacaagtcacacacagctccattggagagaaaactggatggaaccatttgactgaaaatccatgtcaaaaggccaacaagaaagagctgagacactgcagaaagagcaggaataaataagaggtgaagacagacagagaccagacaaggaggactcaattacagactgacagaagactcaaggaagaaaatgaagctggacctgtgaagaactgtcgaaacagctgtagaggaattgtggtggaggcagtaatggctcctttagtagcagagaatagaaagatctcgaaaataaagcctattgtcaggagacttgcacccatcctggcctacttccaagtagaaacaaaaacagaaacgaagatatccatgatacctaatgttacaaggagaagaaagcacttgtaatcacaagggtactgagaaaaggtaacagacacatttatatatgtggaaccaggaatctttctgatgactttcagaaagggtggacatacaaataaaaatcaaccttcttcttggtgaggatttgaccctggttccatattaacccaagagctgataagcacaaacctggagtccagtttttatgcaaatataacaactctgcttataccttgaattacttgtatgaagcggggaaaattttttactctctctgaacccataattaaaaaaaatctgtatgacttggataataaacccacttcctagaatttttatgaatatgaaatattgtgtgaactacctaatttggctcttttctatatatctttcttcgtttcaattcatgatattaatttttggcctagtattgtaattgggaaagcaaatcatagaggaaactctgattatgtttcaccctaaatcacaggtaataataaagaatatcaacaggtacacttcaactatggtagatttaaaaaagcatagaactattattactaatatcagctgtgtctagtgattgatgtcttaataaatatcaaatatccagccttgatccaggatattttatcaaaagcatatttgaattttggcaagtaattaatgcaaataaaaaattaaagggctgattgattcagatttcaaagatatgactctatttgctagtgaagaaatgacccaagttaacagattgttatgataatgctaaatatttattacattttaataaatttaccatacactctgagcacttcaaaaagtgattctttgttagatgaatttgagttgtttacagatataaaaagtagacaaaaaagcctaccttgcatttctataaaatcaaaatccagaattttcataaacttgaattatctttcccaacagttagatggaattaatgaggtttcactgaatttctaaactcttttttacttaccaacagatgtgtacaaatgtctcttttggaggaatgtaaaccatcatggtctcaggaaactgggccatgattgagacatttcaaggaaaacaaagtgttgaagaacagctgactgcataactaagaaatcaatcattgctcaggatgctttattggcataattggcaatgatttatagaatgatggcaagagtccaattgggcatgtgtatccttaatatccttagcactctggcatggaatctttgttaagacaacataattggactggggaagaagtttcagaggtacctatttaaattagttaataaccaagaaaaaaaattcctattaatttgtctaatagtgtgaacatttgtgagattttaatggaatctggaagcaaagttgtgctcaaagcaaatacatctgaaaatatctctcaaacagttgtgtaatatctagtgttttgcatataactagtgtgatattgctttattaatcaatattgttacataaaaaagttgtgtacagaaaatacgtctgttgaatcctgaggacacgaaaaggggaatagaggcagtgagtgtgaaattggccaactgatagattcagttcatttaaaaggagtaatgtaaggtttatctactgcattgcatcttgtaacttacttgttaaatttattcaggaaagatggctttagtgatttttctggaaactaactagtgggttgtgagagataattaacaaaacttcctgtttcttctcttggaacagatggatatttttgaaatgcagcagaacactgagctcagtttgagggcatgcatagttgagttgcttctatttgtataatgaggagctacttgcttgtattccagaggtctacagacttatctgcagagttgtaccactcatttccagggaactaagctgctaaatgcagcc

SEQ ID NO: 462483 - DNA, 1546 bp, Homo sapiens
ttcacactttaaagtgaaagcaagtttactaagcaagtaaaggaacaaggcagggtgcagtggctcacgcctgtaatcccagcacattgagagaggctgaggaatacaggcatgagccacagagcccagccaaaactacattttaaaaataattttttatcattacacactccactagaaaccatttaacccaatttatggacttacatttcttccattgaagaacttgaaggatccaaaaatcgaggtgacattctcagatttgtgtggcaaaaaaagaatagaaaaataacagatgcaaagaatgtgttccaccaatatgtggaggatcccttttattttaagttcagggaaagcattggaatgatacaagaaaataaactgaaattgtataatgtggaaacaagagctctgttgctaatatgcaagtttatcactgagattttaacaacacaacatgctaattataccttaaaatatgtttctcccagtctgggcaacatggcgaaaccccatctctacaaaaaaatccaaaaattagctaggtatgctggtgtgcacctgtagtcccagctacttgggaggctgagagaagaggatcacctgagtccaggaggtggaggttgcagtgagctgagatcgcaccactgcactccagcctgggtgactgagcgagaccctgtctcgaaatattacaatatgtgacagcgcagcttccatcagaaataatttgttcctcttttgcccacacaaaatattcacctccacttcctctaacatttttttttaaaaaaaaaagcccaaacataactttcagttgcaagcaaggatctcatgacagtctcatgacacttctgttcactgagagcccaatagagtcctcgtcactcacgacatttcatggtggaacagaaaaataaaacctgaattaaccctcacattcagaaaagggaaacaaagaaggtactacccagtaggtccatagcaaatgtgcaattttgctgagaagatgagttagggcctggttccaggaggtcaggaatgaataacagtacttttcatggctacagttctcctgagaataggtttccagtccactatattttgtcgttcttaacttcacccgatgacatccctcatgcagtatcagaaagtatgccctccttctgcagcaggtggatcacaagatcaggagttcaagaccagcctggccaagatggtgaactctgtctctattaaaaatacaaaaagtagccgggcatggtggcgggcacctgtaatcccagctactcaggaggctgagacagagaattgcttgaacctaggaggccgaggttgcagtgaactgacattgtgccactgcactccagcctgggcaacagagagagactctgtctcaaaaaaaaaaaaaagaatccttcttctagtacacagatgcattttaaaggggtcttctctactgctttttctctcaaaatcaatttcagtttggcctgtctgttcacatttacatgaggatccaaattgttgttttcataggtaaatg

SEQ ID NO: 462484 - DNA, 540 bp, Homo sapiens
ttcacactttaaagtgaaagcaagtttactaagcaagtaaaggaacaaggcagggtgcagtggctcacgcctgtaatcccagcacattgagagaggctgaggtgggcagattgcttgaacccaggagttcaagagcaacctgggcaacattacaaaactctatctctacaaaaaatacaaaaattagccaagggtaatggtgtgcaccagtagtccaagctagttggaaggctgaggttggaaattgcttgagcctgggagaatttttttttttgaggcagtgtctggctccggtcacccaagcagtagtgcagtaatgccatctcggctcagactctaattcaacacggaatgttgagcttctgagcgtgatatagcggaagtgccttctcttccggtctctctggtcttggccgcagaagccagatgacgaagggaacgtcattgtttggaaagcgtcgcaataagacgcacacgttgtgttgccgccgtggctctaaggcctaccaccttcagaagtcgacctgtggcaaatgtggc

SEQ ID NO: 462485 - DNA, 2169 bp, Homo sapiens
tgcctgtgcctgtttattacacgagtatattgcatactggctccaacttgcttctgctttgccatatggtaacacgccgtattatggaagcaccatcattaccgccatttgcaggggaagcctaaagagataaatgccagccagcatccctgtctctggggccctggagaggccttcaacacacctggcctcactgccctgtggcttcaacaaagaggccgagcatctcctataaaccttgaggtccatggatgacatagcggaatgatggatttcagaaaaggcaggtgcttcccactctttaaatttttgtttattctttccaagtttcccatcaacagccctgcagtaaaaattcagggcttcagagacaaatatttcatgagtacagactgtgatgaggaaaagcaagccattccctctctatcaggatccagagcacactgctgttacgactccagaaccgataaggaagctatgtgtggaagtatgagctcaggtcgccttctgaccctctgtgacggtctatttcaggcagttatggatagataacattacagacactggtaattaaaacaacactaattttgtctctgtggtcacgctttgttgttagaagccatctatcatggccttcacgcatcacgcaatgagaagacatttgtctacgtacattgtgcttggtcaacggttttacggatttccccgcgtacctggacacccaggcacttttaaagacgtactgccttcatttctactctattactctgattaataaaacattttgcatgcttcatcaaaacaccctgcaagcttttcaccacatatattcatggggggggaagcaatgttaatttctttcccttttagaaagaaactaacaacaacaacaacaaaagaaattctcttttggattggaagagagaaagaaaaattcaaatatggaaatatttgtcttccctgtaaaacagagtccagcctaatgaaaagcataatattaaaacacacacacaatgccaagcatctcctttaaggctacacgtatttttgactatatctgctgtaagcagtcggctgctgtcattaagcaaaaaggccaagacaatgtgagtttatctggtcctacctgcatttctactcatcgttggactgaaacaaatgggaaagaaaaacttactgacttttggcgaactacaaagactatttggatccagcgtttgcttcgaattccgggcaatacgcttaaaacaaattacctgtttgtcttggatggcctttgcaatgagaaccctaggcctgcaagacctctgagattcattgacctcaccagcccacccacaaagaaagatacgtggatactccctgtattgcccagtcctggctacaatggcagggaggagcaggcaaacagcctccccgtcaaagatgttacaatctggtcaatgtacactggggtaggacacgtggggagtcaaatatacatcaatttctggcaacacacggcaagaaaacacagatgcccaaaaggacatcaactcaagatttccagtaaaaccaaacccagcttgggtcagatgcacctttccagcaaccaccatctcagcaacaacctgccagctgtcaactggaagttcagcttctgggaacttcagcccccttctcagaggagcaaggtcctagcaccaacagcacctgcagtggagcccaagtatggctgcttcatggagaaggcaggtaaagaggggtgtgcacactgtctcagggtggcaactcttattgataacgaaggcattgtggccttctgacgggtactgctgcccactgacaggtgaaagcattttgttgggttttttttttttcaaattgctattgctatatataaatgtaacgtatagcaataaccgtagaaagatactgtgcccttgtgtatggataattaaaataggaacatctctggactaaattaaaatgtgtaaaaaccaaatccttatagcatccatgaaattacagaagctacaagtgaatcactagcccagggacgaagcatttctctcattacttcatgaacctcttccatgatcacagttttacattttcacaaatctacatggttctttttatgtcactaaatatctcagctcacttttactgccctccttatagacatgc

SEQ ID NO: 462486 - DNA, 645 bp, Homo sapiens
cggcacgagggccatttgcaggggaagcctaaagaggctgataaaatgactagctacacaggacccagagggatgtgccgctccacctggttcccgccgcatcttcccccgaggagccactagtcccttcctcctggaacagataaatgccagccagcatccctgtctctggggccctggagaggccttcaacacacctggcctcactgccctgtggcttcaacaaagaggccgagcatctcctataaaccttgaggtccatggatgacatagcggaatgatggatttcagaaaagacacaatgaacaaaaaccagagcttttgaatacagatttccagtaaaaccaaacccagcttgggtcagatgcacctttccagcaaccaccatctcagcaacaacctgccagctgtcaactggaagttcagcttctgggaacttcagcccccttctcagaggagcaaggtcctagcaccaacagcacctgcagtggagcccaagtatggctgcttcatggagaaggcaggtatctgtttgcgtgcaaatccgtgagtgcttgcatctcgtgtatttgaaaatcctgtttaagaatgcagaggtccatatagtgtcattaaaacaaatgagtataaccctttggtcatcta

SEQ ID NO: 462487 - DNA, 434 bp, Homo sapiens
cagtcttcatttctcagcggaaaagccactcccttgagactctccaggcaccccccaaccgcattttttatcaagtgtctaaaagacacaatgaacaaaaaccagagcttttgaatacagatttccagtaaaaccaaacccagcttgggtcagatgcacctttccagcaaccaccatctcagcaacaacctgccagctgtcaactggaagttcagcttctgggaacttcagcccccttctcagaggagcaaggtcctagcaccaacagcacctgcagtggagcccaagtatggctgcttcatggagaaggcaggtatctgtttgcgtgcaaatccgtgagtgcttgcatctcgtgtatttgaaaatcctgtttaagaatgcagaggtccatatagtgtcattaaaacaaatgagtataaccctttggtcatcta

SEQ ID NO: 462488 - DNA, 2013 bp, Homo sapiens
tgcctgtgcctgtttattacacgagtatattgcatactggctccaacttgcttctgctttgccatatggtaacacgccgtattatggaagcaccatcattaccgccatttgcaggggaagcctaaagagataaatgccagccagcatccctgtctctggggccctggagaggccttcaacacacctggcctcactgccctgtggcttcaacaaagaggccgagcatctcctataaaccttgaggtccatggatgacatagcggaatgatggatttcagaaaagcacactgctgttacgactccagaaccgataaggaagctatgtgtggaagtatgagctcaggtcgccttctgaccctctgtgacggtctatttcaggcagttatggatagataacattacagacactggtaattaaaacaacactaattttgtctctgtggtcacgctttgttgttagaagccatctatcatggccttcacgcatcacgcaatgagaagacatttgtctacgtacattgtgcttggtcaacggttttacggatttccccgcgtacctggacacccaggcacttttaaagacgtactgccttcatttctactctattactctgattaataaaacattttgcatgcttcatcaaaacaccctgcaagcttttcaccacatatattcatggggggggaagcaatgttaatttctttcccttttagaaagaaactaacaacaacaacaacaaaagaaattctcttttggattggaagagagaaagaaaaattcaaatatggaaatatttgtcttccctgtaaaacagagtccagcctaatgaaaagcataatattaaaacacacacacaatgccaagcatctcctttaaggctacacgtatttttgactatatctgctgtaagcagtcggctgctgtcattaagcaaaaaggccaagacaatgtgagtttatctggtcctacctgcatttctactcatcgttggactgaaacaaatgggaaagaaaaacttactgacttttggcgaactacaaagactatttggatccagcgtttgcttcgaattccgggcaatacgcttaaaacaaattacctgtttgtcttggatggcctttgcaatgagaaccctaggcctgcaagacctctgagattcattgacctcaccagcccacccacaaagaaagatacgtggatactccctgtattgcccagtcctggctacaatggcagggaggagcaggcaaacagcctccccgtcaaagatgttacaatctggtcaatgtacactggggtaggacacgtggggagtcaaatatacatcaatttctggcaacacacggcaagaaaacacagatgcccaaaaggacatcaactcaagatttccagtaaaaccaaacccagcttgggtcagatgcacctttccagcaaccaccatctcagcaacaacctgccagctgtcaactggaagttcagcttctgggaacttcagcccccttctcagaggagcaaggtcctagcaccaacagcacctgcagtggagcccaagtatggctgcttcatggagaaggcaggtaaagaggggtgtgcacactgtctcagggtggcaactcttattgataacgaaggcattgtggccttctgacgggtactgctgcccactgacaggtgaaagcattttgttgggttttttttttttcaaattgctattgctatatataaatgtaacgtatagcaataaccgtagaaagatactgtgcccttgtgtatggataattaaaataggaacatctctggactaaattaaaatgtgtaaaaaccaaatccttatagcatccatgaaattacagaagctacaagtgaatcactagcccagggacgaagcatttctctcattacttcatgaacctcttccatgatcacagttttacattttcacaaatctacatggttctttttatgtcactaaatatctcagctcacttttactgccctccttatagacatgc

SEQ ID NO: 462489 - DNA, 1073 bp, Homo sapiens
gcgtctcatctgtgtgggcctggtttatgagtacaagttgctcacggcacatgattggccctaactccccagtgctttctggcactcttaaaccagcgaggggctctggaaatagttgtagaatgagacagaaaagacctgccctcatggcagatgagaagacagctgccctgtgctccacttggaagcacctgtggccaaagctcataggcacttgtgtggcaggaagaacagatgtgaagttctgtggaaaagaaatacaacacaaattggcagaacacagtaacttaaaaaataaatctgaaagtcagtcctggagagcccatctttgggtcctggctttgattggaaagagttatggttttgttggggtaatagcagctgatctttcgtcctcccacagaatcctgccagagccaacacttggaagcacacagctaatgagaggatttcttccaaggttcttaaccaaatgctctttgatagtggtggttgtgaggcggaggaagatgcttctgctgaagagggggttcctagaagcagcaaccaaagcccttaaaagaatcaacagcgatcattatatagccaccatttagctgcaccatttaaacaagatttttaacccatggggacgccaagatcaacatggagcttcctgcacataaaagtctggaatttcatagcaatgtgggggcaaaagctatgatagcatttccccctttctaaattatatactgcttagtgttaatgtgagcagagggctggatggcgacgggctcgcagcttacatgctgttctggaaactcggtttagtggcagctatgaatgctcatctgtagcacctcccttttccctcccatttggaaggagcaagagactgtcttctaggatgagagagatgagagagatggcattaaagcttgacatcagatgagcccttcagctctctcaacctgcataattctcttttgggaaggagagactggtctccaagcacttcttacacctcctctgaaccaggaaccatatcagcacattctgactgagttaaccttaattgtaaaagactggga

SEQ ID NO: 462490 - DNA, 1351 bp, Homo sapiens
aagacacaaactgaaggactggcaaaatgttgtgatgactgcaattcactgaaacgaacatggtccagtgttttaaaatccccaaatctcaagggaacatcagggcaactggggctcatctcatatttctctccatcctcctatgtggacttgaagcaagccagcaaacagcctgacatgataccctggatggatgagtgtgccctgttgacacagcttcgaagaacatcaaccatatggaagcaatttcacccatctccctgaagacacctgggaatgatgaaagtgacaagaaatggcaccagggactccttctgtataccacttgccttcacctggtggaaatagtgagattagaatgtaaatgtgttcagaaagaagccagactttcccaaaggtcatcagaagaccacagctcagcagcctgtagacactcttcaatggttctgggctcacctacctgtcttaagtccagagtgattgtgacccagtgatattctctcccattctgaatgctgggactttgccaccagttattggtgccatctatggcatgtgatattggatggcgttctgttgaaagaaaataaaaaacatgaattcctctcggctgttgctttaaatttcttaagttctaaaccgtaatgctagtggaaacaaagagcagtgaaggatcccgtgcatctcaggaacaaggcagccaggaggcccatgacctctcacccacatggattgtgaagcaatgtgctcaaggtgtccttgaaaaagacagaggttttgattgtaagagaaacacatgtggtaactgcaataagaaattgtccttaaaaatgtccagtgaccagtacctccgatcaaatcatttggcacttgagatgtcaaatgcatcaccatctctaacagaacaccagcacgaagaccccaaggtggctggatccacaggattagagctacttttattccagtacatatctaaagggtcatcttacagacaaagaaatcatttgagttacgttttaccttatgcaccaatggcagacaaatatatttaacaacaaaacactctgatcacaggtgcacagagttaaattattttggtgtcattctcactgggattgatacaacactatattttctcagttctagtaccatttttcccctgaaatgaagccacctctttataagcacatatactttgaacctggtagtttttctctttttcaaaaggctattcctagattaaggctgtatataacaagaattgtcttcattgtctccaattctttgcctcacattctctcttcactcagttccaactgagaagctgttccttttaatcactaagaatgcc

SEQ ID NO: 462491 - DNA, 2727 bp, Homo sapiens
agcgggctggggcggggaggtgggaccgggagaggggtggccgcggggcccggccgggctggggcggggggccgcagccatgatccgggccttctcgttcccggtgagccctgagcggggccggctgcggggctggctggagggtagcctggccgggctctgcgagttacattggctccgggagaggcaggagtaccgcgtgcagcaggcgctgcggctggcccagcccggaatggggggcgccgaggccgaggacgaggaggacgccgatgaggatgaagatgcggcggcggcgcgccgggccgcagcggccctggaggagcagctggaggccctgcctggtctcgtctgggacctgggacagcagctgggagacctgagcctggagtctgggggcctggaacaggagagcgggcgtagctcgggcttctatgaagatcccagctctacaggaggtccagattcaccaccctcaaccttctgtggggacagtggcttctctggatccagctcctatggtcgcctgggtccctctgagccccggggcatctatgccagtgagaggcccaagtccctaggagacgccagtcccagcgctccggaggtggtgggcgcgcgggcagcggtgccgcggtccttctcagcgccctacccgacggcaggggggtccgccggcccggaggcctgctcctcggcggagcggcgggcccgcgccgggccctttctgacgcccagccccctgcacgccgtggcgatgcgcagcccgcggccctgcggccgccctcccaccgactcgcccgacgcggggggcgcagggcggcccctggacggctacatctcggcgctcctgcgcaggcgccgccgccggggggcgggccagccccggaccagtcccgggggcgcggacggcggcccgcggcgccagaacagcgtgcgccagcggccgcccgacgcgtctccgtcccccggcagcgcgcgacccgcgcgggagccctcgttggagcgcgtcgggggccaccccaccagccctgccgccttgagccgcgcctgggcgtcgtcgtgggagtcggaggcggcacccgagcccgctgcgccgcccgccgccccctcaccccccgacagcccggctgagggccgcttggtgaaggcgcagtacatcccgggcgcgcaggcggccacccgaggcctccctggccgcgccgcccgccgcaaaccgccgccactgacccgcggccgcagcgtggagcagtcaccaccccgggagcgtccccgggccgccggccgccgtggacgcatggccgaggcttcgggccgccgcggctcgcccagggcccgcaaggcctcgcgctcccagtctgagaccagcctgctgggccgcgcctccgcggtcccttcggggccccctaagtaccccacggcggagcgggaagagcctcggcctccacggccacgccgcggcccagcgcccacgctggcggcccaggccgcagggtcctgccgtcgctggcgctccactgcggagatcgacgctgccgatgggcgccgcgtgcggccccgagcccctgcggcgcgtgttcccggccccggcccgtccccgtcagctccccagcgtcgtctgctttacggctgcgcgggcagcgactccgagtgctcggctgggcgcctggggcccctgggacgccgggggcctgcgggaggcgtcggcgggggttacggggagagcgaatcgagcgccagcgagggagaatcgcctgccttcagctctgcctccagcgactcagacggcagcggtggcctcgtgtggccgcagcagctggtggcggccaccgcggcctctgggggtggagcaggtgcaggggcgcccgcaggccccgccaaagtcttcgtgaaaatcaaagcttcccacgcgctcaagaaaaagatactgcgtttccgttcgggttctctcaaggtcatgactacagtgaatggggaggagccctgtttgacccagttcagcttctagcttggaagcccttgggcaagacagttccccttctctgggcgtcactttcctcatctgtacactatggccccctctcattcacaaagtgccccctccatgtccctggacccttaagatatccccttggcaccctggtcagagactctgtgtctgactcaggtggtccctgcagagtgccctgggaagggaaggagcactgatttgggggttttgagggtcaagtaggggttggtaacacctggaaagaaggactctttcacttcgatccctggacaattatggaggattcggaggtagaagaggggaaggaagatggtttctatctcatgacccccactccctgtgagagggaatgggggaagcctgatgaccctcagctgttccaatctagtattttttttcttttttaaaattactgtatttattatgacgatggtgactccccagtgcaaaggggggccagattctgtgtgtttctctaacctctttgtaaataaatgcacagtgtaacatatgtggtggactctcactgaatgattaaatgggagaaatgctctttttcctttggactaacatttattgagcaacttctgtttgctgtggatatggcagtttccagggaggtcccagggtgaatctcaacatcatcttcctaccattggctattttacatcaaggaatctaacctttgattgggttatgtttggttataaatacgattt

SEQ ID NO: 462492 - DNA, 761 bp, Homo sapiens
agcgggctggggcggggaggtgggaccgggagaggggtggccgcggggcccggccgggctggggcggggggccgcagccatgatccgggccttctcgttcccggtgagccctgagcggggccggctgcggggctggctggagggtagcctggccgggctctgcgagttacattggctccgggagaggcaggagtaccgcgtgcagcaggcgctgcggctggcccagcccggaatggggggcgccgaggccgaggacgaggaggacgccgatgaggatgaagatgcggcggcggcgcgccgggccgcagcggccctggaggagcagctggaggccctgcctggtctcgtctgggacctgggacagcagctgggagacctgagcctggagtctgggggcctggaacaggagagcgggcgtagctcgggcttctatgaagatcccagctctacaggaggtccagattcaccaccctcaaccttctgtggggacagtggcttctctggatccagctcctatggtcgcctgggtccctctgagccccggggcatctatgccagtgagaggcccaagtccctaggtaaggtgggtgagggtggggccctggggccagggaaaggacagtaggaggatggttgtgggcacagacttccgaatcgggcctggattccaattccagctgtgacatttccttttcacatggttatgagcaggtctcttatttctgggtctctgtttttccatctgttaaaatgaaatatgg

SEQ ID NO: 462493 - DNA, 2361 bp, Homo sapiens
tgccctccagtcctctcctcacagtgtggaaacactctttccttcaaaaccttcatttgtaccagcaggaaactctcacccggagtcaatgtaaagtcgtgacctaaataaattgtcatgttcccaaaccttttctccaggggacaatgcaaacaagtttttcactgagtctgaccctcacagattttcttcatgtatacaaattacagcctgactcagcgaccccatgaatgctaaaaccaaaacactgtccaggaaatggccccaggcgccaaaggctccagactggtctcaggctctcctgcccactgcagtttattcacttgcttctcaccaacactgatccacttaggtaagaaaaaagaccttcaatcccctttgctgtttgtttgtttttaagaaactagcagagttcctgctttccttctgtggttatgtataagctggaagacaaaaaattctaaaatactttatatggattttaaaactggcaagtaatgattcctttgagaaaacaaagatatcagctatgctattatgatttatacattggtttccatccatgcttcctgactcataactcccatagtccttgttacagtaaacagaaactctctctctctgaccttctcctgccccccattcacctgtccactgcagaactctaatgtgatcgtgggtcataagactctcactccaaagagtgtcctgtcctgtacgctggggaaaggaatgctacacagaagccaaaaattatctggacaggggttggatgcagtggttcacgcctgtaatcccagcactttgggaggctgcggagggaggattgctcgagcccaggaattcaagaccagcctgggaaagatgtcgagaccccatctctatgaaaaataaataaaaaggccggacgcggtggctcatgcctataatcccagcacttcaggaggctgaggtgggcggatcatgaggtcaagagatcgagaccctcctggccaacatggtgaaacccccgtctctactaaaaatacaaaaattagctgggcgtgtgctggggaggacataagagaaactggattctactcctactcctactcctactttggtggtggaaatgtaaaatggtacagagagcgcggtgagacgcagagtgcggccggcttgccgagtcccaagcaggcaggtgagctggagggcggggatgtcccgggacaggccgcggcccctgccccgcagacaccggggccctcgctgtgccgggcacagacgaagccccagccgagacgcagcgcctccaggtggctgcgggagcggcgggcgggaagcggggcgaccaggaagccgcgcagatccgggacctgggggacctctctgtcccagtggggcgagacctacctagccctgacgatagcggagaatagccttaaccggcctggaagctgtatttccaaaatgtcgctttctaacaagctgatgctggacaagctggacgtgaaagggaagccggtcgttatgagagtcgacttcaattttcctatgaagaacaaccaggtaacaaacaactggaggattaaggctgctgtcccaagcatcaaattctgcttggacaatggatccaagtcagtagtccttataagccacctaggttggcctgatggtgtccctatgcctgacaagtactcctcagagccagttgctgtagaactcaaatctctgctgggcaaggatgttctgttcttgaaggactgtgtaggcccagaagtggagaaagcctgggaagtctatgtcaatgatgcttttggcactgctcacagagcccacagctccatggcagaagtcaatctgccacagaaggctggtggttttttgatgaagaaggagctgaactactttgccgaggccttggagagcccagagcgacccttcctggccatcctgggcagaactaaagttgcagacaagatccagctgatcaagaacatgctgggcaaagtcaatgagatgattattggtagtggaatggcttgtaccttccttaaggtgctcagcaacatggagattggcacttctctgtttgatgaagagggagccaagactgtcaaagacctaatgtccaaagctgagaagaatggtgtgaagattatcttgcctgttgactttgtcactgctggcaagtttgatgagaataccaagactggccaagccactgtggcttctggcatacctgctggctggctgggcttggactgtggccctgaaagcagcaagaaggactaaacgtttctgtctcccacctccaataaattaatataataaatccctactctccagtgtgctggtatttgcagatggggcctctgggag

SEQ ID NO: 462494 - DNA, 1364 bp, Homo sapiens
gagagatgcgcagtgctgcccctttctatgggcagggccgaaggtccgcgtgtaaaagtacccagtccctggtaacctgacacttcccttttaaaagccaccttttgtctatctctggcctgccacgattcttcctgtgctccataggaggacccattggacccccgggctggctgcagggcccacacctgggttagacctcgcacagggacgctgctgccactgtaataaagcgtgcctacacgcttctgaaactggtgtaggaacaacctcagttctgtgaaaggcggacgcagcaggacagaatctccgtggacatctgtctggaggagcaattttactgcgacattttaaagaaacaaatttaattgatttccaagggtgtccatcgcgcttccttcactgccttgatcatgtcggggtcaccacctgcgggggtttgtcctgcagaccctgactcaacgacggatgaataatgtacactgacacagatcttatgcttgtcagtcctgctgagcatccaggccacttacagactccaagaagagtcctgtcagccacggctctgacttgttggccctcccggcatttatttagcacacatttaatgacagaagtctcaggctggaaacactctttttgtagaacatacaaatggacatttctaagcacattgaggcctataatgaaaaatcaaatatcccacaatgaaaactagagggaagctatctgtgataatgctttgtggtgtatggattcatctcactgactgaaacctgagttttgattcaccaggttggaaactctttctgcagaatctgcaaagaaatatttctgagcccattgaggcctacagtggaaaactgaatattctgtgataaaactagaaacaccctatctgtgaaaatgctttgtgatgtgtggatttttctcatcgaatggaacctctgttttgactcacaagggtgaaacactattttagtagaatctaggaagaaacatatctgagcccatttatgcctacagtgagaaactgaataccctgcaataaaaagtagacagaagctatttgtaaaaatgctttgtgatgtgtggattcagtgttaaacttttattttgattccacagttttgacaccctatttgtagaatatatgaatgaacatttctcagcccattgaggcctatcatgtgaaaccaaatattttataataaaaactggaaacaagtgatctgttaaaatgttttttagtgtgtgaatttgtttcacaaagataaatctttgcatggattcaacaggttggaaacattattgtagaacctatgaagggatgtttttagcctattaaggactatatatataaa

SEQ ID NO: 462495 - DNA, 1055 bp, Homo sapiens
taacggctggaaccgcctaagacaccaccccagccagcatggccggcaggagcgcaccgcgctgtctccctccagggatccgcaccgccctacaatcctgctttgtgctgagattgtagtcctgcaggcgtacaactaacaagctgggtgcagataagagactacagctccccgcatcccaagcaaaggtccctcctctacggagcccctccacgcgtccactgcggttccgccgtgccaaggggagcttggctgttcacgggcctcacctgctagcgagaagatagcttggccgggcggctgatctcaccttgtaattctgacactgtgtctcccgggcttgtcggcttcatgacttgtgcccaaagtttgatttctcgcagaccaggaggacccattggacccccgggctggctgcagggcccacacctgggttagacctcgcacagggacgctgctgccactgtaataaagcgtgcctacacgcttctgaaactggtgtaggaacaacctcagttctgtgaaaggcggacgcagcaggacagaatctccgtggacatctgtctggaggagcaattttactgcgacattttaaagaaacaaatttaattgatttccaagggtgtccatcgcgcttccttcactgccttgatcatgtcggggtcaccacctgcgggggtttgtcctgcagaccctgactcaacgacggatgaataatgtacactgacacagatcttatgcttgtcagtcctgctgagcatccaggccacttacagactccaagaagagtcctgtcagccacggctctgacttgttggccctcccggcatttatttagcacacatttaatgacagaagtctcaggttctaggtggaacactcttttgaaaaatcaatgaacttctaagccttgagcctatatggaatcaattccacatgaaactaggggactttctggaagcttgtgggttgatcattactgctgaaccggattggatccagttggaacctttcgggttacttaacgttttggccttcctcctgtgattctgttt

SEQ ID NO: 462496 - DNA, 768 bp, Homo sapiens
taacggctggaaccgcctaagacaccaccccagccagcatggccggcaggagcgcaccgcgctgtctccctccagggatccgcaccgccctacaatcctgctttgtgctgagattgtagtcctgcaggcgtacaactaacaagctgggtgcagataagagactacagctccccgcatcccaagcaaaggtccctcctctacggagcccctccacgcgtccactgcggttccgccgtgccaaggggagcttggctgttcacgggcctcacctgctagcgagaagatagcttggccgggcggctgatctcaccttgtaattctgacactgtgtctcccgggcttgtcggcttcatgacttgtgcccaaagtttgatttctcgcagaccaggaggacccattggacccccgggctggctgcagggcccacacctgggttagacctcgcacagggacgctgctgccactgtaataaagcgtgcctacacgcttctgaaactggtgtaggaacaacctcagttctgtgaaaggcggacgcagcaggacagaatctccgtggacatctgtctggaggagcaattttactgcgacattttaaagaaacaaatttaattgatttccaagggtgaagtgtaaccaaaaaaaaaaaaatccaaaggtcaaactcagtttgcaggaaggagcataggagaataaaggatggaacaaagaagaaaaagaacagcaagttactctgagtattgtggaaacaaactgaaattagagtgagag

SEQ ID NO: 462497 - DNA, 869 bp, Homo sapiens
taacggctggaaccgcctaagacaccaccccagccagcatggccggcaggagcgcaccgcgctgtctccctccagggatccgcaccgccctacaatcctgctttgtgctgagattgtagtcctgcaggcgtacaactaacaagctgggtgcagataagagactacagctccccgcatcccaagcaaaggtccctcctctacggagcccctccacgcgtccactgcggttccgccgtgccaaggggagcttggctgttcacgggcctcacctgctagcgagaagatagcttggccgggcggctgatctcaccttgtaattctgacactgtgtctcccgggcttgtcggcttcatgacttgtgcccaaagtttgatttctcgcagaccaggaggacccattggacccccgggctggctgcagggcccacacctgggttagacctcgcacagggacgctgctgccactgtaataaagcgtgcctacacgcttctgaaactggtgtaggaacaacctcagttctgtgaaaggcggacgcagcaggacagaatctccgtggacatctgtctggaggagcaattttactgcgacattttaaagaaacaaatttaattgatttccaagttatttgagacagagtctcgctctgtcaccaggctgtacagtgccgtggcctgtctcggctcactgcaacctccacctcctgggttcaagcgattcttatgcctcagcctcccaagtatctgggactacaggcatgcgccaccacgcccagctgatttttgtatttttagtagagacggggtttcaccatgttgaccaggatggtctcaatctcttgacctcgttatccggctgcctcctcctcccaa

SEQ ID NO: 462498 - DNA, 739 bp, Homo sapiens
ggctgtaccggcccgggatgtatgggattgaattcatctcactcagttaaaccttcgttttgattcaacaagggtgaaacactcttttggtagaatctacaaagaaacatttatgagccccttgaggactatagtgaaaaaatgaatctcctgcattaatatctagaaacaatctatttgtgaaaatgctgtgtgatgcatggatccatctcacagatttcaaactttattttgattcaacaggctggaaacactcttgttatagaagctacgaagggtcatttctgaacccattgaggccaatagtgaaaaactaaatatcctgcaataaacctagaaaaaatctatctgcgaaaatactttgtgtagtgtggatgagtgtctcagggttaaacatttgtttttattcaccaggttcgaaacactctttttgttgaacagacaaagggacatttcttagcccagttaggcctataaaggtaaaccgaatatcccgtgatacatagtagaaacaagctatctgcaaaaatgctttgtgaattgtagattcatctcacagaattaagcctttgttttaattcaacaggttaaaaacactatttttgtagactctacgaagaaacatttctgaaacccattgaaacctatgggggaaaaaaacccccgaaattcctgtgataagaaatggaaagcagctatctgtgaaaatgctttgtaatgtgtggattcttctcacaga

SEQ ID NO: 462499 - DNA, 494 bp, Homo sapiens
gaaaaaaaaagaaggtccgagcaatctcagatatatgagaggccaagatgggaagatcacttgggtaagactgggaagattgagtctgcagtgagtcacagtcgcatcattctgctggatttgaatggtactgcttctggcccaagttgtctgggcaaccttagacatggctggaaacactctttttgtagaacatacaaatggacatttctaagcacattgaggcctataatgaaaaatcaaatatcccacaatgaaaactagagggaagctatctgtgataatgctttgtggtgtatggattcatctcactgactgaaacctgagttttgattcaccaggttaaaaacactatttttgtagactctacgaagaaacatttctgaaacccattgaaacctatgggggaaaaaaacccccgaaattcctgtgataagaaatggaaagcagctatctgtgaaaatgctttgtaatgtgtggattcttctcacaga

SEQ ID NO: 462500 - DNA, 3550 bp, Homo sapiens
taacggctggaaccgcctaagacaccaccccagccagcatggccggcaggagcgcaccgcgctgtctccctccagggatccgcaccgccctacaatcctgctttgtgctgagattgtagtcctgcaggcgtacaactaacaagctgggtgcagataagagactacagctccccgcatcccaagcaaaggtccctcctctacggagcccctccacgcgtccactgcggttccgccgtgccaaggggagcttggctgttcacgggcctcacctgctagcgagaagatagcttggccgggcggctgatctcaccttgtaattctgacactgtgtctcccgggcttgtcggcttcatgacttgtgcccaaagtttgatttctcgcagaccaggaggacccattggacccccgggctggctgcagggcccacacctgggttagacctcgcacagggacgctgctgccactgtaataaagcgtgcctacacgcttctgaaactggtgtaggaacaacctcagttctgtgaaaggcggacgcagcaggacagaatctccgtggacatctgtctggaggagcaattttactgcgacattttaaagaaacaaatttaattgatttccaagggagatcgaggccacagtgaatcacgatcacatgtctctgttggacctgagcagtactgccggtggtgagaaccgtctggtcgaccttagatgtagcaagctagcagctaggtccaggacacgggaggccagttgggaagaccgcccgggcgagaccaggaagatcaaggccacagtgaatcacgatcccatccctctgctcaacctgaattgtactgctgctggcgagagagatctggtcgaccttagacatggcaaggcgagaggtgaggtccatcaggtcgaccttagtccaacgctcacagccgacatctctctcaaaataaataaacaaatccaacagtacacggggggccccccaagatgggaagaccacccgggtaaaacctgggagtctgagttctcagtgaatcgggaatgcatccctctgctggacctgaatggtactgtcaccagcaagaggcatctggtcaaccttagacgtggcaagctgatggctaagtccaacacttgcagccgaaattggctagagtgtgacagaaatctaaaagatcaacttcatcgtgcaggaaggagcatagaaaaatagagaaaagaagaaaacagcaaaccattctgagtaccgtggaaacaaactaaaagtgggcttagaaggaaaacagaggaagaaggtctgagtagtcccagggacgccagaggccaagatgggaaagccacccaggcgagacaggggagatggaagccacagggaatcactatcacatacctctgctggacctgaatggtcctggcgccagctagagccatctggtcgaccttagacatgtcaaggcaggagccatctgatcgaccttagacttggcaagctggtggctaagtccagtgctcactgccgacatctgtctcaaaataaacaaaaagtccaacagtgaatatttaacaataacaaaaatataataccaaacaatattaaagaccaataaataagtgggagtgaacaaaggtaaaaggtaactaatatcacaattaaaatattctgctatctctcactctctctcttcccctttccatttgtcacacccaggctggaatgtgacaaaaaaatataaaaggtcaatttcatcatgcaggaatgagtgtagaaaaagggagaaaagaacaaagaagaaaaacaacagcaagtctctctaaaacttcagttagtttcactgtagaaaaaaaaattgaaagtggggttaggaaaaaaaggaaggaggaggataagttcaggtagcctgagggactagggaagccaagatgggaagaccacctgggtgacactgggaagatcgagaccacagtgaatcatgatcacatccctctgctgtacctgaatagtacttccaaaggcaggagccatctggtcatccttagtcatggcaaggcgagagccatctggttgaccttagataaggtgagagccatctggttgaccttagacttggcaagctggcagctaagtccaatcctctcagctgacatcttggagagagagacagacagacagacacaaacagcgagacaggagaaaatcttaattgtgttattaattacttttcacctttgttcactccaaacagaaaaaaatccaacagtgaatatttaacaataacaaagatataactacaaacaatattaaagacaaataaatgggagtgaacaaaggtaacaggtaattaatatcacaattaaattcttctaatctctttctatctctcactctcgatttctctctgtcaacttcatcaagcaggaaggagcacaggaaaatataaagagaaaacaagaaaaaaatagaaagtcactctaaggactgtggaaacaaactgaaagtaaggttaggaaaaacaaaggaaggatgtcgaaatagtctgagggaatcaggaggccgagatcatcagaaggccaccctgtagagacctggaagacgcccagggcacagtgaatcacgatccgatccctctgctggacctgaatggtactgctgctgatgagagccatcctctcgaccctagacttaccaagctggtggctaaatacaaccctcgtgggaagatctgtctcaaaagaaaaaaatccaacagggaatatttaacagtaacaaagaactaaccataacaatattaaagacaaataaataagtgggagtgaacaaaggtgaaaggtcaattatatcacaattaagatcttctctctctttctccatttgtcacaaccaggctggattgttccaaaaaaaaaaaatctagaaggtcaaattcatcatgcaggaaggagggtaagaatatatatagagagaaaagaacagagaagaaatacaacagcaactcactgtaagtactgtagaaacaaactgaaagttgggttagaaaaaaaaaaagaagaaggtccaagtagtctgaaggactcgggaggccaagatgggaagtccacccagatgacaccggggagatcgaggctgcagagaataaggatcacatccctctgctggacctgaatggtactgatgctgttgagagccatctggtcctcagacatgggaaggcaagagccatctgttcgaccttagacatggcaagatgaaagctaagtccagtgctcgctgccaacacgtttctcaaaataaataaacaaaaatttcaacagtaaatattcaacaataacaaagaaataataacaactttaaagaccaataagtaaataagtgaaagtgaacaaaggtaataggtgattaatatcacaattaagatcttctatctctctacttctctgttactctctagctgtctctgtttgtcaaacccatgctagagtgtgattaaaagaaatataaaagtcaactgcttcctgcaggaaggagcatagggacataacgagagaaaagaacaaa

SEQ ID NO: 462501 - DNA, 1605 bp, Homo sapiens
taacggctggaaccgcctaagacaccaccccagccagcatggccggcaggagcgcaccgcgctgtctccctccagggatccgcaccgccctacaatcctgctttgtgctgagattgtagtcctgcaggcgtacaactaacaagctgggtgcagataagagactacagctccccgcatcccaagcaaaggtccctcctctacggagcccctccacgcgtccactgcggttccgccgtgccaaggggagcttggctgttcacgggcctcacctgctagcgagaagatagcttggccgggcggctgatctcaccttgtaattctgacactgtgtctcccgggcttgtcggcttcatgacttgtgcccaaagtttgatttctcgcagaccaggaggacccattggacccccgggctggctgcagggcccacacctgggttagacctcgcacagggacgctgctgccactgtaataaagcgtgcctacacgcttctgaaactggtgtaggaacaacctcagttctgtgaaaggcggacgcagcaggacagaatctccgtggacatctgtctggaggagcaattttactgcgacattttaaagaaacaaatttaattgatttccaagggtgtccatcgcgcttccttcactgccttgatcatgtcggggtcaccacctgcgggggtttgtcctgcagaccctgactcaacgacggatgaataatgtacactgacacagatcttatgcttgtcagtcctgctgagcatccaggccacttacagactccaagaagagtcctgtcagccacggctctgacttgttggccctcccggcatttatttagcacacatttaatgacagaagtctcaggctggaaacactctttttgtagaacatacaaatggacatttctaagcacattgaggcctataatgaaaaatcaaatatcccacaatgaaaactagagggaagctatctgtgataatgctttgtggtgtatggattcatctcactgactgaaacctgagttttgattcaccaggttggaaactctttctgcagaatctgcaaagaaatatttctgagcccattgaggcctacagtggaaaactgaatattctgtgataaaactagaaacaccctatctgtgaaaatgctttgtgatgtgtggatttttctcatcgaatggaacctctgttttgactcacaagggtgaaacactattttagtagaatctaggaagaaacatatctgagcccatttatgcctacagtgagaaactgaataccctgcaataaaaagtagacagaagctatttgtaaaaatgctttgtgatgtgtggattcagtgttaaacttttattttgattccacagttttgacaccctatttgtagaatatatgaatgaacatttctcagcccattgaggcctatcatgtgaaaccaaatattttataataaaaactggaaacaagtgatctgttaaaatgttttttagtgtgtgaatttgtttcacaaagataaatctttgcatggattcaacaggttggaaacattattgtagaacctatgaagggatgtttttagcctattaaggactatatatataaa

SEQ ID NO: 462502 - DNA, 3453 bp, Homo sapiens
taacggctggaaccgcctaagacaccaccccagccagcatggccggcaggagcgcaccgcgctgtctccctccagggatccgcaccgccctacaatcctgctttgtgctgagattgtagtcctgcaggcgtacaactaacaagctgggtgcagataagagactacagctccccgcatcccaagcaaaggtccctcctctacggagcccctccacgcgtccactgcggttccgccgtgccaaggggagcttggctgttcacgggcctcacctgctagcgagaagatagcttggccgggcggctgatctcaccttgtaattctgacactgtgtctcccgggcttgtcggcttcatgacttgtgcccaaagtttgatttctcgcagaccaggaggacccattggacccccgggctggctgcagggcccacacctgggttagacctcgcacagggacgctgctgccactgtaataaagcgtgcctacacgcttctgaaactggtgtaggaacaacctcagttctgtgaaaggcggacgcagcaggacagaatctccgtggacatctgtctggaggagcaattttactgcgacattttaaagaaacaaatttaattgatttccaagggtgtccatcgcgcttccttcactgccttgatcatgtcggggtcaccacctgcgggggtttgtcctgcagaccctgactcaacgacggatgaataatgtacactgacacagatcttatgcttgtcagtcctgctgagcatccaggccacttacagactccaagaagagtcctgtcagccacggctctgacttgttggccctcccggcatttatttagcacacatttaatgacagaagtctcaggctggaaacactctttttgtagaacatacaaatggacatttctaagcacattgaggcctataatgaaaaatcaaatatcccacaatgaaaactagagggaagctatctgtgataatgctttgtggtgtatggattcatctcactgactgaaacctgagttttgattcaccaggttggaaacacttttttagtagaatctatgagaaaatctttgtgaacccaatgaggactctgtgtgtgtgtttgtgtgtgggggggggtgggggggcaggaaacaacgaggatttcatgatggaaactggaaagaaccatctgtgaaaatggtttgtgatgtgtggattcacctcacagaattaaacctttggtttgatagaacagattgaaaacactgtttttgtacaatctaaaaagagacatttctgagcccattgaagcctgacgtgaaaaaccaagggtctcacaataaaaacgaattacaagctatctgtgaaaatgcttagcaatgtccggattcatctcactgaatagaccctgtgttttgattcaccaggttggaaactctttctgcagaatctgcaaagaaatatttctgagcccattgaggcctacagtggaaaactgaatattctgtgataaaactagaaacaccctatctgtgaaaatgctttgtgatgtgtggatttttctcatcgattaaacctttgttttgattcaactgattggaaacactctttttgtaaaatctatgaagggaaatttctgagcccatttaggcctatagtgagaaacagaatatcccactgtaataagtagaaacaagctatctgtgaaaatcatttatggtggctggattcatctcaccaaatgaaacctgtgctttgattcaccagtttggaaacactatttttatagaatctatgcaggaatatttctgatcccattgaggcatatgctgaaaattcgaatatcccatgataaaaactacaaacaagctatctatgaaaatgttttgtcatgtgtggattcatctcacagagttaaacctttgttttgattcatctgtttgaaaacacgcttttttgtagaatctaagaatcaacatttctgagtgcattgaagcctatagtgaaaaacaaaatatctgatgataaaaactagaaacaagctatctgtgaaaatgctttgtgatatgtggattcatctcaaagaattaaactttattttgattcaacaggctggaaacactgttttcgtagaacctacaaaaagacattggggagcccactgagtcttacagtgataaaccaaggatcctgtgataaaactagaaacaagctatctgtgaaaatgctttgcagttggtgaatttctttcatagttaaacctttttttattcaatacgttggaaacaccattttttagtgtctctaaagggactttttcagccctttgaaacctatagtgaaaaaccaaatatcttgcaataaaaacaaataaacaaaaaagaactacttatgaaaatgccttgtgatgtgtggattcatctcacagagttaaaccattgttgtgattcaacaggttggaaacatgctttttgtagaatctacgagttgacatttctgagccctctctgggttatggtgaaaacgaaatatcccatgataaaaactagaaacaacctatctgtgaaaatgctttgcaatgtgtggattcatttcacagaattaaaccattgttttgatttaacaggttggaaccactctattttaagaatctatgaagaaatatctttgtccctattgtacactatagtggacaactgaatacttcatgacaaaaactagaaacaagctagctgtgaaaatgctttgcaatgggtgaattcatctcactcagttaaaccttcgttttgattcaacaagggtgaaacactcttttggtagaatctacaaagaaacatttatgagccccttgaggactatagtgaaaaaatgaatctcctgcattaatatctagaaacaatctatttgtgaaaatgctgtgtgatgcatggatccatctcacagatttcaaactttattttgattcaacaggctggaaacactcttgttatagaagctacgaagggtcatttctgaacccattgaggccaatagtgaaaaactaaatatcctgcaataaacctagaaaaaatctatctgcgaaaatactttgtgtagtgtggatgagtgtctcagggttaaacatttgtttttattcaccaggttcgaaacactctttttgttgaacagacaaagggacatttcttagcccagttaggcctataaaggtaaaccgaatatcccgtgatacatagtagaaacaagctatctgcaaaaatgctttgtgaattgtagattcatctcacagaattaagcctttgttttaattcaacaggttaaaaacactatttttgtagactctacgaagaaacatttctgaaacccattgaaacctatgggggaaaaaaacccccgaaattcctgtgataagaaatggaaagcagctatctgtgaaaatgctttgtaatgtgtggattcttctcacaga

SEQ ID NO: 462503 - DNA, 1983 bp, Homo sapiens
taacggctggaaccgcctaagacaccaccccagccagcatggccggcaggagcgcaccgcgctgtctccctccagggatccgcaccgccctacaatcctgctttgtgctgagattgtagtcctgcaggcgtacaactaacaagctgggtgcagataagagactacagctccccgcatcccaagcaaaggtccctcctctacggagcccctccacgcgtccactgcggttccgccgtgccaaggggagcttggctgttcacgggcctcacctgctagcgagaagatagcttggccgggcggctgatctcaccttgtaattctgacactgtgtctcccgggcttgtcggcttcatgacttgtgcccaaagtttgatttctcgcagaccaggaggacccattggacccccgggctggctgcagggcccacacctgggttagacctcgcacagggacgctgctgccactgtaataaagcgtgcctacacgcttctgaaactggtgtaggaacaacctcagttctgtgaaaggcggacgcagcaggacagaatctccgtggacatctgtctggaggagcaattttactgcgacattttaaagaaacaaatttaattgatttccaagggtgtccatcgcgcttccttcactgccttgatcatgtcggggtcaccacctgcgggggtttgtcctgcagaccctgactcaacgacggatgaataatgtacactgacacagatcttatgcttgtcagtcctgctgagcatccaggccacttacagactccaagaagagtcctgtcagccacggctctgacttgttggccctcccggcatttatttagcacacatttaatgacagaagtctcaggctggaaacactctttttgtagaacatacaaatggacatttctaagcacattgaggcctataatgaaaaatcaaatatcccacaatgaaaactagagggaagctatctgtgataatgctttgtggtgtatggattcatctcactgactgaaacctgagttttgattcaccaggttggaaacacttttttagtagaatctatgagaaaatctttgtgaacccaatgaggactctgtgtgtgtgtttgtgtgtgggggggggtgggggggcaggaaacaacgaggatttcatgatggaaactggaaagaaccatctgtgaaaatggtttgtgatgtgtggattcacctcacagaattaaacctttggtttgatagaacagattgaaaacactgtttttgtacaatctaaaaagagacatttctgagcccattgaagcctgacgtgaaaaaccaagggtctcacaataaaaacgaattacaagctatctgtgaaaatgcttagcaatgtccggattcatctcactgaatagaccctgtgttttgattcaccaggttggaaactctttctgcagaatctgcaaagaaatatttctgagcccattgaggcctacagtggaaaactgaatattctgtgataaaactagaaacaccctatctgtgaaaatgctttgtgatgtgtggatttttctcatcgaatggaacctctgttttgactcacaagggtgaaacactattttagtagaatctaggaagaaacatatctgagcccatttatgcctacagtgagaaactgaataccctgcaataaaaagtagacagaagctatttgtaaaaatgctttgtgatgtgtggattcagtgttaaacttttattttgattccacagttttgacaccctatttgtagaatatatgaatgaacatttctcagcccattgaggcctatcatgtgaaaccaaatattttataataaaaactggaaacaagtgatctgttaaaatgttttttagtgtgtgaatttgtttcacaaagataaatctttgcatggattcaacaggttggaaacattattgtagaacctatgaagggatgtttttagcctattaaggactatatatataaa

SEQ ID NO: 462504 - DNA, 1963 bp, Homo sapiens
taacggctggaaccgcctaagacaccaccccagccagcatggccggcaggagcgcaccgcgctgtctccctccagggatccgcaccgccctacaatcctgctttgtgctgagattgtagtcctgcaggcgtacaactaacaagctgggtgcagataagagactacagctccccgcatcccaagcaaaggtccctcctctacggagcccctccacgcgtccactgcggttccgccgtgccaaggggagcttggctgttcacgggcctcacctgctagcgagaagatagcttggccgggcggctgatctcaccttgtaattctgacactgtgtctcccgggcttgtcggcttcatgacttgtgcccaaagtttgatttctcgcagaccaggaggacccattggacccccgggctggctgcagggcccacacctgggttagacctcgcacagggacgctgctgccactgtaataaagcgtgcctacacgcttctgaaactggtgtaggaacaacctcagttctgtgaaaggcggacgcagcaggacagaatctccgtggacatctgtctggaggagcaattttactgcgacattttaaagaaacaaatttaattgatttccaagggagatcgaggccacagtgaatcacgatcacatgtctctgttggacctgagcagtactgccggtggtgagaaccgtctggtcgaccttagatgtagcaagctagcagctaggtccaggacacgggaggccagttgggaagaccgcccgggcgagaccaggaagatcaaggccacagtgaatcacgatcccatccctctgctcaacctgaattgtactgctgctggcgagagagatctggtcgaccttagacatggcaaggcgagaggtgaggtccatcaggtcgaccttagtccaacgctcacagccgacatctctctcaaaataaataaacaaatccaacagtacacggggggccccccaagatgggaagaccacccgggtaaaacctgggagtctgagttctcagtgaatcgggaatgcatccctctgctggacctgaatggtactgtcaccagcaagaggcatctggtcaaccttagacgtggcaagctgatggctaagtccaacacttgcagccgaaattggctagagtgtgacagaaatctaaaagatcaacttcatcgtgcaggaaggagcatagaaaaatagagaaaagaagaaaacagcaaaccattctgagtaccgtggaaacaaactaaaagtgggcttagaaggaaaacagaggaagaaggctggattgttccaaaaaaaaaaaatctagaaggtcaaattcatcatgcaggaaggagggtaagaatatatatagagagaaaagaacagagaagaaatacaacagcaactcactgtaagtactgtagaaacaaactgaaagttgggttagaaaaaaaaaaagaagaaggtccaagtagtctgaaggactcgggaggccaagatgggaagtccacccagatgacaccggggagatcgaggctgcagagaataaggatcacatccctctgctggacctgaatggtactgatgctgttgagagccatctggtcctcagacatgggaaggcaagagccatctgttcgaccttagacatggcaagatgaaagctaagtccagtgctcgctgccaacacgtttctcaaaataaataaacaaaaatttcaacagtaaatattcaacaataacaaagaaataataacaactttaaagaccaataagtaaataagtgaaagtgaacaaaggtaataggtgattaatatcacaattaagatcttctatctctctacttctctgttactctctagctgtctctgtttgtcaaacccatgctagagtgtgattaaaagaaatataaaagtcaactgcttcctgcaggaaggagcatagggacataacgagagaaaagaacaaa

SEQ ID NO: 462505 - DNA, 1176 bp, Homo sapiens
taacggctggaaccgcctaagacaccaccccagccagcatggccggcaggagcgcaccgcgctgtctccctccagggatccgcaccgccctacaatcctgctttgtgctgagattgtagtcctgcaggcgtacaactaacaagctgggtgcagataagagactacagctccccgcatcccaagcaaaggtccctcctctacggagcccctccacgcgtccactgcggttccgccgtgccaaggggagcttggctgttcacgggcctcacctgctagcgagaagatagcttggccgggcggctgatctcaccttgtaattctgacactgtgtctcccgggcttgtcggcttcatgacttgtgcccaaagtttgatttctcgcagaccaggaggacccattggacccccgggctggctgcagggcccacacctgggttagacctcgcacagggacgctgctgccactgtaataaagcgtgcctacacgcttctgaaactggtgtaggaacaacctcagttctgtgaaaggcggacgcagcaggacagaatctccgtggacatctgtctggaggagcaattttactgcgacattttaaagaaacaaatttaattgatttccaagggtgtccatcgcgcttccttcactgccttgatcatgtcggggtcaccacctgcgggggtttgtcctgcagaccctgactcaacgacggatgaataatgtacactgacacagatcttatgcttgtcagtcctgctgagcatccaggccacttacagactccaagaagagtcctgtcagccacggctctgacttgttggccctcccggcatttatttagcacacatttaatgacagaagtctcaggctggaaacactctttttgtagaacatacaaatggacatttctaagcacattgaggcctataatgaaaaatcaaatatcccacaatgaaaactagagggaagctatctgtgataatgctttgtggtgtatggattcatctcactgactgaaacctgagttttgattcaccagatgtattatctatgaagaacgttttgagggcattagtctacactgaaaatgatatatgttaaatttaagagtatggaaatgttgcaggtgttttttccgattactggttgttccagtgacatttggattgagggttaagc

SEQ ID NO: 462506 - DNA, 1545 bp, Homo sapiens
taacggctggaaccgcctaagacaccaccccagccagcatggccggcaggagcgcaccgcgctgtctccctccagggatccgcaccgccctacaatcctgctttgtgctgagattgtagtcctgcaggcgtacaactaacaagctgggtgcagataagagactacagctccccgcatcccaagcaaaggtccctcctctacggagcccctccacgcgtccactgcggttccgccgtgccaaggggagcttggctgttcacgggcctcacctgctagcgagaagatagcttggccgggcggctgatctcaccttgtaattctgacactgtgtctcccgggcttgtcggcttcatgacttgtgcccaaagtttgatttctcgcagaccaggaggacccattggacccccgggctggctgcagggcccacacctgggttagacctcgcacagggacgctgctgccactgtaataaagcgtgcctacacgcttctgaaactggtgtaggaacaacctcagttctgtgaaaggcggacgcagcaggacagaatctccgtggacatctgtctggaggagcaattttactgcgacattttaaagaaacaaatttaattgatttccaagggtgtccatcgcgcttccttcactgccttgatcatgtcggggtcaccacctgcgggggtttgtcctgcagaccctgactcaacgacggatgaataatgtacactgacacagatcttatgcttgtcagtcctgctgagcatccaggccacttacagactccaagaagagtcctgtcagccacggctctgacttgttggccctcccggcatttatttagcacacatttaatgacagaagtctcaggctggaaacactctttttgtagaacatacaaatggacatttctaagcacattgaggcctataatgaaaaatcaaatatcccacaatgaaaactagagggaagctatctgtgataatgctttgtggtgtatggattcatctcactgactgaaacctgagttttgattcaccagaatctatgcagggacatttttgtgctcattgaggcctactgtgaaaaaccaaacatcaggggtggagccaaaaaagccaaataggaacagctccagtctacagctcccagcatgagccacacagaagatggatgatttctgcatttccaactgagaatctatgaaaggatatttctgagcccattgaggatctatagtaaaaaaatctattatcctgtgataaacactagaagtaagctatctgtgaaaatgctttgccttgtgtggattcatcttacagagaatctatgaagggacatcatttctgagcccattgagacttgtagtgaaaaaccaagcatcccctgataaataggtagtagaaacaaactacctatgaaaatgctttttgatttgtggatttatctcacagtgttaaatttttgatttgattcaactggttgaaaacattctttatgtagaatctatgaagagacgtttttgagcttatcgagatgtaaggtgagaaa

SEQ ID NO: 462507 - DNA, 366 bp, Homo sapiens
gaataaaggatggaacaaagaagaaaaagaacagcaagttactctgagtattgtggaaacaaactgaaattagagtgagagagagagagaaaaaaaaagaaggtccgagcaatctcagatatatgagaggccaagatgggaagatcacttgggtaagactgggaagattgagtctgcagtgagtcacagtcgcatcattctgctggatttgaatggtactgcttctggcccaagttgtctgggcaaccttagacatggtaaggcaagagccatctgatcaacattagacatggcaaggtgaaagccatctggtcgacagggattctaatagaagacactctgggccgatggcagacgtctaataat

SEQ ID NO: 462508 - DNA, 809 bp, Homo sapiens
gagagatgcgcagtgctgcccctttctatgggcagggccgaaggtccgcgtgtaaaagtacccagtccctggtaacctgacacttcccttttaaaagccaccttttgtctatctctggcctgccacgattcttcctgtgctccataggaggacccattggacccccgggctggctgcagggcccacacctgggttagacctcgcacagggacgctgctgccactgtaataaagcgtgcctacacgcttctgaaactggtgtaggaacaacctcagttctgtgaaaggcggacgcagcaggacagaatctccgtggacatctgtctggaggagcaattttactgcgacattttaaagaaacaaatttaattgatttccaaggtgaagtgtaacccaaaaaaaaaaaaaaaaaaaaaaaaaaaactttgggggcccctcgggccccgggaaaatctttcaaaaccattcgggggggggcgcgggcccccgtggtgtaggcaccatgggccaacgggtcccaaagagaaacccgggggcaggacaaggggtcggggttttctcccccacaataaaaaaaaccgccgggggggaccccgacgggttgctgacacacccaaaggggggtcgaggaggacatacaggggatcacaacaccaggggatcacaaggaaccggaattaatcccggcggcgaggtaaacacaacaacacgaaagcaaacaccacgacaagtcgagagacacagagcagtcagcaagataaagaaagagacaacaggagcgaccaacaaagacaacacacacggccacaa

SEQ ID NO: 462509 - DNA, 1459 bp, Homo sapiens
taacggctggaaccgcctaagacaccaccccagccagcatggccggcaggagcgcaccgcgctgtctccctccagggatccgcaccgccctacaatcctgctttgtgctgagattgtagtcctgcaggcgtacaactaacaagctgggtgcagataagagactacagctccccgcatcccaagcaaaggtccctcctctacggagcccctccacgcgtccactgcggttccgccgtgccaaggggagcttggctgttcacgggcctcacctgctagcgagaagatagcttggccgggcggctgatctcaccttgtaattctgacactgtgtctcccgggcttgtcggcttcatgacttgtgcccaaagtttgatttctcgcagaccaggaggacccattggacccccgggctggctgcagggcccacacctgggttagacctcgcacagggacgctgctgccactgtaataaagcgtgcctacacgcttctgaaactggtgtaggaacaacctcagttctgtgaaaggcggacgcagcaggacagaatctccgtggacatctgtctggaggagcaattttactgcgacattttaaagaaacaaatttaattgatttccaagggagatcgaggccacagtgaatcacgatcacatgtctctgttggacctgagcagtactgccggtggtgagaaccgtctggtcgaccttagatgtagcaagctagcagctaggtccaggacacgggaggccagttgggaagaccgcccgggcgagaccaggaagatcaaggccacagtgaatcacgatcccatccctctgctcaacctgaattgtactgctgctggcgagagagatctggtcgaccttagacatggcaaggcgagaggtgaggtccatcaggtcgaccttagtccaacgctcacagccgacatctctctcaaaataaataaacaaatccaacagtacacggggggccccccaagatgggaagaccacccgggtaaaacctgggagtctgagttctcagtgaatcgggaatgcatccctctgctggacctgaatggtactgtcaccagcaagaggcatctggtcaaccttagacgtggcaagctgatggctaagtccaacacttgcagccgaaattggctagagtgtgacagaaatctaaaagatcaacttcatcgtgcaggaaggagcatagaaaaatagagaaaagaagaaaacagcaaaccattctgagtaccgtggaaacaaactaaaagtgggcttagaaggaaaacagaggaagaaggctggattgttccaaaaaaaaaaaatctagaaggtcaaattcatcatgcaggaaggagggtaagaatatatatagagagaaaagaacagagaagaaatacaacagcaactcactactggagtgggttcatatttatcatgtaggaagttgtaggggggatcctctat

SEQ ID NO: 462510 - DNA, 3314 bp, Homo sapiens
  misc_feature (3)..(3): n is a, c, g, or t
  misc_feature (7)..(7): n is a, c, g, or t
  misc_feature (9)..(9): n is a, c, g, or t
  misc_feature (12)..(13): n is a, c, g, or t
  misc_feature (15)..(15): n is a, c, g, or t
gtncacntncanntnttctgctctgtggctgcagctcgggtcacagtggccgctatccgtatccttcagaaaaatgatcccattttccaaaggctcacttgaagagcagtctccacctcaccagccatgggaggaatgcagacttttcaaaggcagctcctgggcagctgggctcagaagaggcacctgcccgtctcagcggcagtgcacgtgcaccgagaacctctttgctgggctgtgggtggtctttggtttcatgtttctgcggaaaccagctacagtgggatatgaaggctctgacattctagatcctggcccaccgtgttggagagggttgccagataaaacacagaacccagggaaatctgaatttcagataaacaccacagacatgtttttagccaataaaggtgaaataaagacattctcacaagaaagacaacaaaaagaagtcattaccaggtcctactcttgggcccatggaaagaactctcataactcagcatgagatgaacaacccaattataaatgatcaaaagatttgaatagatattttacaaatatgaatggccaacaaacataagaaaacaggctcagcactatcagtccttagggaaatgcaaattaaaaccacagggagatctaactacataccttccaggatagctaaaactgttggaaggatgtggagcaactagaattcttgtacattgttgaggggtgggaatgtaaaatgctacaaccactttggaaaaagtttagtaatttctttagaacttaaatatacttaccatatgtcccaggtaagctattcttggcaaagatttatggataaatgtcagagctttatttatactagctaaactctggaactatcccaggtatccatcagtagaatagatgaactgtagcatatgcatacaagggaatactatgtagcaataagaaggactaaaccatgatacatacaacaatgtgaatgaatctcagaaatatgatgaattttaaaatgccttacaccaaaatacatacttcatcatatttgcataaaatttttagaaaatgccaggggttaaatggagggaggaataggttacaaaattgcatgaggaaacttgttgggcaatggaactgtttactatctcgattatgatgacctcaggggtgtaaacaaatatcaaaacccatcattttgaacagtgctgttcaatactacttaataatacctcacctgcggtggaggggaagggccctagagccgtggggagaggcagcccgtggcctggagcagtgggtggatcgggcggaggccgtcaagctagccggaaggggctgtgctgtcaaccagcgagcgcaggaggtgttaaccaccgaagggaggtagaatgtttttccccaccagaggaggcagcgaccacgtctcctctatggaggcattcaagagccgtccagctgaagcagcatcactgtctgagagagaggcatccaaaagggaaaaagccggcctgaggtggaccacagcagacttgataggcaggcttgaggaggcggcgtctgatttacacagggcccacagattggtctgatcaggtgtgacgtttacatagcgctcggggaaggctggtcgtcccaccctaatcttattaaacaaatgggctttctacttggccagtaccatcttgtctgctccttactatacacgcgggtggcaaagacaggagaagatggagccaccgttttgaacgtgtctattcccaggtaacctttctctgttggcacaaccaccagtattagcctatgcaagcttccagcttgcttgtctgtgcctgcagcttgattttacaggttgttctttgttagaaaagaaaatgatttggggcattccttttaatgcttttcattaaaaggaaaaccttaccaaggacttccttattctgtctgcctaaataatttatttttaactcttctatcacagctcggaaggcacaatccacataggtctgcatggtccaccgagctgcatacccacggggccagcgggaggtgggcagctgctgggctctcttctgaagcagacaggatctcactctgttgctgaggctggatcacagctccctgcaaccttgaactctccctcaagcaattctccccactctgccttccaaagcactagcattataggcctaagccaccactcccatccactgtagtgtaaactgtctccttcaatgtttccaatagttgcggagcagatcagataagggttcttcctgtctgttgcttcaagtttcattctctctttaaacaatacaaggttggcttccatggttccttcttaaagaatgttgaaggtgtgtcttcagattcatttagtgttcgtggaaccccagggaaagctgatgtaaaaacctcttttttctcccatatgtctcaaaaagttgtattttctgggtccaagggatctgcaagcctcctaaaggcatttccattgtcactaccaccaggtgtgaactgtaatctggcacgtatagttccaagaactgtcataatagatgctgaagaaacattgtgaagttaactcgctgttaccaactgtgaagtcattagctagaggaatcttgggcggtctgaaatctgagatactgtggaaagaacagaaagatcctgtatctttcctataattgttctactggaagttgtcattttacacaggagacattctgttttatttattttcttttgagacagggtctcactctgtcgcccaggctggagtgcagtgttgttaccacaggtcactggtgcctccactgcctgaggactgctcaagcaatcctcctgcctcagtcccctgaggagctggggccacaggcctgcaccaccatgcctggctaattatttttatttgtagagacaaagtctatcttgcctaggctgatctcgaactcctgggctcaagtaatcctcccgcggtggcttctcaaagtgcttgggattacagatgtaagctaccatgcccggcctcacaggagacatttttgatgtccctcttgacagtctacaaaagtctacaaatctttttttttttttttttgagacagggtcttgctctgtcacccagtctggaatgcagtggtgccatcatagctcactacagcctgagctgtactgagctcgagggatcttcccgtctccgcctcctaagcagctgggactacaggtgtcagaaacgaagagactcaagaaaagactgcctgccctactcaccttgactgagcgctgacgaagaccacggggccctctgcgctgcaagg

SEQ ID NO: 462511 - DNA, 1833 bp, Homo sapiens
ccaggacatcatgctcagggaaagcagccaattcagccagcaacagtccttcgtacagattctccaggaggtgaatgactttgcaggccagcgggagctggtggctgagaacctcagtgtccgtgtatgtcttgagctgaccaagtactcacaagagatgaaacaggagaggaagatgcacttccaagaagggcggcgggcccagcagcagctggaaaatggctttaaacagctggagaatagtaagcgtaaatttgagcgggactgccgggaggcagagaaggcagcccagactgctgaacggctagaccaggatatcaacgccaccaaggctgatgtggagaaggccaagcagcaagcccaccttcggagtcacatggccgaagaaagcaaaaacgaatatgcggctcaactgcagcgcttcaaccgagaccaagcccacttctatttttcacagatgccccagatattcgataagctccaagacatggatgaacgcagggccacccgcctgggtgccgggtatgggctcctgtcggaggccgagctggaggtggtgcccataatagccaagtgcttggagggcatgaaggtggctgcaaatgctgtggatcccaagaacgactcccacgtccttatagagctgcacaagtcaggttttgcccgcccgggcgacgtggaattcgaggacttcagccagcccatgaaccgtgcaccctccgacagcagtctgggcaccccctcggatggacggcctgaactccgaggcccgggtcgcagccgcaccaagcgctggccttttggcaagaagaacaagcctcgccccccacccctctcccccctggggggccccgtaccctcggcattgcctaacggacccccgtccccccgctccggccgtgaccccttggccatactgagcgagatcagtaagtcggtcaaaccgaggctagcatccttccgcagccttcgaggcagccgtggggtaagtgaggcctcggggcaggaggaggtggtggccctagcctgcccagcggcgggtggcgggaccctgggctcgcttcctgccgctggctgggcccctcttccctggttgcccaacccagacctgctttgctctgtgcatggcctcgctgtcaagaaccatggctggggaagggagtgaaatatctcagacgggtgcagagtctggcaggctagactccttgatcccaaattcagccctctacccaccttgcagacagtggtgaccgaggattttagccacttgcccccagagcagcagcgaaaacggcttcaacagcagttggaagaacgcagtcgtgaacttcagaaggaggttgaccagagggaagccctaaagaaaatgaaggatgtctatgagaagacacctcagatgggggaccccgccagcttggagccccagatcgctgaaaccctgagcaacattgaacggctgaaattggaagtgcagaagtatgaggcgtggctggcagaagctgaaagtcgagtccttagcaaccggggagacagcctgagccggcacgcccggcctcccgacccccccgctagcgccccgccagacagcagcagcaacagcgcatcacaggacaccaaggagaggtgaggggtgacgtcagagtgggtctgttcccagggtcccaggagggcctgtctttatctgccgaattatccccaaacagctctgaagagcctccctcagaagagagccaggacacccccatttacacggagtttgatgaggatttcgaggaggaacccacatcccccataggtcactgtgtggccatctaccactttgaaggtgagaac

SEQ ID NO: 462512 - DNA, 2053 bp, Homo sapiens
aaaatctactcaagggttggggttaaggaatatggaccagaatttgtcatcgcttcaaggattacattcttggggcttaacccttttccacctggaggtgcgtcctggggcatcagcctgctcgggaggaggggcctgactccctgttccccgattctcatccaaccccagattcagccagcaacagtccttcgtacagattctccaggaggtgaatgactttgcaggccagcgggagctggtggctgagaacctcagtgtccgtgtatgtcttgagctgaccaagtactcacaagagatgaaacaggagaggaagatggtgaggagccccccgattcaggttttacaaagggcttctgctggaaccctggcgagccttatcactcttctttctgtagcacttccaagaagggcggcgggcccagcagcagctggaaaatggctttaaacagctggagaatagtaagcgtaaatttgagcgggactgccgggaggcagagaaggcagcccagactgctgaacggctagaccaggatatcaacgccaccaaggctgatgtggagaaggccaagcagcaagcccaccttcggagtcacatggccgaagaaagcaaaaacgaatatgcggctcaactgcagcgcttcaaccgagaccaagcccacttctatttttcacagatgccccagatattcgataagctccaagacatggatgaacgcagggccacccgcctgggtgccgggtatgggctcctgtcggaggccgagctggaggtggtgcccataatagccaagtgcttggagggcatgaaggtggctgcaaatgctgtggatcccaagaacgactcccacgtccttatagagctgcacaagtcaggttttgcccgcccgggcgacgtggaattcgaggacttcagccagcccatgaaccgtgcaccctccgacagcagtctgggcaccccctcggatggacggcctgaactccgaggcccgggtcgcagccgcaccaagcgctggccttttggcaagaagaacaagcctcgccccccacccctctcccccctggggggccccgtaccctcggcattgcctaacggacccccgtccccccgctccggccgtgaccccttggccatactgagcgagatcagtaagtcggtcaaaccgaggctagcatccttccgcagccttcgaggcagccgtggggtaagtgaggcctcggggcaggaggaggtggtggccctagcctgcccagcggcgggtggcgggaccctgggctcgcttcctgccgctggctgggcccctcttccctggttgcccaacccagacctgctttgctctgtgcatggcctcgctgtcaagaaccatggctggggaagggagtgaaatatctcagacgggtgcagagtctggcaggctagactccttgatcccaaattcagccctctacccaccttgcagacagtggtgaccgaggattttagccacttgcccccagagcagcagcgaaaacggcttcaacagcagttggaagaacgcagtcgtgaacttcagaaggaggttgaccagagggaagccctaaagaaaatgaaggatgtctatgagaagacacctcagatgggggaccccgccagcttggagccccagatcgctgaaaccctgagcaacattgaacggctgaaattggaagtgcagaagtatgaggcgtggctggcagaagctgaaagtcgagtccttagcaaccggggagacagcctgagccggcacgcccggcctcccgacccccccgctagcgccccgccagacagcagcagcaacagcgcatcacaggacaccaaggagaggtgaggggtgacgtcagagtgggtctgttcccagggtcccaggagggcctgtctttatctgccgaattatccccaaacagctctgaagagcctccctcagaagagagccaggacacccccatttacacggagtttgatgaggatttcgaggaggaacccacatcccccataggtcactgtgtggccatctaccactttgaaggtgagaac

SEQ ID NO: 462513 - DNA, 516 bp, Homo sapiens
tcgcttcaaggattacattcttggggcttaacccttttccacctggaggtgcgtcctggggcatcagcctgctcgggaggaggggcctgactccctgttccccgattctcatccaaccccagattcagccagcaacagtccttcgtacagattctccaggaggtgaatgactttgcaggccagcgggagctggtggctgagaacctcagtgtccgtgtatgtcttgagctgaccaagtactcacaagagatgaaacaggagaggaagatggtgaggagccccccgattcaggttttacaaagggcttctgctggaaccctggcgagccttatcactcttctttctgtagcacttccaagaagggcggcgggcccagcagcagctggaaaatggctttaaacagctggagaatgtgagtttgcagaggtagcagtgactgtggcccggaggcatgggggcagggttgcggatccggagtcagggagctgccctctttgtcagacctggaccttccct

SEQ ID NO: 462514 - DNA, 2028 bp, Homo sapiens
  misc_feature (91)..(91): n is a, c, g, or t
  misc_feature (185)..(185): n is a, c, g, or t
  misc_feature (187)..(187): n is a, c, g, or t
  misc_feature (214)..(214): n is a, c, g, or t
ggggcggcggcggcggcggcgggagcagcagggaggggggcacggagcggggggagcagggcgaggggcgcgagcgccacacgcagggggngcgggaccggggggacagagagggaaagggcgggaaagaacgcaccgaaggggaacaggcggacgccaaacaacggcggaccgggggaaaaaanancggcccaagagaccggccaaggagganccggaggccaaattcagccagcaacagtccttcgtacagattctccaggaggtgaatgactttgcaggccagcgggagctggtggctgagaacctcagtgtccgtgtatgtcttgagctgaccaagtactcacaagagatgaaacaggagaggaagatgcacttccaagaagggcggcgggcccagcagcagctggaaaatggctttaaacagctggagaatagtaagcgtaaatttgagcgggactgccgggaggcagagaaggcagcccagactgctgaacggctagaccaggatatcaacgccaccaaggctgatgtggagaaggccaagcagcaagcccaccttcggagtcacatggccgaagaaagcaaaaacgaatatgcggctcaactgcagcgcttcaaccgagaccaagcccacttctatttttcacagatgccccagatattcgataagctccaagacatggatgaacgcagggccacccgcctgggtgccgggtatgggctcctgtcggaggccgagctggaggtggtgcccataatagccaagtgcttggagggcatgaaggtggctgcaaatgctgtggatcccaagaacgactcccacgtccttatagagctgcacaagtcaggttttgcccgcccgggcgacgtggaattcgaggacttcagccagcccatgaaccgtgcaccctccgacagcagtctgggcaccccctcggatggacggcctgaactccgaggcccgggtcgcagccgcaccaagcgctggccttttggcaagaagaacaagcctcgccccccacccctctcccccctggggggccccgtaccctcggcattgcctaacggacccccgtccccccgctccggccgtgaccccttggccatactgagcgagatcagtaagtcggtcaaaccgaggctagcatccttccgcagccttcgaggcagccgtggggtaagtgaggcctcggggcaggaggaggtggtggccctagcctgcccagcggcgggtggcgggaccctgggctcgcttcctgccgctggctgggcccctcttccctggttgcccaacccagacctgctttgctctgtgcatggcctcgctgtcaagaaccatggctggggaagggagtgaaatatctcagacgggtgcagagtctggcaggctagactccttgatcccaaattcagccctctacccaccttgcagacagtggtgaccgaggattttagccacttgcccccagagcagcagcgaaaacggcttcaacagcagttggaagaacgcagtcgtgaacttcagaaggaggttgaccagagggaagccctaaagaaaatgaaggatgtctatgagaagacacctcagatgggggaccccgccagcttggagccccagatcgctgaaaccctgagcaacattgaacggctgaaattggaagtgcagaagtatgaggcgtggctggcagaagctgaaagtcgagtccttagcaaccggggagacagcctgagccggcacgcccggcctcccgacccccccgctagcgccccgccagacagcagcagcaacagcgcatcacaggacaccaaggagaggtgaggggtgacgtcagagtgggtctgttcccagggtcccaggagggcctgtctttatctgccgaattatccccaaacagctctgaagagcctccctcagaagagagccaggacacccccatttacacggagtttgatgaggatttcgaggaggaacccacatcccccataggtcactgtgtggccatctaccactttgaaggtgagaac

SEQ ID NO: 462515 - DNA, 1629 bp, Homo sapiens
tgtggttctctgtcttgatggcgggatggtgctcatgaggaagcaagtgccatcaaggttcatgtaccccaaagagtggcagcacctcaccatgttcatcctcctcactcttaatggctgtgtggacttcatgagcaagaatgtgctgcctcagaggtgtgtgggcctagaaaaaggtaccctggtcctgatcatctacgagctcctgctgctgatggtgtcacatgttaaagattcagaaggggtggagctgcacgtttattctctgctcatcttggtggtgttcctgctgttgctggtgttgactgcagagctgtgggctcccaacatgtgtcatctccagctgatggagacctttctgattctgatgatgggctcctggctgatgcaggcaggctttattctatacagacccgtctctggctacccatggcaggacgatgacatcagtgacatcatgtttgtcaccaccttcttctgctggcatgtgatgatcaatgcctcattcctgttgggaatctatggcttctcttccttttggtatcattgtttcagacccagcttgaagctgactgggcccaaagaagctccatattatgcaagcactccaggacccctctacaagttgctacaggaagtggagcagtcagagaaagaggaccaggctctcctccttccaaagagctccccctgagacagggcctacagtggctggcacatcgtccacctcatcttcctcctgttggctcctcagccacgagcatggtaccctccttggtaaagctttcaagaattggcttcatttcaaactttacatataaagtgagactttttaaatacttaataacatttcaaatttccataatttaaatttgtatagaattcaactgctatagcatttttatagcattcaaatgcttggtacttccctgacttctcattttattactcttattctagcccaaactttccttttcaccatgaccacccttgcacatgcaatttagcagataccattcttgggtctttgcaaatttcttttccttgcaaatcacagccagtcatcctacagtcacatatttaccatgttattcgattcccagaataaacctacatccacccccacaccgcaccaagtatccccaaggtggccttctccagaactcttactgattcccttgttttggaactcttgggcacttacattaaatctgctttgttagtttgctcatacaggtgacccactttcttttatactgctgctgaaatcattttctttcagaaggttcttcctcacccactaaagtacaggctcctaaagggaaaagactttgccttatccaagttaccaaatttcctatgtatactccagctatggatcatggttatgtttaataaagccttctttgcttccagagtcttccctaatcctgtttcttctaaatgtattgctggacaggttggaggttttgtgaatctctctgggtgacaacaacagtcctgaacactgagtcactgccttagtaatgcacccactctcttccttgttttggggtataataaaatccagtaacttgtttctgaagttgactctgttattgtttttaatcctcacaaatgtttctataa

SEQ ID NO: 462516 - DNA, 640 bp, Homo sapiens
gaaggtgtagatggggaatgcttgccaggatcccctttgataactgagttggctttcaacatgcagagagccaagcagataaaaggcttcaatggaaaagaatcttctccaggtggcaagaacaagagcagagaccaacagatccactgggaagctaccatggaggcccacgcaggaggtgatggaagattcacgagggtgttagccatggaggtctggtgaaccgtgtgctttcttgggacatctggagtttcctgtccagcatcagttatgctcgctacttggtgcatccgattctgatcatcctttacaatggccttcaggaaacacttattcaccacactgacaccaacatgttctatcttttctctggacaccgtgtgctgaccttcgtcactgggctggccctgacgctgttcattgagaaaccatgtcaggaactgaagcagcacctgctgggccatgaatgttctggttaaaacacaaaagaatggatgggccttgttggtaatgacgagcaaagatgaggtggccttatctaggtgatgaatgcttgtattcccgagaaggggtgtgaatctcattttgtgaaagtttaatatatacattttctttgcatttaatatgtgaaagagttctt

SEQ ID NO: 462517 - DNA, 755 bp, Homo sapiens
gaaggtgtagatggggaatgcttgccaggatcccctttgataactgagttggctttcaacatgcagagagccaagcagataaaaggcttcaatggaaaagaatcttctccaggtggcaagaacaagagcagagaccaacagatccactgggaagctaccatggaggcccacgcaggaggtgatggaagattcacgagggtgttagccatggaggaaaagttcacagacttaggcacagaatgcaatgggagcatcgatgggatgatgggcatcttcactggcccagagacaggctgtggcttcatgcatcagtgcttgttccctccaggtctggtgaaccgtgtgctttcttgggacatctggagtttcctgtccagcatcagttatgctcgctacttggtgcatccgattctgatcatcctttacaatggccttcaggaaacacttattcaccacactgacaccaacatgttctatcttttctctggacaccgtgtgctgaccttcgtcactgggctggccctgacgctgttcattgagaaaccatgtcaggaactgaagcagcacctgctgggccatgaatgttctggttaaaacacaaaagaatggatgggccttgttggtaatgacgagcaaagatgaggtggccttatctaggtgatgaatgcttgtattcccgagaaggggtgtgaatctcattttgtgaaagtttaatatatacattttctttgcatttaatatgtgaaagagttctt

SEQ ID NO: 462518 - DNA, 787 bp, Homo sapiens
ggcatttttttgtgtgtgcttttaataagagctattcatgagctcttcaagattgggccttgccctttgtattttcatttctggagcctggaatatcactcagcacaaagtatatactcaataaaggttttcctggccagatcagcctccccaactagactgtgagcgccttaaagcaggaattgttataattattttcactgccaaactcggcatctggcatatcgtatgcactcagggaatgtctacggaatgaatgaacttaaggataatacacgtgacggaatgttaaaatggaagttttggctgagatctaaagatgacagatataagataccaaagtgaactggaaacagaccaccctgaagaatgtgcaagaagggtgcctgaggacccattaatcaactcttaaacctttcattgatgtggaaggtcagacagagatggatttttaggaaagagctgttggtttactgcacatcaggcctccttccagggtgaagtatgaagagatcctctcccttcaggagtcaggaagacacagaccagcagagaatctgctgcatgtccctgaggttgtggcacatggtggcttgtatgtgactcctgtctggaagagacaggctggctgacagctgcagtgtaaaagtgaagtagaggttaccctgggatcaaccagcactgccagagtctgtccagatccaaaagacaaaggtttcccatagaccccaagtggcccatgtatgagagagctgccaggggttctcagatcctgtccaacatggcc

SEQ ID NO: 462519 - DNA, 2173 bp, Homo sapiens
ggcatttttttgtgtgtgcttttaataagagctattcatgagctcttcaagattgggccttgccctttgtattttcatttctggagcctggaatatcactcagcacaaagtatatactcaataaaggttttcctggccaggctcataggtggaaaggacttgccttgtcccagatgagactttggaccatggacttatgagttgatgctgaaattagttaagactttgggggactattgggaaggtgtgattggttttgaaatgtgaggacatgagatttggcagcagccaggtgtggaatgatatggtttggctctgtgtccccacccaaatctcatcttgaattgtattcccataattcccacgtgttgggggagggacgcagtgggagataattaaatcattggggcagtctaccccatactgttttcatggcaatgaataaatctcacgagatctgatggttttatcaagggtttccgcttttggaacttcctcattctctctttgcctgctgctattcttgtaaggtgggacttgacttgctcctctttgccttccgccatgattatgaggctccccaggccacatggaactaaggaggaggtgctgatgagagcccatttaggcgtatatcatgcaccactgccttatggagagtcctggacagaactggacctgatggaagggaaagatctgatgggaggagaaggtcctggaatctcagtgatgcaacagccagacccagtgtcacatccattgggggttatgtgggttgaagagctccttctgcctaagtgtgccaagtattggagtcaggggtatccacattactccagcccctttaagtacacctggcatactcgctggacttcatacaaaaagacactactatcatcagcattttgtctggaagatgatagagaccaaatgaaagatgggattggcgagtctaagatgagactggaagcaatagtcaggcagagggatggaggcaaaaaggctagccaagaagctgttagatgtggtaagaacctagactccaagagtggaagaggtgaaggtgtatgggaagatgccaccctagatttagatgcagggtggaaggatttggctgaatatatttgcagaatatatgatttgatgactagtatcttgcagagttatctaatggatggttacataaacatctttgcctgtctgagggacagtagcagtgacaagaagaagattaagggtggaggctttagttcctccacaatttctgctgactttacctctcaattctctgatctaaacagttcacatttcctatgcaaagggcttcggtgagggtgtgcacaaggaggggaagtaagttggagaggcgtgatattcttggcctgatatacattactagggagtttcctacatggaatacaggatagagaaggaagacttcaaagttagaatggatggaaatactaaatttaaaaatataacaaagaaatgcatgattgtattattagttaataattaattattagttaataattagttaatgtgacacttgctatcccgttagtttgacccatggtctggagctacaatttaatttaactgaagggacaactttcagttgaaatttcttatatttccaagtagaggtctttttgagcctatttctaatgactagtttaaacattgataattagcaacattcattcgtaaggcaataatttctatagcagtgaatatcattttaattctgtaattagataaccaaaattttaataataggagctatcaatttgctgaataaaccttccaacagataatatgaaagaaaaacatctatacaactcaggtgaaaacatgatgatttggttaattaaccttcgaaatactgtggttgttccattatgtgcaataaaatgctttgtaaaaaacttgtctaaaggagtaagtctgggaaatgcttcacaggtaatttttctctaggaagctcacaatgcacatgagtatattacaagattagtataagatattctgtagtaacaagacatatttaactcagtgtttcccaaacttagttggccatggctcttttttaaaaatgaaatctagtgttattttggtaaatagtgttggctgattatacaaaagccattccctccctccctttttaacagaa

SEQ ID NO: 462520 - DNA, 2793 bp, Homo sapiens
gtccccgcggccgctggatgtgggtgggccggcagccgggactccgggcgtcctgtcccgtccctgcccgtcgactgcggccttggccccgaagcccttttgtgcagctccgcgcccgcagcccgacgccccagcttgtgcgggggccacgggagggtcatgcgcggatttcgactcgggtgtggatttcgtccgtaggaggagcagcggtctgtggggcccacagcctccactttctcctgttaaaaattatactgagatgtttcaggacccagtggcttttaaggatgtggctgtgaacttcacccaggaggagtgggctttgctggatatttcccagaagaatctctacagggaagtgatgctggaaactttctggaacctgacctctataggaaaaaagtggaaagaccagaacattgaatatgagtaccaaaaccccaggagaaacttcaggagtgtcacagaagagaaagtcaatgaaattaaagaagacagtcattgtggagaaacttttaccccagttccagatgacaggctgaacttccagaagaagaaagcttctcctgaagtaaaatcatgtgacagctttgtgtgtgaagttggcctaggtaactcatcttctaatatgaacatcagaggtgacactggacacaaggcatgtgaatgtcaggaatatggaccaaagccatggaagagtcaacaacctaaaaaagccttcagatatcacccctccttgagaacacaagaaagggatcacactggaaagaaaccctatgcttgtaaagaatgtggaaaaaacattatttaccattcaagcattcaaagacacatggtagtgcacagtggggatggaccttataaatgtaagttttgtgggaaagcattccattgtctcagtttatatcttatccatgaaagaactcacactggagagaaaccgtatgaatgtaaacaatgtggtaaatcttttagttattctgctacccatcgaatacatgaaagaactcacattggagaaaagccttatgaatgtcaggaatgtgggaaagcattccatagtcccagatcctgtcacagacatgaaaggagtcacatgggagagaaggcttatcaatgtaaggaatgtggaaaagcattcatgtgtccccgttatgttcgtagacatgaaaggacccactctaggaaaaaactttatgaatgtaagcagtgtgggaaagcattatcctctcttacaagttttcaaacacacataagaatgcactctggagaaagaccttatgaatgtaagacatgtgggaaaggcttttattctgccaagtcatttcaaagacatgaaaaaactcacagtggagagaaaccgtataaatgcaagcaatgtggtaaagccttcactcgttccggttcctttcgatatcatgaaaggactcacactggagagaaaccctatgagtgtaagcaatgtgggaaagccttcagatctgccccaaatcttcaattgcatggtaggactcacactggagagaaaccgtatcaatgtaaggaatgtgggaaagctttcagatctgcctcacaacttcgaatccatcgtaggattcacactggagagaaaccctatgaatgtaagaaatgtgggaaagccttcagatatgtccagaactttcgatttcatgaaaggacacaaacacataagaatgcactctggagaaagaccttataaatataagatatatgggaaacacttttattctgccaagttatttcaaacacatgaaaaaattcacactggagagaaaccctataaatgcaagcaatgtggtaaagccttaattgttccagttcctttcgatatctaaaaggactcacagtggagaaaaactctatgagtgtaagcaatgtgggaaagtcttcagatctgtcaagaacctttcaatttatgaaaggacacacactggagagaaaccctatgaatgtaagaaatgtggaaaagcgttccataatttctcttcttttcaaatacatgaaagttgcacagaggagaggcgccctaagaatgtaagcattgtgggaaagcattcatatctgccaagatcgtttgaatacatgcaaaacacacactggagagaaacctatgaatgtaaggaatgcaaacaagcattcaattatttttcttccttgcatatacatgaaaggactcatacgagagagaatccgtatgaatgtaaggattgtgggaaagcattcagcttgcttaattgctttcatagacatgtaaagacacaccagaaggaaaccctatgaatgtaagcaatgtggcaaaagctttcacttcttccagttcttttcaatatcatgaaaggactcacactggggagaaaccgtatcaatgtaagcaatgtgggaaagccgtcagatcagcctcaagacttcaaatgcatggaagcactcacacttggcagaaactctatgaatgtaagcagtatgggaaagccttcagatcggctaggattctttgaatacaaataatgaatgtaaacaattaactgtttataataactgtatactaacaaatgttattctttttaaataattaagaagctataataaaatatccattggtgtcatgtattagatcaagcttataatgttacattgttattatttggatattgtgaatcagcattacctggattaaatgccaggcatatttttcctcatgtaaactttacttttcatgcttatgtactttaatttttatttcaactgtaatttttctttttttttccttttgct

SEQ ID NO: 462521 - DNA, 529 bp, Homo sapiens
gtccccgcggccgctggatgtgggtgggccggcagccgggactccgggcgtcctgtcccgtccctgcccgtcgactgcggccttggccccgaagcccttttgtgcagctccgcgcccgcagcccgacgccccagcttgtgcgggggccacgggagggtcatgcgcggatttcgactcgggtgtggatttcgtccgtaggaggagcagcggtctgtggggcccacagcctccactttctcctgttaaaaattatactgaggtacgttaacaaaaagttcatttgaggaaacagccattcacgaatgagaaacacccggtcctggcttgtggtttgtcaacggaaaaaaaacagactatgtaaaatacagaagtgtattcagagccgagtaggagagaccttggccgagggaaacacaaccccaagcagcctggagtaagtggtccggagcggctcaggacagtttggttttattcatttcagagagacaggaattgcagggaaaatgatggatcaaggctggaaggtgta

SEQ ID NO: 462522 - DNA, 434 bp, Homo sapiens
gtccccgcggccgctggatgtgggtgggccggcagccgggactccgggcgtcctgtcccgtccctgcccgtcgactgcggccttggccccgaagcccttttgtgcagctccgcgcccgcagcccgacgccccagcttgtgcgggggccacgggagggtcatgcgcggatttcgactcgggtgtggatttcgtccgtaggaggagcagcggtctgtggggcccacagcctccactttctcctgttaaaaattatactgaggtacgttaacaaaaagttcatttgaggaaacagccattcacgaatgagaaacacccggtcctggcttgtggtttgtcaacggaaaaaaaacagactatgtaaaatacagaagttgcagcccagccgaggatgcgccactgcactccagcctgggtaacagagtgagaccccatct

SEQ ID NO: 462523 - DNA, 379 bp, Homo sapiens
attcctgccgtcacctttgtcgctgcgagggcggcggttgggatctggcctttccagccccgagagggacctagtgcctctacccagatttctgtcgctctgtcacctgcgctatgccctgctttactcacaggagctgtagagaggaccccggtacatctgaaagccgggaaatggtgcggctcctggagttcccagtgcgtcaacaccggcctgaggagctggcctagtacttcccaccattgaaactgcagtctggacagcagagaaaggatagacccatcacacccgagtcaagaaagcaccgccacccccaaagtcgtaggccattattccaggggaaaaccccctcaaactaaagctaagaaaaatttaacct

SEQ ID NO: 462524 - DNA, 2417 bp, Homo sapiens
attcctgccgtcacctttgtcgctgcgagggcggcggttgggatctggcctttccagccccgagagggacctagtgcctctacccagatttctgtcgctctgtcacctgcgctatgccctgctttactcacaggagctgtagagaggaccccggtacatctgaaagccgggaaatggaaaaaagtggaaagaccagaacattgaatatgagtaccaaaaccccaggagaaacttcaggagtgtcacagaagagaaagtcaatgaaattaaagaagacagtcattgtggagaaacttttaccccagttccagatgacaggctgaacttccagaagaagaaagcttctcctgaagtaaaatcatgtgacagctttgtgtgtgaagttggcctaggtaactcatcttctaatatgaacatcagaggtgacactggacacaaggcatgtgaatgtcaggaatatggaccaaagccatggaagagtcaacaacctaaaaaagccttcagatatcacccctccttgagaacacaagaaagggatcacactggaaagaaaccctatgcttgtaaagaatgtggaaaaaacattatttaccattcaagcattcaaagacacatggtagtgcacagtggggatggaccttataaatgtaagttttgtgggaaagcattccattgtctcagtttatatcttatccatgaaagaactcacactggagagaaaccgtatgaatgtaaacaatgtggtaaatcttttagttattctgctacccatcgaatacatgaaagaactcacattggagaaaagccttatgaatgtcaggaatgtgggaaagcattccatagtcccagatcctgtcacagacatgaaaggagtcacatgggagagaaggcttatcaatgtaaggaatgtggaaaagcattcatgtgtccccgttatgttcgtagacatgaaaggacccactctaggaaaaaactttatgaatgtaagcagtgtgggaaagcattatcctctcttacaagttttcaaacacacataagaatgcactctggagaaagaccttatgaatgtaagacatgtgggaaaggcttttattctgccaagtcatttcaaagacatgaaaaaactcacagtggagagaaaccgtataaatgcaagcaatgtggtaaagccttcactcgttccggttcctttcgatatcatgaaaggactcacactggagagaaaccctatgagtgtaagcaatgtgggaaagccttcagatctgccccaaatcttcaattgcatggtaggactcacactggagagaaaccgtatcaatgtaaggaatgtgggaaagctttcagatctgcctcacaacttcgaatccatcgtaggattcacactggagagaaaccctatgaatgtaagaaatgtgggaaagccttcagatatgtccagaactttcgatttcatgaaaggacacaaacacataagaatgcactctggagaaagaccttataaatataagatatatgggaaacacttttattctgccaagttatttcaaacacatgaaaaaattcacactggagagaaaccctataaatgcaagcaatgtggtaaagccttaattgttccagttcctttcgatatctaaaaggactcacagtggagaaaaactctatgagtgtaagcaatgtgggaaagtcttcagatctgtcaagaacctttcaatttatgaaaggacacacactggagagaaaccctatgaatgtaagaaatgtggaaaagcgttccataatttctcttcttttcaaatacatgaaagttgcacagaggagaggcgccctaagaatgtaagcattgtgggaaagcattcatatctgccaagatcgtttgaatacatgcaaaacacacactggagagaaacctatgaatgtaaggaatgcaaacaagcattcaattatttttcttccttgcatatacatgaaaggactcatacgagagagaatccgtatgaatgtaaggattgtgggaaagcattcagcttgcttaattgctttcatagacatgtaaagacacaccagaaggaaaccctatgaatgtaagcaatgtggcaaaagctttcacttcttccagttcttttcaatatcatgaaaggactcacactggggagaaaccgtatcaatgtaagcaatgtgggaaagccgtcagatcagcctcaagacttcaaatgcatggaagcactcacacttggcagaaactctatgaatgtaagcagtatgggaaagccttcagatcggctaggattctttgaatacaaataatgaatgtaaacaattaactgtttataataactgtatactaacaaatgttattctttttaaataattaagaagctataataaaatatccattggtgtcatgtattagatca

SEQ ID NO: 462525 - DNA, 2636 bp, Homo sapiens
gtccccgcggccgctggatgtgggtgggccggcagccgggactccgggcgtcctgtcccgtccctgcccgtcgactgcggccttggccccgaagcccttttgtgcagctccgcgcccgcagcccgacgccccagcttgtgcgggggccacgggagggtcatgcgcggatttcgactcgggtgtggatttcgtccgtaggaggagcagcggtctgtggggcccacagcctccactttctcctgttaaaaattatactgagatgtttcaggacccagtggcttttaaggatgtggctgtgaacttcacccaggaggagtgggctttgctggatatttcccagaagaatctctacagggaagtgatgctggaaactttctggaacctgacctctataggaaaaaagtggaaagaccagaacattgaatatgagtaccaaaaccccaggagaaacttcaggagtgtcacagaagagaaagtcaatgaaattaaagaagacagtcattgtggagaaacttttaccccagttccagatgacaggctgaacttccagaagaagaaagcttctcctgaagtaaaatcatgtgacagctttgtgtgtgaagttggcctaggtaactcatcttctaatatgaacatcagaggtgacactggacacaaggcatgtgaatgtcaggaatatggaccaaagccatggaagagtcaacaacctaaaaaagccttcagatatcacccctccttgagaacacaagaaagggatcacactggaaagaaaccctatgcttgtaaagaatgtggaaaaaacattatttaccattcaagcattcaaagacacatggtagtgcacagtggggatggaccttataaatgtaagttttgtgggaaagcattccattgtctcagtttatatcttatccatgaaagaactcacactggagagaaaccgtatgaatgtaaacaatgtggtaaatcttttagttattctgctacccatcgaatacatgaaagaactcacattggagaaaagccttatgaatgtcaggaatgtgggaaagcattccatagtcccagatcctgtcacagacatgaaaggagtcacatgggagagaaggcttatcaatgtaaggaatgtggaaaagcattcatgtgtccccgttatgttcgtagacatgaaaggacccactctaggaaaaaactttatgaatgtaagcagtgtgggaaagcattatcctctcttacaagttttcaaacacacataagaatgcactctggagaaagaccttatgaatgtaagacatgtgggaaaggcttttattctgccaagtcatttcaaagacatgaaaaaactcacagtggagagaaaccgtataaatgcaagcaatgtggtaaagccttcactcgttccggttcctttcgatatcatgaaaggactcacactggagagaaaccctatgagtgtaagcaatgtgggaaagccttcagatctgccccaaatcttcaattgcatggtaggactcacactggagagaaaccgtatcaatgtaaggaatgtgggaaagctttcagatctgcctcacaacttcgaatccatcgtaggattcacactggagagaaaccctatgaatgtaagaaatgtgggaaagccttcagatatgtccagaactttcgatttcatgaaaggacacaaacacataagaatgcactctggagaaagaccttataaatataagatatatgggaaacacttttattctgccaagttatttcaaacacatgaaaaaattcacactggagagaaaccctataaatgcaagcaatgtggtaaagccttaattgttccagttcctttcgatatctaaaaggactcacagtggagaaaaactctatgagtgtaagcaatgtgggaaagtcttcagatctgtcaagaacctttcaatttatgaaaggacacacactggagagaaaccctatgaatgtaagaaatgtggaaaagcgttccataatttctcttcttttcaaatacatgaaagttgcacagaggagaggcgccctaagaatgtaagcattgtgggaaagcattcatatctgccaagatcgtttgaatacatgcaaaacacacactggagagaaacctatgaatgtaaggaatgcaaacaagcattcaattatttttcttccttgcatatacatgaaaggactcatacgagagagaatccgtatgaatgtaaggattgtgggaaagcattcagcttgcttaattgctttcatagacatgtaaagacacaccagaaggaaaccctatgaatgtaagcaatgtggcaaaagctttcacttcttccagttcttttcaatatcatgaaaggactcacactggggagaaaccgtatcaatgtaagcaatgtgggaaagccgtcagatcagcctcaagacttcaaatgcatggaagcactcacacttggcagaaactctatgaatgtaagcagtatgggaaagccttcagatcggctaggattctttgaatacaaataatgaatgtaaacaattaactgtttataataactgtatactaacaaatgttattctttttaaataattaagaagctataataaaatatccattggtgtcatgtattagatca

SEQ ID NO: 462526 - DNA, 2575 bp, Homo sapiens
cactgagatgccctatttaaatgacagaaactaagaaaccatctctacatctgctcaaagcttcgtgcaggtgctcacgcggatgcgtccaggctccaaattatcaacaccatgtaatggattctctacctgtcggaggaggccagcggtctgtggggcccacagcctccactttctcctgttaaaaattatactgagatgtttcaggacccagtggcttttaaggatgtggctgtgaacttcacccaggaggagtgggctttgctggatatttcccagaagaatctctacagggaagtgatgctggaaactttctggaacctgacctctataggaaaaaagtggaaagaccagaacattgaatatgagtaccaaaaccccaggagaaacttcaggagtgtcacagaagagaaagtcaatgaaattaaagaagacagtcattgtggagaaacttttaccccagttccagatgacaggctgaacttccagaagaagaaagcttctcctgaagtaaaatcatgtgacagctttgtgtgtgaagttggcctaggtaactcatcttctaatatgaacatcagaggtgacactggacacaaggcatgtgaatgtcaggaatatggaccaaagccatggaagagtcaacaacctaaaaaagccttcagatatcacccctccttgagaacacaagaaagggatcacactggaaagaaaccctatgcttgtaaagaatgtggaaaaaacattatttaccattcaagcattcaaagacacatggtagtgcacagtggggatggaccttataaatgtaagttttgtgggaaagcattccattgtctcagtttatatcttatccatgaaagaactcacactggagagaaaccgtatgaatgtaaacaatgtggtaaatcttttagttattctgctacccatcgaatacatgaaagaactcacattggagaaaagccttatgaatgtcaggaatgtgggaaagcattccatagtcccagatcctgtcacagacatgaaaggagtcacatgggagagaaggcttatcaatgtaaggaatgtggaaaagcattcatgtgtccccgttatgttcgtagacatgaaaggacccactctaggaaaaaactttatgaatgtaagcagtgtgggaaagcattatcctctcttacaagttttcaaacacacataagaatgcactctggagaaagaccttatgaatgtaagacatgtgggaaaggcttttattctgccaagtcatttcaaagacatgaaaaaactcacagtggagagaaaccgtataaatgcaagcaatgtggtaaagccttcactcgttccggttcctttcgatatcatgaaaggactcacactggagagaaaccctatgagtgtaagcaatgtgggaaagccttcagatctgccccaaatcttcaattgcatggtaggactcacactggagagaaaccgtatcaatgtaaggaatgtgggaaagctttcagatctgcctcacaacttcgaatccatcgtaggattcacactggagagaaaccctatgaatgtaagaaatgtgggaaagccttcagatatgtccagaactttcgatttcatgaaaggacacaaacacataagaatgcactctggagaaagaccttataaatataagatatatgggaaacacttttattctgccaagttatttcaaacacatgaaaaaattcacactggagagaaaccctataaatgcaagcaatgtggtaaagccttaattgttccagttcctttcgatatctaaaaggactcacagtggagaaaaactctatgagtgtaagcaatgtgggaaagtcttcagatctgtcaagaacctttcaatttatgaaaggacacacactggagagaaaccctatgaatgtaagaaatgtggaaaagcgttccataatttctcttcttttcaaatacatgaaagttgcacagaggagaggcgccctaagaatgtaagcattgtgggaaagcattcatatctgccaagatcgtttgaatacatgcaaaacacacactggagagaaacctatgaatgtaaggaatgcaaacaagcattcaattatttttcttccttgcatatacatgaaaggactcatacgagagagaatccgtatgaatgtaaggattgtgggaaagcattcagcttgcttaattgctttcatagacatgtaaagacacaccagaaggaaaccctatgaatgtaagcaatgtggcaaaagctttcacttcttccagttcttttcaatatcatgaaaggactcacactggggagaaaccgtatcaatgtaagcaatgtgggaaagccgtcagatcagcctcaagacttcaaatgcatggaagcactcacacttggcagaaactctatgaatgtaagcagtatgggaaagccttcagatcggctaggattctttgaatacaaataatgaatgtaaacaattaactgtttataataactgtatactaacaaatgttattctttttaaataattaagaagctataataaaatatccattggtgtcatgtattagatca

SEQ ID NO: 462527 - DNA, 3406 bp, Homo sapiens
acctggctttgctgtgactgcttccccgagtgtccatcaggacagcttcacctccttgaggattaaagcctaacagtactgagctatttgtctgtcaaaatgtctgcaaaattgggaaagtcatcatcactcctaacacaaacttcagaggagtgtaatgggattctgacagagaagatggaagaggaagagcagacctgtgatccagactctagcctccactggagcagcagctacagcccagagaccttccgccagcaattcaggcagtttggctaccaggattcacctgggccccatgaggctctgagccggctctgggaactttgtcatctctggctgaggccggaagtgcacaccaaggagcagatcctggagctgctggtgctggagcagttcctggccatcctcccaaaagagcttcaggcctgggtgcagaagcatcatccagagaatggagaggaaactgtgactatgctggaggatgtggagagagagcttgatggaccaaagcagatcttttttggacgaaggaaggacatgattgcagagaagctagcaccttcagaaatcactgaggaattgccaagtagccagctcatgcccgtgaagaagcagctccagggagcatcatgggagcttcagtccttaagaccacatgatgaagacatcaaaactacaaatgtgaaatctgcttcaaggcaaaagacttctttaggcatagaactgcattgcaatgtttccaatatccttcatatgaatggctcccagagttccacatatagaggaacctatgaacaagatggtaggtttgaaaagagacaaggaaacccttcttggaaaaaacaacagaaatgtgatgaatgtggcaaaatctttagtcagagctcagcccttattttacatcagagaatccacagtggaaagaaaccttatgcatgtgacgagtgtgcaaaggcattcagccgaagcgcaattctgattcagcatcgacgaacccatactggtgagaagccctacaagtgtcatgactgtggcaaagcctttagtcagagctcaaatctttttagacataggaaaagacacattagaaaaaaagtcccataagtatcatgagggaatcaaagcatttactcagagctatttcagcacaagggaagacaccagatgcaaacgctccttagtacaaatcagtggtcttagtaagcaccagtctcctttcaagactcatgaaagccacaggagagaaggttgaagatctcaggaggcagataaataaaggccttatcttatgaaagcacacaagagcctccatactattaatatcaagttaatttcccgtgttggaaaaaaataatctcctttgcaatgtaatttggaaataagtcaatggaaacatgaaaatgactgcttgtctacaaggagtcagctaaacataaggaatgttttcataacaatattaatctatgggtgcttctgtaagatggatgatcatcttaatataaagaaaaaagggagatgaacaaaattgtcaaacaagactgatgtaccacaagtgttgtcaagtacagtgtgtgtcggagagatgtaccacagcttaattggaagaggaagcccgtaactgctgatgacaatactttcagtgtccccttttctggcataaatcaactatgaatatgtttcaagcatcacaagacaaccttttcagagtcttctgtattcttagtaagatgagtttctagacacgctgtcatgaaatgagaccctggattttgatgctcttgtacatatggacaaatcactgaagttcaatttaaagggtccactgcagtcccttataaacaattgttgaacctaaccattatagtttataagttttaagacatttatgggatatcttatttggcttatctatgggatatgagtaactatgttttacctgcatttaattcagccagattccctgtttaaaaataaaattactgaatcgtacattattaaaattattctgacagtatacaaacaacaaaattatctattttccagagattcttgataaaactctgtaatgttactacaataatacatgtattgtgttttccatggtgctacagttacacaatatggaggcaaacatcagaaatcaaagtccttggaataagggaagagactcatagtaaacttctttgtctggttgggttcctcataaagtataaaacatttcattctcagaaaatccaaccatatcttagagtatctccagaaactggcttagaggagctccaaatatgtggaattaccacactctgcttagttagtatgctgataaatgtaagattagtaggaggagaagtgaatgtaaattttattatagaattttctgatagtgattatgatttgtagctctagtgaatatgaattttatattgagttgtgtgtatcttgagtcactaaaaatgtaggatactttttatttggggctcattgtctttgtaattacggagaggaacaaaccatctattgaaacaacaagtgcctcagagatgtatatattgtgaattactgcttaattacggaaagagtttcttaggttctatgtgaataagatggcagaatctaaatcaagtattttgaaggaagcacccatcttcacttggtgctgccatcaactttgtaagattgcattctatttattgtgaataatttgagtgtttccacaggaaagtggtatgaatcatatcgtctaagtatatgatgaatctttaaagggtgtctctgtgtactttgaattattttgcagttatgtaggtatcctaatgagtgaatggtactagtttatataaaaggagaattcattgagctaaccttggttttaaaaattagcattagcacccccattatattaattttcagggatagtaaatactccaaaatgaaattggtattgttttctggctttcacttcatctgggccttcaagattaccaataatcctatatggtttgtttgtttttgtttgtttttgtttaccactcccattctcttcagagaccaagtcaaatgttcatcactgtccttacaacagtggcttaaaacagcaagcctttgtgttaggaatgcttctggatgcaaaatccatctttggtggtttaaacaaataggaattttcaacctgaaatctggaaggtgggttgctggctctcaatctgcagctggaatgacgactggtctaactttacctcatgctattttgtccgattttcgagagagctgtcacagctctaggaactaggattaagtcaggaagaaaggagaaagacagccatgctaagcaaaaagctttccaaaaaccttagcaaaatctggcttatgtttccctgttgcaactgtgtctgttagggcaagc

SEQ ID NO: 462528 - DNA, 2388 bp, Homo sapiens
tgagtcttttgtgggcagcatacagtatgctttttaagaaaccactgaggcattctatggatttttctttagaatgtggcaaagcctttaagtactcctgtacccttactacacataagataattcatactggagagaaatcccacaaatgtgaggagtgtggcaaagcctttaactggtcctcacagcttgctattcataagataactcatactggagagcaaccctacaaacgtaaagaatgcagcaaagcttttaaccatcccacaaccccttcttcacataagaaaactcatactggagagaaaccatgcaagtgtgataaatgtggcaaagcctttattttttcctcaacccttagtaaacatgagaagattcatactggagagaaaccctacaaatgtgaagaatgtggcaaagccttcagatggtcctcacacctaactacacataagataactcatactggagagaaaccctacaaatgtgaagaatgtggcaatggctttaagtattcctctacgcttactgaacataagataatccatactggagagaaatcctacaaatgtgaagagtgtggcaaagcctttaactggccctcacagcttgctattcataagataactcatactggagagcaaccctacaaatgtaaagaatgtggcaaagcttttaaacatcctgcaaccctttcttcacataacaaaactcatactggagagaaaccatacaagtgtgataaatgtggcaaagcctttatttcatcctcaacccttagtaaacatgagaagattcatactggagagaaaccctacaaatgtgaagaatatggcaaagctttcacccattcctcacaccttactaggcataagaaaattcatgctggagagaaaccatacaagtgtgataaatgtggcacagcctttattttatcctcaacccttagtgaacatgagaagattcatactggagagaaactctacaaatgtgaagaatgtggcaaagccttcaaccatttttcacaccttactatacataagacaattcatactggagagaaatgctataaatggagaactcatactggagagaaaccttacaaatgtgaagaatgtggcaaagcctttactgcatcctcaactctaagtgaatataagacaattcatactggagagaaaccttgcaaatgtgaagaatgtggcaaagcttttaactggtcctcagacttcaataaacataagagaattcatagtggacagaaaccaatactagacatggcaataattcatgctgaagaggaactctacaaacctgaaagatgtgacagtgctgttcccaacacctccaacgtttctatacataaaaaaattatactagtgtgaaactgtagaaaagtataaaatgtgacaaagcctttatttggttgccacacttgataaatataaaaataaaaaattgtttaaaattatttgtatatagctttaaaaggagatttttggaagcattgtaattacattaaaagtatacttgttttcttgaaaaaaagtttttcaaaagtgaataatgatgtcatacagctttcaaattactttatgctgttattttattcctattcacatgtgaaaacatatgagcaatttttgctgcatcagagataccagagattctttttttattgggcattatttataaccttttctataaaagtaaggacactaaaatgtaagatgcatgatgaaaagataagtggagaggctcattgtagttaacctatattaagtaatgtataagctaggtgttcagactattttctacattatggtggaattgttaattatagttaaaagtatattaaaataagtatattattaattgtacttttatgtaataaaatgcagtatatttaaaaatcattagattatgtgcaaacttaattttatttttttaacatgttaagactattgtgcatttaatgaagcattattccactaactttaacctatcccaccttactcaagggtgtaggtaaaagatggtagcaacatactatttggtacatagtgaaataacatctctagtaatcactttgcgagtggctttaaacagcaaatgaatttaagaatattgtttccataggttagatttttattcttttttcttattgaaatttattattggtatttgtgggtatatagtatgtgtatatatttatgccttatatggcatattttcattcaggcctacaatgtgtagtaattacattagggtaaataaggtatccatcacctctaacatttatactttttattacaaacagtgtaattatatactttaattattttaaaatgtacaattaaattgttattaactacattgttattttta

SEQ ID NO: 462529 - DNA, 783 bp, Homo sapiens
cctccactgggggttccctcctatgaccagaagccattcttcccacaggttttgtttctggaaggcaacccgctcttacttacagtatagggggaagaagttcaaggacagaaaaagccctcctaaatctacggacaagtatcctttctcgagtggaggccaaggtggtagacagcagcctctgaatgacaggcttggtgtccttgccagccaagtcacttctcaggcctgtttccagacttgtccttccaacagggacttgaagctgcccaggaattatttgcccgtcccagtgcccagaagacaaaccagatactttgaagctctttacactggaaaagcaatgcatggcttcagagtttataaggccttggggaagaaggtcctggtaccatcttccccagaaacgatcaagaagggcaatgggttgacagcccagatatggcaggaccagactgcaatgggaatctcatacagcccattcagactaaagggtgatggaaagaagcagaggaaagcagaaacagcaagagtgactgagacctgctgtcatctatatagaagcctttctgatacatgtcagagagtgacatgaagtctcccctctttatacacacgtatgaaaatacatctatccctcattttgagagcctccaactgatccaagtgtcatccggaggaggaggtggcccgtatgtgcaggacctcagggtgccagccctcacccatacacctccagggctgcaggtcattagccagaataaaggatgtccacattcacaa

SEQ ID NO: 462530 - DNA, 1433 bp, Homo sapiens
ctctggaagccgcctcgagtctccaggtgattctgatgatccctgggtcagttctggaatgcgagtgatcgcctctttgcaggtacaaaaatcacggcacagagtaagcaggtcacaggcttgcccagagtctacggctgcaggtgctcaagctaggcctggaaaccaggacctctgtgtcctgtgtccatgtggagtgttcctttgctcacccctcccccacctgtcctcaagggaggagcagtcattgcctaactcggggacagctgactctctcccccagggcacagtgtgctcttcttttcccgtgcaggctgttctcagacgcacaggtactggcccacaggacagagcttccagggtctttcaagttgcatatgtcatcattaaagctgccaatgcccctcgacctggaaactggattttggagcgttctctggatggcaccacgttcagcccctggcagtattatgcagtcagcgactcagagtgtttgtctcgttacaatataactccaagacgagggccacccacctacagggctgatgatgaagtgatctgcacctcctattattccagattggtgccacttgagcatggagagattcatacatcactcatcaatggcagaccaagcgctgacgatctttcacccaagttgttggaattcacttctgcacgatatattcgccttcgcttgcaacgcattagaacgctcaatgcagatctcatgacccttagccaccgggaacctaaagaactggatcctattgttaccagacgcgtgtctccttatgaggatgagccttgccgcccctgtaattgtgaccctgtggggtccctcagttctgtctgtattaaggatgacctccattctgacttacacaatgggaagcagccaggtcagtgcccatgtaaggaaggttatacaggagaaaaatgtgatcgctgccaacttggctataaggattacccgacctgtgtctcctgtgggtgcaacccagtgggcagtgccagtgatgagccctgcacagggccctgtgtttgtaaggaaaacgttgaggggaaggcctgtgatcgctgcaagccaggattctataacttgaaggaaaaaaacccccggggctgctccgagtgcttctgctttggcgtttctgatgtctgcagcagcctctcttggcctgttggtcaggtgggaggcgccatctgcgcggcgggatttaatgagcaggtcgtattgcacaagcttggcacgagctgtgtgaggaggaaatgaggatgacttcccgtgacaccactctcatcgctatgcaatgatactgacgtgggtcaaaggcagccgtctgcctctcaagattctttataggtcatgtgcttactcccacacacatttctctatggaaaaaacaggatgatgtggcactagagaacac

SEQ ID NO: 462531 - DNA, 844 bp, Homo sapiens
cctctatcaggggagccctgaggacccacgcttttgtctaaggggaaccccaaagactcgacctcttctgtgaagaaaggatccaccattttcagtgaggggaaccctggagaccagccctcttctaaatgaatagctgcaaacagagctcaagttgtcatccctgtgggagtgggattatgtctcctggaactctatggagaaaacctctcaaactcactggagcaaacagcacctgtagactcagcgcgggagcgcctcttccctctacagctccacagacatcactgcactcccagcagcacaggcaggagcctgcaccaggaaaagctcagggatgtgctggcccactcctctcctctgacccttgaggacccaggtctaggggggattaagaaatatgccataggaaaaataaatgcaagagctgaatggaactagaatctcttgacaaatcagctcagttcaatacatgtgggtgggatcctgctgttctgctgccctgcccctgtggctgcaacctcagaaggcaaatacccacagggaacagacgcgcccagaacagtgtgaggcaggggttcccctttgggacacatggcctccttccctctccatcccttcctcctggggtttcatggagccccgactgtgtgctgggccctgcggcagctaaggtcaccaggctccaggccctgctcttgcaagagatccagacaagctgcctgggaagtgaacagtgggaagccacacaccaggagaactggagcaggcaggcgtcacggtgcggtgtggggaggggtggacatctgtatgacaacaaaatcctccctctgttttgaatctc

SEQ ID NO: 462532 - DNA, 1166 bp, Homo sapiens
ccttgggcggtcgatgggactgggcgcctcggagcagagggcggcacctgtcagggaggctgggccccacgggagcccacagtgggaggggggctcaggcatggcaggctgcaggtcccaagccctgccccatggggaggcggctgaggcctgtttcctatcaaagctgcaacaaaaacaacagaaatttactaccgttctggagttggcagcacagctgaccctagcctccaccttcactgtcacgctgctctttggctccgaccctcctgccaccccttgtgaatattcagcctggggcctggaatgcaaaggccactggggccaaatcagctgcacggagctgagccagcagagccgcaggcagcagccgccctgtgagcagctgggaaccactgagaagtggagatgtttgtcatagcagcagcagctggcagatacttgctatccacacaccctgggcacacatgggcaccaaggctgggggcgacagaactttacactgtgggattctctcctgacagccaagaagggggttttcccttctaccatgaagaacttccccggaggtctccccacatctaataattaggaagataacgtggtcatcaacaataaaagctgcccaggcaggcgcctgcacaagcctcagatcagaaggtcattcaggcacagcaaatgggccggccctccccatggatgacagcttcttcagtgcctcagagccagtcaagcccccaggcccagaagacaatcgcaggagaccgtagctcctccctgtccccaaggcgctgccggccgggctgccttcagcagccacacagccaaacctgtctcctctcagttcctatttcagcctgagcctgaaactgccaccacacagccccctctgtggatggccccccacacacctcacaccccactacagacctcacaccccactatggcttcagcccctggggatcccctgtgccgctctcagggggctcctcctctctcttccctggctcagacacaggccttagagctggagccggccatgtgctagctgctggggctggcctggaggcccctgtgacaaggaccttaatcccccaggagggccagtgacgctcagccagagctgcccccatggctgtttccccactggcctgtgacccctgggg

SEQ ID NO: 462533 - DNA, 585 bp, Homo sapiens
gcaaggaattctgagggaaggactcataaacataatggcagtctacttctgtggaagaaggaaaaaagtgagagagaaaggcttagatggatggaggatggaggttaaagcaaatatcacagaaataacatgttcaatcttggtagtagggacatggaagtctatttttatttcttctattctgaatgcatatgaaccagtaagattaacattaataattctaactgatggaggaagaccagaaattgtaaaaggatgtggggtccaagatccagaagcaggtaattcctcaaatgacaaaatgaatttatctacatttctaataatgaaatcagcttcatcactggaatgggatcctggtagcagacttctcagtcatcttgcagcaatgtggaatttgtttagctaaagtgacttatgattcattcaacaaatatttacaaagccctaatccacttgcctggaaaatgcccttctctgaaagtcaacctggccccactggattcgaacagacattaacaaccttctgaaagaaaaattaaatgggaagttatcctcagagaagcgttactccctctcacatcc

SEQ ID NO: 462534 - DNA, 4705 bp, Homo sapiens
gcagctctgcgcatgtgcaggaggcgccggagtttcactttgtaacttttaagtggtcggaacacgccccgcgctgctgggtcccgccagacacgccgccgccgcaggaaagtctacagtttggtaccccaggactcgctggtcaggaaagccctgcaggacatgagtgttaggcccgacgcctggcccttggcagcttgggaggtggctggggctgcttttgcctttgccagagacagctccaactgaggacctctccaacgggcccatccacagtccttccttcccctagtgtctgggaagacaggcgcgatgatggactccccgttcctggagctgtggcagtccaaggcagtgtccatcagggagcagctgggactcggggaccggcccaacgactcctattgctacaactcggccaaaaacagcaccgtgctccagggggtcacctttggtggcatccccactgtcctgctcatagacgtcagctgcttcctgttcttaatcttggtgttttctattataagaagaagattctgggactatggccgcattgccctggtgtcagaagcagacagcgagtccagatttcagagattgtcatcgacttcctcctcaggtcaacaagactttgaaaatgagctgggatgctgtccctggctgactgccatcttccgtctgcatgatgaccagatcctggaatggtgtggggaggacgccatccactacctgtccttccagaggcacatcatcttcctgttggtggtggtcagctttttgtccctgtgtgtcatcctgcctgtcaacctctcaggggacttgctgggtaatgaccctcctcacccttgtctatgttgtaatggggcagagtggcagtcctagggaaagggctcactgtggtagaccagaaccccaggagtcatgccccacttcagatgtaagatggtctcagggtgactctgaacatttctatctgattaaagatctggagcaaacctaggctaaaactggggccccaatatcaatgtctggttctatttaaatagggaaaaaagccccccaagatttacagaatcaggggctatcagagagtcttttatactttcctgccctcacccaaattaggaggtcacaattaatggacccagaagatatccatgatacttaattaaaatcagggtgtggcattatatctaagggcaactgcaagaatccaccttccaaaatgccaccatgaatccacttaggatacccagtggttcccaacgttggttttgtaacaacataggatgtttttagttttctcaaaacaaaatgaattcacattatgcctttacctgcaatggaaggttgagaagttatcagggagcattttggtttcaagcagaggccttgatggtgtagctctggaaagaccagtcagacgttgtcttcctgctggtccagacatgctcctcctccccagagctccacaaaccaaggctgattggttacgccccctcctgcttccccacatgaccctggaactaagtatctgtgcttctctgcagacaaagacccgtatagttttgggaggacaacaatagcaaacctacagactgagtgagtatggagcccgtggggataggtgctgatgggtgagatcaaggagaaggcaggtcaggagcccggggcaggccagaggtactccaaagggggccggctggtatctgaaggccccttgcagctagtgagttgttgagctgtgggcatgaacacgccacaggcagacactgttttgccagggttttaagaaacacggagggtcctgtggatctggagttcatttgtcaggacagggatggggacccctctgaagtattcactgtgggctgaggggtgctggccacacaacctctgtgggaggcatctcttgcagtgaagctgttggtcctcagttcagtgcccactgagggtaaccaggccccagctctgcacccccagctccctgcctgggatcccagccctgatggcaggtggtttccctctcagcaatgacctcctttggctgcacaccatctttgctgtcatttacctcttcctcactgtgggtttcatgcggcaccacactcagtccattaagtacaaagaggagaacctgcttcacaggggaggggagcttctgtggcttggttccaggcctgggtcctcctctgatctgctgtgtgaccgcatttgagtcacttcccctctttctcagtctcctgccatgcaaagaaggctcatagagttgctttggaagtggattctttgtacagcctggaagaagacgctgtgtaaatgacatgctttgggggctcccccggccacagaaggagaaaactggagccttctgatttcctgttgtttactttccagaggctggagttgggtaggaaacctgagcataccggcacactggcttgtgggtgacttctctccctgctgtatttcccggacaggtgaggcggaccctgttcatcacaggactccccagagatgccaggaaggagactgtggagagccacttccgggacgcgtatcccacgtgtgaggtggttgatgtgcagctgtgctacaacgtggccaaactgatctacctgtgcaaggagaaaaagaagactgagaagagcctgacctattacacaaacctgcaggtgaagacaggccagcggaccctcatcaaccccaagccctgtggccagttttgctgctgtgaagtgctgggctgtgagtgggaagacgccatctcttactacacacggatgaaggacaggctgctggagaggatcacagaggaagaacgccacgtccaggaccagcccctgggaatggccttcgtcaccttccaggagaagtccatggccacctacatcctgaaagatttcaatgcctgcaagtgtcagagccttcagtgcaaaggtgagccccagccgtcctcccatagcagggagctctatacctccaagtggacagtcacctttgctgctgaccctgaggacatctgctggaagaacctctctatccagggcctccgctggtggctacagtggctgggcatcaacttcaccctcttcctggggctatttttcctgaccacaccctccatcatcctgtccaccatggacaagtttaatgtcaccaaacccatccatgcgctgaataacccgatcatcagccagttcttccccaccctcctgctctggtccttctcggccctgctcccctccattgtctactactctacactgctggagtctcactggaccaagtcgggggaaaaccagatcatgatgaccaaagtctacatattcttgatcttcatggtgctgatcctgccctccctgggtctcaccagtctagattttttcttccggtggctctttgacaaaacttcctcggaggcctccatcaggttggagtgcgtcttcctgcctgaccagggtgccttctttgtgaactatgtcatcgcctcggccttcatcggcaatggcatggagctgctgcggctgccaggtctcatcctctataccttccgcatgatcatggccaagacggctgctgaccgcaggaatgtcaagcagaaccaggccttccagtacgagtttggagccatgtatgcatggatgctgtgtgtcttcactgtcatcgtggcctacagcatcacttgtcccatcatcgcgccatttggcctcatctacatcctgctcaagcacatggtggaccggcacaacctctacttcgtctacctcccagccaagctggagaaggggatccactttgccgctgtgaaccaggccttggcagcccccatcctgtgcctcttctggctctacttcttttccttcctgcgcctgggtatgaaggcccccgccactctgttcaccttcctggtgctgctgctcaccatcctggtctgcctggctcacacctgctttggatgcttcaagcacctcagccctctgaactacaaaacagaagagcctgcaagtgacaaaggaagtgaggcagaggcccacatgcccccaccgttcacaatcacatggcaggcaagtttgtgaattaatggcagagaaggaatcctggtccccctgggtattttaacctgcatatttgaaactgttgaggagatagagtcttgtctcgattcatggccatcccccttggtttcagttccctgctctctttccttctctgcatatttaatgcctgccctacgtgcctcggattctgaacggcttggcctcggagaggacagcactgtctccgcagcagcagcagcagcagacctatggtgccatccacaacatcagcgggactatccctggacagtgcttgagcgcacacgggcagtgtggctgctgccccccaggaggcctgaggctgggtctcactgctctgaaaagacacaaccagaatggcctgggctcaggcccttggctgagtgggaatgcgttgggactgcccagctgagctatcaggtgcccatcttttctggtcccagcagtggtgaggagagcacaggcagcctcgcccctcccttgctcacccagtttccctccggcacaagcttccagctctgcagctggggtgacatccccagtggtttgtcgccaagaccatgtggtggacttttcgccccccaaactgatgagtccgggagaatatatggagagagagatgtaac

SEQ ID NO: 462535 - DNA, 4461 bp, Homo sapiens
agatggtacacgtccaaaaaaaaaagaaaaaaggctgggacagtgggattacaggtgtgagccactgcgcccagccctaactttattctgaatgtgatttcttagaagcaggacagggctgtgagatgactgtatttacgtacctttcccacacacgtaacttgggcacaaatgtttctagcaacatcagatggagtgctggtattcctttacctcgagtatggtacaggggctaagacgggctctggaatttatatcatgtgagatcctgaaagttatgcaaatttcctgtgcctttatttcctcatatgtgaacaaaaatgtggggatagcgatcgaaccatctcataagagtgtggtgaggatgatatgagacacttcatgcagagccccgaggcctgttccactgctcattaagattcctctgtgtcttggccagtgatgaccagatcctggaatggtgtggggaggacgccatccactacctgtccttccagaggcacatcatcttcctgttggtggtggtcagctttttgtccctgtgtgtcatcctgcctgtcaacctctcaggggacttgctgggtaatgaccctcctcacccttgtctatgttgtaatggggcagagtggcagtcctagggaaagggctcactgtggtagaccagaaccccaggagtcatgccccacttcagatgtaagatggtctcagggtgactctgaacatttctatctgattaaagatctggagcaaacctaggctaaaactggggccccaatatcaatgtctggttctatttaaatagggaaaaaagccccccaagatttacagaatcaggggctatcagagagtcttttatactttcctgccctcacccaaattaggaggtcacaattaatggacccagaagatatccatgatacttaattaaaatcagggtgtggcattatatctaagggcaactgcaagaatccaccttccaaaatgccaccatgaatccacttaggatacccagtggttcccaacgttggttttgtaacaacataggatgtttttagttttctcaaaacaaaatgaattcacattatgcctttacctgcaatggaaggttgagaagttatcagggagcattttggtttcaagcagaggccttgatggtgtagctctggaaagaccagtcagacgttgtcttcctgctggtccagacatgctcctcctccccagagctccacaaaccaaggctgattggttacgccccctcctgcttccccacatgaccctggaactaagtatctgtgcttctctgcagacaaagacccgtatagttttgggaggacaacaatagcaaacctacagactgagtgagtatggagcccgtggggataggtgctgatgggtgagatcaaggagaaggcaggtcaggagcccggggcaggccagaggtactccaaagggggccggctggtatctgaaggccccttgcagctagtgagttgttgagctgtgggcatgaacacgccacaggcagacactgttttgccagggttttaagaaacacggagggtcctgtggatctggagttcatttgtcaggacagggatggggacccctctgaagtattcactgtgggctgaggggtgctggccacacaacctctgtgggaggcatctcttgcagtgaagctgttggtcctcagttcagtgcccactgagggtaaccaggccccagctctgcacccccagctccctgcctgggatcccagccctgatggcaggtggtttccctctcagcaatgacctcctttggctgcacaccatctttgctgtcatttacctcttcctcactgtgggtttcatgcggcaccacactcagtccattaagtacaaagaggagaacctgcttcacaggggaggggagcttctgtggcttggttccaggcctgggtcctcctctgatctgctgtgtgaccgcatttgagtcacttcccctctttctcagtctcctgccatgcaaagaaggctcatagagttgctttggaagtggattctttgtacagcctggaagaagacgctgtgtaaatgacatgctttgggggctcccccggccacagaaggagaaaactggagccttctgatttcctgttgtttactttccagaggctggagttgggtaggaaacctgagcataccggcacactggcttgtgggtgacttctctccctgctgtatttcccggacaggtgaggcggaccctgttcatcacaggactccccagagatgccaggaaggagactgtggagagccacttccgggacgcgtatcccacgtgtgaggtggttgatgtgcagctgtgctacaacgtggccaaactgatctacctgtgcaaggagaaaaagaagactgagaagagcctgacctattacacaaacctgcaggtgaagacaggccagcggaccctcatcaaccccaagccctgtggccagttttgctgctgtgaagtgctgggctgtgagtgggaagacgccatctcttactacacacggatgaaggacaggctgctggagaggatcacagaggaagaacgccacgtccaggaccagcccctgggaatggccttcgtcaccttccaggagaagtccatggccacctacatcctgaaagatttcaatgcctgcaagtgtcagagccttcagtgcaaaggtgagccccagccgtcctcccatagcagggagctctatacctccaagtggacagtcacctttgctgctgaccctgaggacatctgctggaagaacctctctatccagggcctccgctggtggctacagtggctgggcatcaacttcaccctcttcctggggctatttttcctgaccacaccctccatcatcctgtccaccatggacaagtttaatgtcaccaaacccatccatgcgctgaataacccgatcatcagccagttcttccccaccctcctgctctggtccttctcggccctgctcccctccattgtctactactctacactgctggagtctcactggaccaagtcgggggaaaaccagatcatgatgaccaaagtctacatattcttgatcttcatggtgctgatcctgccctccctgggtctcaccagtctagattttttcttccggtggctctttgacaaaacttcctcggaggcctccatcaggttggagtgcgtcttcctgcctgaccagggtgccttctttgtgaactatgtcatcgcctcggccttcatcggcaatggcatggagctgctgcggctgccaggtctcatcctctataccttccgcatgatcatggccaagacggctgctgaccgcaggaatgtcaagcagaaccaggccttccagtacgagtttggagccatgtatgcatggatgctgtgtgtcttcactgtcatcgtggcctacagcatcacttgtcccatcatcgcgccatttggcctcatctacatcctgctcaagcacatggtggaccggcacaacctctacttcgtctacctcccagccaagctggagaaggggatccactttgccgctgtgaaccaggccttggcagcccccatcctgtgcctcttctggctctacttcttttccttcctgcgcctgggtatgaaggcccccgccactctgttcaccttcctggtgctgctgctcaccatcctggtctgcctggctcacacctgctttggatgcttcaagcacctcagccctctgaactacaaaacagaagagcctgcaagtgacaaaggaagtgaggcagaggcccacatgcccccaccgttcacaatcacatggcaggcaagtttgtgaattaatggcagagaaggaatcctggtccccctgggtattttaacctgcatatttgaaactgttgaggagatagagtcttgtctcgattcatggccatcccccttggtttcagttccctgctctctttccttctctgcatatttaatgcctgccctacgtgcctcggattctgaacggcttggcctcggagaggacagcactgtctccgcagcagcagcagcagcagacctatggtgccatccacaacatcagcgggactatccctggacagtgcttgagcgcacacgggcagtgtggctgctgccccccaggaggcctgaggctgggtctcactgctctgaaaagacacaaccagaatggcctgggctcaggcccttggctgagtgggaatgcgttgggactgcccagctgagctatcaggtgcccatcttttctggtcccagcagtggtgaggagagcacaggcagcctcgcccctcccttgctcacccagtttccctccggcacaagcttccagctctgcagctggggtgacatccccagtggtttgtcgccaagaccatgtggtggacttttcgccccccaaactgatgagtccgggagaatatatggagagagagatgtaac

SEQ ID NO: 462536 - DNA, 3402 bp, Homo sapiens
cacaggagggatggcagctggatgacccgggaccttgagactggatgaatttgcaggcaggaagggggatgctgtccctggctgactgccatcttccgtctgcatgatgaccagatcctggaatggtgtggggaggacgccatccactacctgtccttccagaggcacatcatcttcctgttggtggtggtcagctttttgtccctgtgtgtcatcctgcctgtcaacctctcaggggacttgctggacaaagacccgtatagttttgggaggacaacaatagcaaacctacagactgagtgagtatggagcccgtggggataggtgctgatgggtgagatcaaggagaaggcaggtcaggagcccggggcaggccagaggtactccaaagggggccggctggtatctgaaggccccttgcagctagtgagttgttgagctgtgggcatgaacacgccacaggcagacactgttttgccagggttttaagaaacacggagggtcctgtggatctggagttcatttgtcaggacagggatggggacccctctgaagtattcactgtgggctgaggggtgctggccacacaacctctgtgggaggcatctcttgcagtgaagctgttggtcctcagttcagtgcccactgagggtaaccaggccccagctctgcacccccagctccctgcctgggatcccagccctgatggcaggtggtttccctctcagcaatgacctcctttggctgcacaccatctttgctgtcatttacctcttcctcactgtgggtttcatgcggcaccacactcagtccattaagtacaaagaggagaacctgcttcacaggggaggggagcttctgtggcttggttccaggcctgggtcctcctctgatctgctgtgtgaccgcatttgagtcacttcccctctttctcagtctcctgccatgcaaagaaggctcatagagttgctttggaagtggattctttgtacagcctggaagaagacgctgtgtaaatgacatgctttgggggctcccccggccacagaaggagaaaactggagccttctgatttcctgttgtttactttccagaggctggagttgggtaggaaacctgagcataccggcacactggcttgtgggtgacttctctccctgctgtatttcccggacaggtgaggcggaccctgttcatcacaggactccccagagatgccaggaaggagactgtggagagccacttccgggacgcgtatcccacgtgtgaggtggttgatgtgcagctgtgctacaacgtggccaaactgatctacctgtgcaaggagaaaaagaagactgagaagagcctgacctattacacaaacctgcaggtgaagacaggccagcggaccctcatcaaccccaagccctgtggccagttttgctgctgtgaagtgctgggctgtgagtgggaagacgccatctcttactacacacggatgaaggacaggctgctggagaggatcacagaggaagaacgccacgtccaggaccagcccctgggaatggccttcgtcaccttccaggagaagtccatggccacctacatcctgaaagatttcaatgcctgcaagtgtcagagccttcagtgcaaaggtgagccccagccgtcctcccatagcagggagctctatacctccaagtggacagtcacctttgctgctgaccctgaggacatctgctggaagaacctctctatccagggcctccgctggtggctacagtggctgggcatcaacttcaccctcttcctggggctatttttcctgaccacaccctccatcatcctgtccaccatggacaagtttaatgtcaccaaacccatccatgcgctgaataacccgatcatcagccagttcttccccaccctcctgctctggtccttctcggccctgctcccctccattgtctactactctacactgctggagtctcactggaccaagtcgggggaaaaccagatcatgatgaccaaagtctacatattcttgatcttcatggtgctgatcctgccctccctgggtctcaccagtctagattttttcttccggtggctctttgacaaaacttcctcggaggcctccatcaggttggagtgcgtcttcctgcctgaccagggtgccttctttgtgaactatgtcatcgcctcggccttcatcggcaatggcatggagctgctgcggctgccaggtctcatcctctataccttccgcatgatcatggccaagacggctgctgaccgcaggaatgtcaagcagaaccaggccttccagtacgagtttggagccatgtatgcatggatgctgtgtgtcttcactgtcatcgtggcctacagcatcacttgtcccatcatcgcgccatttggcctcatctacatcctgctcaagcacatggtggaccggcacaacctctacttcgtctacctcccagccaagctggagaaggggatccactttgccgctgtgaaccaggccttggcagcccccatcctgtgcctcttctggctctacttcttttccttcctgcgcctgggtatgaaggcccccgccactctgttcaccttcctggtgctgctgctcaccatcctggtctgcctggctcacacctgctttggatgcttcaagcacctcagccctctgaactacaaaacagaagagcctgcaagtgacaaaggaagtgaggcagaggcccacatgcccccaccgttcacaatcacatggcaggcaagtttgtgaattaatggcagagaaggaatcctggtccccctgggtattttaacctgcatatttgaaactgttgaggagatagagtcttgtctcgattcatggccatcccccttggtttcagttccctgctctctttccttctctgcatatttaatgcctgccctacgtgcctcggattctgaacggcttggcctcggagaggacagcactgtctccgcagcagcagcagcagcagacctatggtgccatccacaacatcagcgggactatccctggacagtgcttgagcgcacacgggcagtgtggctgctgccccccaggaggcctgaggctgggtctcactgctctgaaaagacacaaccagaatggcctgggctcaggcccttggctgagtgggaatgcgttgggactgcccagctgagctatcaggtgcccatcttttctggtcccagcagtggtgaggagagcacaggcagcctcgcccctcccttgctcacccagtttccctccggcacaagcttccagctctgcagctggggtgacatccccagtggtttgtcgccaagaccatgtggtggacttttcgccccccaaactgatgagtccgggagaatatatggagagagagatgtaac

SEQ ID NO: 462537 - DNA, 4493 bp, Homo sapiens
tgcctttggctctgccagcactggtgggaacctgcaagaaatttgagccctgaacgtctgccttgtcctgttgtcctgtgctccagggaagacaggcgcgatgatggactccccgttcctggagctgtggcagtccaaggcagtgtccatcagggagcagctgggactcggggaccggcccaacgactcctattgctacaactcggccaaaaacagcaccgtgctccagggggtcacctttggtggcatccccactgtcctgctcatagacgtcagctgcttcctgttcttaatcttggtgttttctattataagaagaagattctgggactatggccgcattgccctggtgtcagaagcagacagcgagtccagatttcagagattgtcatcgacttcctcctcaggtcaacaagactttgaaaatgagctgggatgctgtccctggctgactgccatcttccgtctgcatgatgaccagatcctggaatggtgtggggaggacgccatccactacctgtccttccagaggcacatcatcttcctgttggtggtggtcagctttttgtccctgtgtgtcatcctgcctgtcaacctctcaggggacttgctgggtaatgaccctcctcacccttgtctatgttgtaatggggcagagtggcagtcctagggaaagggctcactgtggtagaccagaaccccaggagtcatgccccacttcagatgtaagatggtctcagggtgactctgaacatttctatctgattaaagatctggagcaaacctaggctaaaactggggccccaatatcaatgtctggttctatttaaatagggaaaaaagccccccaagatttacagaatcaggggctatcagagagtcttttatactttcctgccctcacccaaattaggaggtcacaattaatggacccagaagatatccatgatacttaattaaaatcagggtgtggcattatatctaagggcaactgcaagaatccaccttccaaaatgccaccatgaatccacttaggatacccagtggttcccaacgttggttttgtaacaacataggatgtttttagttttctcaaaacaaaatgaattcacattatgcctttacctgcaatggaaggttgagaagttatcagggagcattttggtttcaagcagaggccttgatggtgtagctctggaaagaccagtcagacgttgtcttcctgctggtccagacatgctcctcctccccagagctccacaaaccaaggctgattggttacgccccctcctgcttccccacatgaccctggaactaagtatctgtgcttctctgcagacaaagacccgtatagttttgggaggacaacaatagcaaacctacagactgagtgagtatggagcccgtggggataggtgctgatgggtgagatcaaggagaaggcaggtcaggagcccggggcaggccagaggtactccaaagggggccggctggtatctgaaggccccttgcagctagtgagttgttgagctgtgggcatgaacacgccacaggcagacactgttttgccagggttttaagaaacacggagggtcctgtggatctggagttcatttgtcaggacagggatggggacccctctgaagtattcactgtgggctgaggggtgctggccacacaacctctgtgggaggcatctcttgcagtgaagctgttggtcctcagttcagtgcccactgagggtaaccaggccccagctctgcacccccagctccctgcctgggatcccagccctgatggcaggtggtttccctctcagcaatgacctcctttggctgcacaccatctttgctgtcatttacctcttcctcactgtgggtttcatgcggcaccacactcagtccattaagtacaaagaggagaacctgcttcacaggggaggggagcttctgtggcttggttccaggcctgggtcctcctctgatctgctgtgtgaccgcatttgagtcacttcccctctttctcagtctcctgccatgcaaagaaggctcatagagttgctttggaagtggattctttgtacagcctggaagaagacgctgtgtaaatgacatgctttgggggctcccccggccacagaaggagaaaactggagccttctgatttcctgttgtttactttccagaggctggagttgggtaggaaacctgagcataccggcacactggcttgtgggtgacttctctccctgctgtatttcccggacaggtgaggcggaccctgttcatcacaggactccccagagatgccaggaaggagactgtggagagccacttccgggacgcgtatcccacgtgtgaggtggttgatgtgcagctgtgctacaacgtggccaaactgatctacctgtgcaaggagaaaaagaagactgagaagagcctgacctattacacaaacctgcaggtgaagacaggccagcggaccctcatcaaccccaagccctgtggccagttttgctgctgtgaagtgctgggctgtgagtgggaagacgccatctcttactacacacggatgaaggacaggctgctggagaggatcacagaggaagaacgccacgtccaggaccagcccctgggaatggccttcgtcaccttccaggagaagtccatggccacctacatcctgaaagatttcaatgcctgcaagtgtcagagccttcagtgcaaaggtgagccccagccgtcctcccatagcagggagctctatacctccaagtggacagtcacctttgctgctgaccctgaggacatctgctggaagaacctctctatccagggcctccgctggtggctacagtggctgggcatcaacttcaccctcttcctggggctatttttcctgaccacaccctccatcatcctgtccaccatggacaagtttaatgtcaccaaacccatccatgcgctgaataacccgatcatcagccagttcttccccaccctcctgctctggtccttctcggccctgctcccctccattgtctactactctacactgctggagtctcactggaccaagtcgggggaaaaccagatcatgatgaccaaagtctacatattcttgatcttcatggtgctgatcctgccctccctgggtctcaccagtctagattttttcttccggtggctctttgacaaaacttcctcggaggcctccatcaggttggagtgcgtcttcctgcctgaccagggtgccttctttgtgaactatgtcatcgcctcggccttcatcggcaatggcatggagctgctgcggctgccaggtctcatcctctataccttccgcatgatcatggccaagacggctgctgaccgcaggaatgtcaagcagaaccaggccttccagtacgagtttggagccatgtatgcatggatgctgtgtgtcttcactgtcatcgtggcctacagcatcacttgtcccatcatcgcgccatttggcctcatctacatcctgctcaagcacatggtggaccggcacaacctctacttcgtctacctcccagccaagctggagaaggggatccactttgccgctgtgaaccaggccttggcagcccccatcctgtgcctcttctggctctacttcttttccttcctgcgcctgggtatgaaggcccccgccactctgttcaccttcctggtgctgctgctcaccatcctggtctgcctggctcacacctgctttggatgcttcaagcacctcagccctctgaactacaaaacagaagagcctgcaagtgacaaaggaagtgaggcagaggcccacatgcccccaccgttcacaatcacatggcaggcaagtttgtgaattaatggcagagaaggaatcctggtccccctgggtattttaacctgcatatttgaaactgttgaggagatagagtcttgtctcgattcatggccatcccccttggtttcagttccctgctctctttccttctctgcatatttaatgcctgccctacgtgcctcggattctgaacggcttggcctcggagaggacagcactgtctccgcagcagcagcagcagcagacctatggtgccatccacaacatcagcgggactatccctggacagtgcttgagcgcacacgggcagtgtggctgctgccccccaggaggcctgaggctgggtctcactgctctgaaaagacacaaccagaatggcctgggctcaggcccttggctgagtgggaatgcgttgggactgcccagctgagctatcaggtgcccatcttttctggtcccagcagtggtgaggagagcacaggcagcctcgcccctcccttgctcacccagtttccctccggcacaagcttccagctctgcagctggggtgacatccccagtggtttgtcgccaagaccatgtggtggacttttcgccccccaaactgatgagtccgggagaatatatggagagagagatgtaac

SEQ ID NO: 462538 - DNA, 677 bp, Homo sapiens
gcagctctgcgcatgtgcaggaggcgccggagtttcactttgtaacttttaagtggtcggaacacgccccgcgctgctgggtcccgccagacacgccgccgccgcaggaaagtctacagtttggtaccccaggactcgctggtcaggaaagccctgcaggacatgagtgttaggcccgacgcctggcccttggcagcttgggaggtggctggggctgcttttgcctttgccagagacagctccaactgaggacctctccaacgggcccatccacagtccttccttcccctagtgtctgggaagacaggcgcgatgatggactccccgttcctggagctgtggcagtccaaggcagtgtccatcagggagcagctgggactcggggaccggcccaacgactcctattgctacaactcggccaaaaacagcaccgtgctccagggggtcacctttggtggcatccccactgtcctgctcatagacgtcagctgcttcctgttcttaatcttggtgttttctattataagaagaagattctgggactatggccgcattgccctggtgtcagaagcagacagcgagtccagatttcagagattgtcatcgacttcctcctcaggtcaacaagactttgaaaatgagctggttggtatctaaggcccagttgtggtcatggc

SEQ ID NO: 462539 - DNA, 673 bp, Homo sapiens
tccagttatttgtggtaactctcttcttcccaatgatggagtagagcataaaggaggggagaaatggggcaagaaatgactgactgtcactacaagatatgtctttggtgttttttttggctttgttctgttttgttttggggggggacatggtctctctctgccgcctaggctggagagcagtggcatgatctcggctcactgcagcttctacttcctggcctcaagcagtctttccacctcagcctctcaacgcactggaattacagatgtgagccaccacactaggcctacaagtggtccttacaccagattaatttatcttgaaatggcgggcaactgaatcgcacacctcaatctatgatttgacttttaaagaattaattatattgactgagagagaggcccaggagagaaagaagaaagaaaaggagccagggatggctcttcctcagggatctttgacattcagggatgtggctgtagaattctctcaggaggagtggaaatgcctggaccctgttcagaaagctttgtacagggacgtgatgttggagaactacaggaacctcggcttcctgggtgaggatagttttcctccagaagttaggatcttcccttgtgcatttttgtactttccttattgtgtttcttgtgaggccctacattattt

SEQ ID NO: 462540 - DNA, 2996 bp, Homo sapiens
gcttgagccagtatgcttggcctatccctgtgtttttgattcagtatttcttgggagagagctagatatcttcatcttacagtgttcactaagcattcagaaggaggcaatcaatggatgagtttgtgaaatattttgtagattcaactgcagtgttttctcttctacctagacattaggctgggttctggaaaaaccgtgggacatcttctttctttttttataagcaggactctgtcttcctgacctgaatattatctccatgttggagcaagggaaagagccctggactgtggtgagccaagtgaaaatagcgaggaacccaaactgtggggaatgcatgaaaggcgtgatcaccggtatctctcctaaatgtgtgatcaaggaattaccaccaatacagaacagtaacacaggagaaaaattccaagcagtgatgttggaaggacatgaaagctatgacactgaaaatttttacttcagggaaatccggaaaaatctacaggaagttgactttcaatggaaagatggtgaaataaattataaagaagggccgatgacccataaaaacaatcttactggtcaaagagttcgacatagtcaaggggacgtagaaaacaagcatatggaaaatcagcttatattaaggtttcagtccggtctgggtgaattgcagaaatttcaaactgcagagaaaatttatggatgtaatcaaattgagaggacagttaataattgttttttagcttcaccacttcaaagaatttttcctggtgtccaaaccaacatttctaggaaatatgggaatgattttttgcaactttcgtgacctacacaagacgagaaaacacatattagggaaaaaccttacataggtaatgagtgtggcaaagccttcagagtgtcttcaagtcttattaatcatcagatgatacatactacagagaaaccttacagatgcaatgagtctggtaaagcctttcatcggggctcactactaacagtacatcagatagtccatacaagagggaaaccataccaatgtgatgtatgtggcaggatcttcagacaaaattcagatcttgtaaatcaccggagaagtcacactggagacaaaccctaataatgtaatgaatgtggcaagtcctttagtaaaagttcccaccttgcagttcatcagagaattcatactggagagaaaccttacaaatgtaatcgatgtgggaagtgctttagtcaaagttcctctcttgcaactcatcagacagttcatactggagacaaaccctacaaatgtaatgaatgtggcaaaacctttaaacggaactcaagcctcactgcacatcatataatccatgcaggaaagaaaccatatacatgtgatgtatgtggcaaggtcttttatcagaattcacaacttgtaaggcaccagataattcatactggagagacaccttacaaatgtaatgaatgtggcaaggtcttctttcaacgttcacgtcttgcagggcaccggagaattcatactggagagaaaccctacaaatgtaatgaatgtggcaaggtcttcagtcaacattcacatcttgcagtgcatcagagagttcatactggagagaaaccttacaaatgtaatgaatgtggcaaagcctttaattggggctcattactaactgtacatcagagaattcataccggagagaaaccttacaaatgtaatgtgtgtggcaaggtctttaattacggtggatacctttcggttcatatgagatgtcatactggagagaaacctctccattgtaataaatgtggcatggtcttcacttactattcatgcctagcacgtcatcaaagaatgcataccggagagaaaccttacaaatgtaatgtgtgtggcaaggtcttcattgacagtggaaacctttcaattcataggcgaagtcataccggagagaaacctttccagtgtaacgaatgcggcaaggtcttcagttactactcatgcctagcacgtcatcggaaaattcataccggagagaaaccttataaatgtaatgattgtggcaaagcctatactcagcgttcaagcctcactaaacatctggtaattcatactggagagaacccttaccactgtaatgaatttggtgaggcttttatccaaagttcaaaacttgcaagatatcacagaaatcctactggggagaaaccacacaaatgtagtgaatgtggtagaacttttagtcataaaacaagtctggtgtaccatcagagaagacatactggagagatgccatacaaatgtattgaatgtgggaaagtctttaactccactacaaccctggcaaggcatcggagaattcatactggagagaaaccttacaaatgtaatgaatgtggcaaggtcttccgttatcgctcaggcctcgcacgtcattggagtattcatactggagagaaaccttacaaatgtaatgagtgtggcaaagcctttagagtacgttcaattctgcttaatcatcagatgatgcatactggagagaaaccttataaatgtaatgaatgtggtaaagcttttatcgaaaggtcaaacttggtttaccatcagagaaaccatactggagagaagccatacaaatgtatggaatgtggcaaggcgtttgggcggcggtcttgcctcactaaacaccaacgaattcattctagtgaaaaaccttataaatgtaatgagtgtggcaaatcttacattagtcgctcaggcctcactaaacatcagataaaacatgctggagagaaccttacaactaaactcaatgtggaaaggccgttagatgttgtgggacgagagaccaggaaaagaaataagagacagagacaaagtatagagaaagaaaagggggccccagggactggcgctctgcatatggaggacctgcgcagctggccctggtctctgagttccctcagtatttattgatcattatctctaccatctc

SEQ ID NO: 462541 - DNA, 3348 bp, Homo sapiens
tccagttatttgtggtaactctcttcttcccaatgatggagtagagcataaaggaggggagaaatggggcaagaaatgactgactgtcactacaagatatgtctttggtgttttttttggctttgttctgttttgttttggggggggacatggtctctctctgccgcctaggctggagagcagtggcatgatctcggctcactgcagcttctacttcctggcctcaagcagtctttccacctcagcctctcaacgcactggaattacagatgtgagccaccacactaggcctacaagtggtccttacaccagattaatttatcttgaaatggcgggcaactgaatcgcacacctcaatctatgatttgacttttaaagaattaattatattgactgagagagaggcccaggagagaaagaagaaagaaaaggagccagggatggctcttcctcagggatctttgacattcagggatgtggctgtagaattctctcaggaggagtggaaatgcctggaccctgttcagaaagctttgtacagggacgtgatgttggagaactacaggaacctcggcttcctgggactctgtcttcctgacctgaatattatctccatgttggagcaagggaaagagccctggactgtggtgagccaagtgaaaatagcgaggaacccaaactgtggggaatgcatgaaaggcgtgatcaccggtatctctcctaaatgtgtgatcaaggaattaccaccaatacagaacagtaacacaggagaaaaattccaagcagtgatgttggaaggacatgaaagctatgacactgaaaatttttacttcagggaaatccggaaaaatctacaggaagttgactttcaatggaaagatggtgaaataaattataaagaagggccgatgacccataaaaacaatcttactggtcaaagagttcgacatagtcaaggggacgtagaaaacaagcatatggaaaatcagcttatattaaggtttcagtccggtctgggtgaattgcagaaatttcaaactgcagagaaaatttatggatgtaatcaaattgagaggacagttaataattgttttttagcttcaccacttcaaagaatttttcctggtgtccaaaccaacatttctaggaaatatgggaatgattttttgcaactttcgtgacctacacaagacgagaaaacacatattagggaaaaaccttacataggtaatgagtgtggcaaagccttcagagtgtcttcaagtcttattaatcatcagatgatacatactacagagaaaccttacagatgcaatgagtctggtaaagcctttcatcggggctcactactaacagtacatcagatagtccatacaagagggaaaccataccaatgtgatgtatgtggcaggatcttcagacaaaattcagatcttgtaaatcaccggagaagtcacactggagacaaaccctaataatgtaatgaatgtggcaagtcctttagtaaaagttcccaccttgcagttcatcagagaattcatactggagagaaaccttacaaatgtaatcgatgtgggaagtgctttagtcaaagttcctctcttgcaactcatcagacagttcatactggagacaaaccctacaaatgtaatgaatgtggcaaaacctttaaacggaactcaagcctcactgcacatcatataatccatgcaggaaagaaaccatatacatgtgatgtatgtggcaaggtcttttatcagaattcacaacttgtaaggcaccagataattcatactggagagacaccttacaaatgtaatgaatgtggcaaggtcttctttcaacgttcacgtcttgcagggcaccggagaattcatactggagagaaaccctacaaatgtaatgaatgtggcaaggtcttcagtcaacattcacatcttgcagtgcatcagagagttcatactggagagaaaccttacaaatgtaatgaatgtggcaaagcctttaattggggctcattactaactgtacatcagagaattcataccggagagaaaccttacaaatgtaatgtgtgtggcaaggtctttaattacggtggatacctttcggttcatatgagatgtcatactggagagaaacctctccattgtaataaatgtggcatggtcttcacttactattcatgcctagcacgtcatcaaagaatgcataccggagagaaaccttacaaatgtaatgtgtgtggcaaggtcttcattgacagtggaaacctttcaattcataggcgaagtcataccggagagaaacctttccagtgtaacgaatgcggcaaggtcttcagttactactcatgcctagcacgtcatcggaaaattcataccggagagaaaccttataaatgtaatgattgtggcaaagcctatactcagcgttcaagcctcactaaacatctggtaattcatactggagagaacccttaccactgtaatgaatttggtgaggcttttatccaaagttcaaaacttgcaagatatcacagaaatcctactggggagaaaccacacaaatgtagtgaatgtggtagaacttttagtcataaaacaagtctggtgtaccatcagagaagacatactggagagatgccatacaaatgtattgaatgtgggaaagtctttaactccactacaaccctggcaaggcatcggagaattcatactggagagaaaccttacaaatgtaatgaatgtggcaaggtcttccgttatcgctcaggcctcgcacgtcattggagtattcatactggagagaaaccttacaaatgtaatgagtgtggcaaagcctttagagtacgttcaattctgcttaatcatcagatgatgcatactggagagaaaccttataaatgtaatgaatgtggtaaagcttttatcgaaaggtcaaacttggtttaccatcagagaaaccatactggagagaagccatacaaatgtatggaatgtggcaaggcgtttgggcggcggtcttgcctcactaaacaccaacgaattcattctagtgaaaaaccttataaatgtaatgagtgtggcaaatcttacattagtcgctcaggcctcactaaacatcagataaaacatgctggagagaaccttacaactaaactcaatgtggaaaggccgttagatgttgtgggacgagagaccaggaaaagaaataagagacagagacaaagtatagagaaagaaaagggggccccagggactggcgctctgcatatggaggacctgcgcagctggccctggtctctgagttccctcagtatttattgatcattatctctaccatctc

SEQ ID NO: 462542 - DNA, 2857 bp, Homo sapiens
  misc_feature (1)..(2): n is a, c, g, or t
nnctccaggggtcctagcagctctgctcccaggcaggtgcaggtagaagagccttgctcagctggggctgtgcagcctggtggctatggggactgccactgagaacagccctgcaagcagctgtggtcgatgcaagagctgtcagagggtcaaagacactccactgatcaggatccagtctgaggagttcctcatggttcccatgactttcataatatccatgtgtaccggccaggtagttagaatgtccttcccacttctcatagaagtaggagggcctcttgggaaacatggaacagtcggaagaatgatgggcaaagatggagctggcattaaattttcaatggaagcagtattggctttgacttttcagaaggcttatctgttagatggtgtttgtcactgggccgcggagctgtggatgttcgtcagttggaagttgcaggcagttgaacgatatggacagctagcgtgggtcatgagggtgcttgaggatgttcaactggactcagccattggacacaagggctcgctgggtttttctcggacaggacattgcaagagaggcacaaaagatattcgggagaagggatatgagtactcaatgaccacaaactgggggtcaagaatttctgagcccctgaaggatctggcacctggaggcctggagaagactcccataggaatgctaggtagagcatcctgcaagcacttgtgatggagtgaggttgatatggcttggatgttttttcccccctccaaatctcatgtcagaatgtgatctccaatgttggagctccccgcttgctttctgccactaggaaaacttcctgaggcctccccagaagaagccgagcagacgctggtgctgtgcttgagtagcctgcagaaccataagccaaataaacctcttttctttatagattacccagcctcagttgacagagcgccatttcgtgggtgtggaggtaaaaagacgtcaccagccctgctgtccctctaggtcacagctcaggcctgacatcagcagagagaacagaagggtcacctccccagagaaggaaggagctttgcctttgaacgatgcatttaaaacatttataaaacatccttcaacttcttccaggaacaaaagttttaaatgaaggaaagagcctcagctatttcaaggtcttggattctttccctttctggcatttgtgagcagccgtgcagattttttcctccagaaatggaggaagactgatttagcaagtttgcaaagagcccacttgtgtgaaacaccttccctcctgctttaaggtgaaactcctctttctaggaggaaagcagatagaggtctaggtctggattgcgttggtcctagcatttgtcacagcgttctactgaattagtgactcagtgcagcagtcacttaaaaaagagacccagttaaaatagaggggccaaaatctttgctgcttttcctcgagattctcatggggtccttgtcaatttctattaagctgtggcaggttcaggaggagcactcaattaatggtttgtttaggtggctctctattggtcacatggagaactccttgagagtgggacaggatcttattttagcatttccagccaatagctagagtgctgggcaacaaaaggtgcccagtcaatggtgattgattatttgatccacatttaattgactgccttgcccccactcctccactcacacaataagaccacgcaaaggtgtgataggaaatatttggatggtcaagttttaacagcatgaagtgtggtctccacgagaacatccgtggattttttatggtttctgaacaaggttcccatgactgtgctgctgtacatgccttaattcagattttgaacttaaggaccacctgctcaacaaagtcctctctgtgtcccgcaagttagacctgtattcacaggacacacagaccttaaaggtgtgacagtcatggtggcatctgtaggaaggaggctgggaggaagggctggcaggaacagctgtgcacctctaactggggtcatgagggctggtctgaaaacagaggtgccgatggctggaggaagtgggtgagagcagcttgtgtcttttgcagagggaaggaaagggacacttccttttggaaagacaactggtgtgatacagggagaggcgaagtcaacagaagaacaatgccaaaaaactacttgatgactgaattccaggatcacagccccagctttccatgacagggccaaccaaggctgtggtcttgtgtgcatccgtcaattaaagcaggagggaagtttcaaagcaaagtcattccagtaaaaacttaacaagccctgggctgactttaaggatgcatgtgaaatcatgacaaaacaaggattttattttgttttccatgggctaaattatttcagttcttggtgtataagtgttttgaggtagcatcatttttttcagcccaaagataaatcctagagttacagagggcttctcttgaggagggatgctcagatcaatcaggagaagccaggcaggaaggagaacccgagacaaagggccttgcctggaactctgcagcagggttagggggcgtgtgagccacccattgcatttctgtctggggttttcatcaaggttcccttttctgtgacaggtaatgtcattgcatgtacacagtttaagacagagcatctggtgattctcggaccttcaagcaagtgtcacatctcaggtgaaccttggcagttttaagatgaacaaagtaatcaaagcaaaaatgtcaaataataataataataatgatatcagaagaatgtccagtgccatggttggattcccagaaggcag

SEQ ID NO: 462543 - DNA, 1104 bp, Homo sapiens
aacaaagacctgggcaaggatgaaaccatggggcaggacttctgtctcctacaaatatgcccagttatctttgagaaccccacttacgatgaacctgagcttggaagctgtcccagtcctcactctggggtgatcattttgtcctggtttgggcaggacttcctggttttagcactgaaaggaaatgatcactggatggatccaggaacccactggacccatcgggaggttggagctgggtcatcgttagccttcacctcaccctattatgatgggaagcacaatggagctttgtgtccctggatatcacagtcaattcagaccctgggtccaataattcttctggtaaacaaacaccctgctggcccacaaaggccattttctttctggccattcagggagaggggtgttccagtttcaggaatagaattaggggagcaagctggtgttcaccgcaccctccagtgatctctgatgatatgcggggataatgggttacaaagacagacattaataagctacttgtgcaagaagctacaatgagaaaaaaaatagcaagaaatagatgagggaaggaggttctgtagagggaaaaacaaagagagaaaaggagaatgaattgtgctgagaaagagatgcctggatgaagaagctggccctagcacccataaagctggaaagaaagtggggccttggaaacttctggaaggatgcgaggaaagaaaaatgcaaggaaatgagatggagaggagaaagagaaaccaggaagcacttcggaagcatgtaaattacaaggaaatgaggaacagcctttattgaaacagtctgtgaagtctgtgctagcgctgagagcttcattttactgtcctggcaaggaggtgtggcccctctccagtgcccagcacctcatcgctgtggtaacagaagacacgcttatcttccggattttgcctcagagacttgggctgtacaagctgctttcctggggtggcttgtccttttgcagttaaccgagatgcctggggagaagagcttcccccaacaggatggcaggcgatgcttccagatgcggtcacttggcacgtctgagccgaatgtctccat

SEQ ID NO: 462544 - DNA, 1707 bp, Homo sapiens
ctcagtaaatggcatacagtaacaacagccatcaacagttccataaggggaatcccttcattttaaccaggggacccgtggcccttgtgaaaggtctgagaacatctgaagctaacttctacaccaacgtggatgtggccggtccccgtgcggatgcccgtttcccctcctgcctgcattcatctgaccggttcagtgggatctggtacttttcctccctcctcctcgtgctgggcttccacatcatccagacagctgctgccacattccaccgctccagcagcggaagtaaggcacatttaggccctttctggggatgtgtgcctgtcgccctgggccgctgtcccctgacggcagatgagatattcttccagctcaacactgatgttgcagggtttttcctcacctaccgcatgacgactgaatgaaagcattccaggaaaccaaaagggctgggcaggcctctggaatttcaaagccgacagcctggccctgctggcagctcatttctgccgcgtcattttctctgaactgtaggagtagttttgtagcaaacttatcaccaaaatcccacaaatgttaagcattacccttcttagaaaggaaaagcctacttacttttccccattggaagacttcaattttttaagattcaagaaatccccaaaagtcatgataaagaagagggaaaacagactgagcatacccatccccttttaaattcaaatttattttgtttttttctgcttagctacagggaaggtttgatcatatcacatctgagttaggccatatgcacccagggggaatctcaagagcaaactaatctaaactccaagaaatagaccactaagacccacccaggtagtactcactgaacgctcttcctgcctctcataagaaccaaaaatagcggtttcccgcagatgctcccagaagcaaagtctacctaccacacacacaatatgcagaagggaaaaacccaagccacaagtccctaaacgcctgagtcgtgactcatggaggctgtcctccacccctgccaagtataagaaatgatttctacccacccacttctctaaggagatggtccctcattcctctctcccgagcaggcttcacagcccccttcatagagatgaagccctagtcattaaatgcccagtgatgttacgactgccaaattctatgactatttggaaagttttatcagccttcagacttggcctgaaacattggtcctccttgggttgtgagcctgcaggtcctcagactgaaactatccatcagctctcctggttctcaggctcctggattcaagctggaagtacacatcaggtctcctgggtcctcagcttgatgactcgagatcttgggaattctcggcctctataactgtgtgccccaattccctataataaatctttgtctttctctctctcctgttgtctctgtgtctctgaagaaccctggctaatacaaaggtatagtccaattttattttattttttttccaaataaatactcctcagtgacagcaccatctactgaatattgtcccttccccactgaattgcaaagatgcctctcaagcttccatatgagcacgggactatttctgtaatttgtagtctgttctgttgggctactgccctgtccttgtgctaacaccatgtcttattactataggctaattatgaatcttga

SEQ ID NO: 462545 - DNA, 1063 bp, Homo sapiens
gagaggacctggatacctcaggttatggtgcaggattcacatactattatggttcttttctatgggatgctgcttctagtgccactgggagaacttcagcccggaggggagatcagctgtcttttcacccagtgccccctacccagcagtgcaatagaacctaaagaggagctacaggacaatttcagaaacagcgtgcttcaggaagcacgctgggaagtggggagtcacagatctctcagcgtggactgtgtgctccaagaaagtgtggggtcgactaagactagtggcaatctacatacagctaatagaaactgccctacagctcagagttgtagcgggaataaggacttctccaaagccaagcagcatctgaaaactcctgtagtaagagacaacaaaaccagcatagatccagccctgtttaatggcttattgcaaaaaaagccaaaagtgaaagtaagagcagcttcactggcagatacagagttaaacggggagtcccagagaaagcaagagaagccagttttgcaggagctgccagaggaaacagaagttcttcctccatatgtcccagcctacccccctttaccgaggccaacagcccccccaggaacaagattcaggagctaacacgccccaggtctttcctcgaaggggaggatcaggcccttgagaggctagggaaggaagtcaagacagtcaagtgggccatttcagatctggccatgctcaagctgtgcaaatgcctctcagggagaagataggacctatctattatgatgaccagggccacatccagaggggggcaatggacttatatctatcagcccttttcaattactgatctactaaactgaaaacaccatacactgtccaacatggagaagcctcaagttcttatagatctgatgcaattcctctttctgacacacaatacgacctggccagattgcaggcagcttttcctaatgttgtttaacattaaagagtgccagaggatgacacaggtggctctccgctggctagaagcccatgcaccaacagacatagtgaatgctca

SEQ ID NO: 462546 - DNA, 7028 bp, Homo sapiens
aacggttcagtcaccttaaccgttattattcacttgcgggcgagaagtccgagctagggatcctgaaaaggagggaacaattgttgtagcaggtctaaaagttcaggtccaggaaatggaaacattgctttgcttttcctgaattgtccagtgacctatcccaggccttcctttccagtgaacaatggaccatgcaggtggaccctcctcttcacgggcctccaaatgactttctcatttttcaaatcattcctctgcactcactttctataatgccccggtttctctggattctgtgcttctccatggaggaaactcaaggagaactgacaagttcttgtggttctaaaaccatggccaatgtatctttggcatttagggatgtgtccatagacctctcccaagaggagtgggagtgcctggacgctgtgcagagggacttgtacaaggatgtgatgttggagaactacagcaacctggtctcactggatttggaatacaagtatattaccaagaatttgctttcagaaaagaatgtttgcaaaatctatttatctcaattgcagacaggggaaaaaagtaaaaacaccatccatgaggacaccattttcagaaatggtttgcagtgtaaacatgaatttgagagacaagagagacatcagatgggatgcgttagtcaaatgctaatccaaaaacaaatatctcatcctctacatccaaaaattcatgctagagagaaatcatatgaatgtaaggaatgtagaaaggcctttagacaacagtcataccttattcaacatctgagaattcacactggtgagagaccctataaatgtatggaatgtggaaaggccttttgtcgagtgggagaccttagagtacatcacacaatccatgctggggagagaccctatgaatgtaaagaatgtgggaaggcctttagacttcattatcaccttactgaacatcagagaatacattctggtgtgaaaccctacgagtgtaaggaatgtgggaaagcctttagtcgtgttagagaccttagagtacatcagacaattcatgctggagagagaccttatgaatgtaaagaatgtgggaaggcctttagacttcattatcaactaactgaacatcaaagaattcatactggtgagaggccttatgaatgtaaggtttgtggcaagacctttagggtacaacgacatattagtcaacatcagaaaattcatactggtgtcaaaccctataaatgtaatgaatgtgggaaggcctttagtcatggctcataccttgttcaacatcagaaaattcatactggtgaaaaaccctacgaatgtaaagaatgtggtaagtcctttagttttcatgcagaacttgctcgacatcgtagaattcatactggtgagaaaccctatgaatgtagagaatgtggaaaagcctttcgtcttcaaacggaacttactcggcatcatagaactcatactggtgagaaaccctatgaatgtaaggaatgtgggaaggcctttatttgtggttatcaacttactttacatctgagaactcacaccggtgagattccctatgaatgtaaggaatgtggaaaaaccttcagtagtcgctatcatctcactcaacactacagaattcatactggtgagaaaccctacatatgtaacgaatgtggaaaagcctttcgtcttcaaggagaacttacccgacatcacagaattcatacatgtgagaaaccctatgaatgtaaggaatgtgggaaggcttttattcatagcaatcaatttatttcacaccagcgaattcacaccagtgagagcacctacatatgtaaagaatgtgggaagatttttagtcgtcgctataatcttactcaacattttaaaattcatactggtgaaaaaccctacatatgtaatgaatgtgggaaagcctttcgatttcaaacagaacttactcagcatcacagaattcatactggtgaaaaaccctataaatgtacagaatgtgggaaggcctttattcgtagcactcatctcacgcaacatcacagaattcatactggtgagaaaccctacgaatgtacggaatgtgggaagacgtttagtcggcactatcatcttactcaacatcacagaggccatactggtgagaagccctacatatgtaatgaatgtgggaatgcttttatttgcagttatcgacttacattacatcaaagaattcacactggtgagcttccatatgaatgtaaggaatgtggaaagacctttagtcgtcggtatcatcttactcaacattttagacttcatactggtgagaaaccttatagctgtaaagaatgtgggaatgcctttcgtcttcaagcagaacttactcgacatcacatagttcacacgggtgagaaaccctataaatgtaaagaatgtgggaaagccttcagtgttaattcagaacttactcgacatcacagaattcatactggtgaaaaaccctatcaatgtaaagaatgtggaaaagcctttattcgtagtgatcaacttactttacatcagagaaatcatattagtgaggaagtggcagtcatcaagcagttttgtgaaaagccttcccgactaccatactaccactttcctcaacttggactaatgtccattgtcaaccaaaatgtctgtgatctcatggatccattatgatttgcaactccaggtccattttatgcaaataagacagccataatatatcattgtacaagtcatttactatctaattatatcattgctcaacatttgcaaattatttttacaaataacaataattggatgtaacaaaaagcagagtattttgagacgtatattaatgcaaaatattgttaatgtatcagtggattgttcctccaaagtaccagtgccttaacacaacatatctaaaagaacatctctgggaacagtagtacttaatggcaacttgagaattggtttgtgggcacacagccttgtgaagttttgaatactaaatcccttttttaaaaaagtgcttattatcaggctatcaatcaaaagatttgagtctttcagtaaagaaaatttgcttaattttatctagtgcatgataaactttactaaggaagtctcattcagaatatctaatattttggatgtgagcccacactggaaatgccataaccaaaaaagagtgaccctaaagatagaatattcagatctaatggcagatgcttagctatgctgggaaaggaagtgaattgtatattgctctgctgctcacatattcctctgcaataaattgctggcccagtttagtttttatatactcactactatactaatgaggatggctcaattttttatttgaacgtactataatgaatttaaactttcattggtatttatgttttaacaggttttcactatttcaaatatacttcaataaatatccttgtctgtgatcattggtttatgtgaattggaatttcagtagctgtatatacatggaagtacaattgctcatacatcatacactctttcagttatgttagataatactaaatcaaccatgggttctgtataccctactagatatttccaaattgttctcttagactcctgagaactggtaaattgagtgctatagcttcagtttagtccctgaaattcatcttcatcttcatccagaagacaatcctcccaagactcatagtggaacattcttggggaggtgggggggagtggggaggggagtgggggagggagggaagaagcactgactccctgggctcctccatgggcaggtcctccaccagcttgcgacccctggccacctatttctgtttctttttttgttcctatgaattctagttactatcatgtatcatttccttactccaatacaactctgctgtcatttacttcctttatgctgttattgtcaaatatattacatttccatgttataggcccaacaatataattatgtacatactgtattatacaactgccttttaaatttattaagagaagtaaaaagaaatgtgcatttgtgctgctttttgtaattttaattatattaattttgttctttttaaaaatgtggttttgaatttccatgtagatttacttgctttgtttgaataacctttacaatttcttatgtggtaggtctgggaagggctttatttcaccttcatttttgaaagacagtgtgttactgcttgacagagcttttgtcgtttgagtactttgaatatatcatcccactaccttcatcccctccattgctttggataagaagtcagctgtcaatcgattggtgttccattgtaagcgacacatcatttttctcttatatttttcaacattttctttcacttttagcatttctactatgatagctggatgatcacaataccctgtaaaaggatgacagaaatcttgtgtctactttttcttcttttctggggagtctatgaacattcaagataacatccatgactgaatattctaaaacaagtttctttacaacgctgctcagaaacaccatgacaaatttaaatcagagcaatatctccaaaaatgggaggcagattaatgtatcatttcagccaggccttaaaaggagataaacttctcagctatcaccatacataaaacataattcaataaaataccaaatgcaaacaagagcagatcatagaaatgtaagttgagaaaattcagagggaacttctgaccttaggatgacattttcaactctgaaactattaaaagaattctaacaaaagcagcatctttttttccatacctgtaactgccatgtgcactcacagcagccagattttttggtctctaattcttttttcctctaaaaggaaccaggactccctaagataagagggtattaaatcatgagttgattccatgactcaggacaagaggcatgggggacatgaaccaacaaacagggtcagtcttaaacatcctcttacggcctgaaaacaatattcctttaaaacatcaaaagaaaaaaataagtagtaaaaaaaaaatgtaaatggattcctactggccacattatgtcaatttgagcataaataataataattactacaggtgcttctcaacttacggggagttatgtccaaataaacccatcataaattgaaaacatcatacaccatatgtgcatttatggtctacaatattttcaatttaacaatgggtttatctagatatagccccattttaagtcaaggagcatactctgactgagtatgtcttagttttgtgttgctataaaggaatgtctgaggttgggttattaataaagaaagaggtttatttggctcagtgttctgtaggatttacaagaatcatggtgcaacatctgcttctggtaagggcctcaggctgcttccactcatggcagatgaaagggggcagtgtatgcagacatcacatggcaagagaggaagcaagagggtgaggaaggaggtgccaggctcttttgtacaaccagctctcataggaactaacagagtgataattcaccccccaatccagagaggacattaatttattcatgagggatcttctcccatgacccacacacctcccattaggccccacctccaacattgggatcaaacttcaatatgagatttggaggggataaatatccaaactatagcagcatatcacttttgtactattataaagctgaaaattataagtcaaaccattttaagttggggattacaggcgtgagccaccgtgcctggccgtgatttttaaatttgtacatacttggtttgtaactttaacaaatatattaaagtgttttattatgtttgcaaagggactctgacttccaacatagtactgccatgattgcatgatgatagagtttcaccgaaaggctgccagggatctttctgacaactcttaatgatactaccgggatgtgcaatgacccagaaaggagttgtgctaggttaatacccagggactctgctgatttcaaagaagaaagttcaagagaatggatagaaaaaagatgaaactggaaataaaaaataggaacataagatttgaaagccaagttttatataatcttgttttataagttgtataacatcattgcaatatcaatacctgaaaaatacttggaaaattataactttacttatgattatagatgcaattaaatggtaaaagatagaattaagtagtctattgaaagaataatcatctgaccagggtatattcataaaaagaagaaagctatcaatataaattatcactttatagatttttcaacacaatggaataaaatcacaaaggattattcttaatcttaaaaaaaatttaatctaattcatgatgccacatcggtatcatgttttgttttggggtttttttgagatgaagtctcactttgtcgcccaggctggagctaaaaaaagatctcacagaggtaaagaatagaatgatagaaaccagaggctgggaagggtgtgtgggtgaggggtgggggatgaagaggagttggttaatgttacaaacatacagttaaatatgaggaatgacttctaatgttcataagcagagtagagtgactctaattaacaacaatgtattgtatatttcaaaatagctagaagacttgaaatgttcctatcagaaagaaatgataaaccctcctctggtggatctgatggatacctcaaataccctgacacttgttcattacaccttctatgcatggaacaaaacataacatgtatcccataaatatgtacaaatattgggtatcaattaaaaatgaataaataactcttgaagaacttcccacattcctcacaacgacagtcaaaaccctgtatgatacgactccgacgtaactctcagacctttcttcccgctgttccattacttactccacctttgtgtttcctgctcagtctgactagagtacttgaacacttacttcacatctctatg

SEQ ID NO: 462547 - DNA, 1215 bp, Homo sapiens
agtaacaaagggatgtcgggtaaacaaagtaatagcataatcggttttaatatccgtaagcatctggggagtcacctgggcttttagtgacaaaagtctgtgggcgaagcccctctgagaagagaactctgctctctaggcctttcagaggtaggcagagctcggcaaccggtttctacggaccgaggacgcgttgctaagggactgaagggtgggggcggggcgagtaacccgcggagccagaagagggaggaaaggagatgagatttcatcatgttggccagcctggtctcaaactcctgacctcaagtgacccgcctgcctcagcctcccaaagtgctgggattacaggaatttagtgattgacaatggcagaaaaaatcctagagaagttggatgtccttgataagcaagcagagataatcttggccagaagaacaaagataaacaggcttcagagtgaaggaagaaaaacaactatggctatacccctgacatttgattttcagttggaatttgaagaagctcttgctacatccgcgtctaaggcaatatcaaagatcaaagaagacaagtcatgcagcattacaaaatcaaaaatgcatgtctctttcaaatgtgagcctgaacctagaaagagtaattttgaaaagtcaaatttaagaccattctttattcaaacaaatgtaaaaaataaagaaagtgagtcaacagagccagtagaagaacatctaaaatcaagatctattagaccctatctttatcttaaggatacaactgagatggaaaatgcagggcctttgaatgttctatattcacagcatagacaagcatgtagaagatcactgggttctacagacttttctcctatgttcaacattcagtctaatgctcataaaaaggaaaaagactctactttatttacagctcaaattgaaaaaaaacctaggaaaccattggattctgttggtctcttagaaggtgatagaaataaaaggtaatttattttaaaatgcttaatactttgttctgtttaatgatgtttctagtaggacacattttataattgacaggaataaatttattctgccttattatttagttccacagcacaatccaatgaatggtccaagactgcttagccactagatatcacatccagaccttgagtattgttaaatggagagaaaggcatggaaaaatgaatagagggaa

SEQ ID NO: 462548 - DNA, 889 bp, Homo sapiens
agtaacaaagggatgtcgggtaaacaaagtaatagcataatcggttttaatatccgtaagcatctggggagtcacctgggcttttagtgacaaaagtctgtgggcgaagcccctctgagaagagaactctgctctctaggcctttcagaggtaggcagagctcggcaaccggtttctacggaccgaggacgcgttgctaagggactgaagggtgggggcggggcgagtaacccgcggagccagaagagggaggaaaggagatgagatttcatcatgttggccagcctggtctcaaactcctgacctcaagtgacccgcctgcctcagcctcccaaagtgctgggattacaggaatttagtgattgacaatggcagaaaaaatcctagagaagttggatgtccttgataagcaagcagagataatcttggccagaagaacaaagataaacaggcttcagagtgaaggaagaaaaacaactatggctatacccctgacatttgattttcagttggaatttgaagaagctcttgctacatccgcgtctaaggcaatatcaaagatcaaagaagacaagtcatgcagcattacaaaatcaaaaatctcaaattgaaaaaaaacctaggaaaccattggattctgttggtctcttagaaggtgatagaaataaaaggtaatttattttaaaatgcttaatactttgttctgtttaatgatgtttctagtaggacacattttataattgacaggaataaatttattctgccttattatttagttccacagcacaatccaatgaatggtccaagactgcttagccactagatatcacatccagaccttgagtattgttaaatggagagaaaggcatggaaaaatgaatagagggaa

SEQ ID NO: 462549 - DNA, 406 bp, Homo sapiens
ccagcatatttttctgaaagggttaatcagcttgtgaataagtttcttggagtgccctcaatgctatcacagcagcaagtagttttctgtccccctccactttaaacgactaaaactaatattttcagctcctatttaatcagtccaatgtttcacacttggtactgtgacaacattaacataacatccaagtctgtataactaggacttcacattcctccaaatttattttttagatttattttgtaatttttctcattattttaatttaaattaatttttatttcttccaggcatgtctctttcaaatgtgagcctgaacctagaaagagtaattttgaaaagtcaaatttaagaccattctttattcaaacaaatgtaaaaaataaagaaagtgagtcaacag

SEQ ID NO: 462550 - DNA, 759 bp, Homo sapiens
gctgattcaacctccaggtttatgcacagatcagatgggtcagattttggaagcagaactgtagttcatgcagaaatcaggtcaacaattagcaactgcagcccttcattaagcgcttctccaagcctgtgttcagccgtgaattcatccttggatgcgctggagctgcttagtggaataccaagggaaaacaagtctgtgtctttgaatcctatccagctgcagccacaagttcctgaagagtacatgcaagatgacatgcaaacaatccacatgctatttttggccaaaatgatcctttcctttggtcctaatatcagcgccaacgtggattcacagccaaaaggagttcatgatgcatctcccatggaaagagcttatacctcaaacccacaaggctcccctctacattcaccacatggagaacagaccagccaaaacctctcaggagggtggagtatttgccagtaactctctggagatctgtcttatgtgtgaccaagacaacaaaacttaaaaaaaggcaataatgttggaaaaagacatgaatatggtctgtattaaattgattctactttttatttagtcatgactctggactaactttcaaaaagtaaaatgttatgccagcctagcaaatgttcatatcaaattcctcattgttttctctactctcctttgtcctgccctccacttttgtttgcttggtgaggctcaccctaaaatatgtaaaaatatgtaaaatatgtaaaaaaaaaa

SEQ ID NO: 462551 - DNA, 805 bp, Homo sapiens
  misc_feature (3)..(3): n is a, c, g, or t
  misc_feature (5)..(5): n is a, c, g, or t
cangnagtacggacatgcagtattgcatgcacacacaccatggacgactactcagccataaagaagaatgaaatcatgactgttccagcaacatggatggaactgaagaccactatcttaggtgaaataactcagaaacaaagtcaaatactgcatgctctcccttatatgtgggagctaaataacgtgtacagacagacagagaggggaataacagacattggagactggaagggtgggagggtggcagggagggatgagaaattacttcatgggcagaatgtacactactcagtaatggtaacactaaagcccagactcttccaccatatgctatgtccatgtaacaaaactgcatgtgtaccctgtaattttataaatgttgttaagctgaaaaggtgtgtgtatgtgaacacagtaaacatgtaagtataaacacagatgtaccgtgtgtgtgcaagcttattcaggttaccattgctatgtcttacttgcttaaactattggtttttgtaaagtgcacgttcaaatcacccatgacagctatttctacctgctctatccatcactgctggatgaatgttcgagcctcattgttgggtgcgtgtatgtgtatgtatatttacagactgttacgatgcttcttaccctgaaatattcaaacgcctgccctaattctcctttggtttactctgcatgtctgtgtttctaccctttgaagcatgtcttttatagtaaaaatactatttagtatatttttaatgcagtctagtctgtttttaatgatgtttttaattgacaataa

SEQ ID NO: 462552 - DNA, 1097 bp, Homo sapiens
  misc_feature (1)..(2): n is a, c, g, or t
  misc_feature (4)..(4): n is a, c, g, or t
  misc_feature (10)..(11): n is a, c, g, or t
nntnctgccnncagggcactgtctgtttgcaaatccagatggaaaggaacaccttcacgccaggagagaaggtcgtcttcacaacagagatcaacaaccagaccagcaaatgcatcaagacggtcgtattcgccctgtatgcccacatacagtacgagggcttcacgcccagtgcagagcggcggtctcggctggacagcagcgagcttctgaggcaggaggccaacacccccgtgacccgcttcaacaccaccaaggttgtcagcaccttcaacctgccgttgctgctgtccgtgagcagcagcacgcaggacggtgagatcatgcacactcgctacgagctggtcaccaccgtgcacctgccctggtccctgaccagcctcaaggccaaagttcccatcatcatcaccagcgcctcagtggactctgccatctgccagctgtcagaggacggagtgttacccgtgaacccagatcaccagaattaagtgcccgaacttttaaatattaaaagctttattagtctctaccaggaggaagccctctctcttgcacaggtgactctcagaggagtcgaggagtgggcaacaggttgtctgcaacctccccaagctctagcggtttaggtatctgtgtctcccctccctagaactatcactgaatgcctggaatggacaaaggaaaccgggaaggtctcccaggacccaaacccggcataacctgccttttccaccctgagtctgccccagcctactggggtctcacagtgccaagaccaggggtcctacttggggagaattctcccctctgctaatgtctggttgtattggctgtcacaactgcaggggatcgggggagaagagtcttattggcgtggagagggtggaggccagggacgctgttcagcaccctgcagtgtccaggacggcccccacaatcaggaattgtttatcctgaatgtcaacagtaccaagggggctgagcatggtggctcattcctgtaatcccaggactttaggaggccatggctggaggatcacttgagaccaggagtttgagacaagcctgggcaacactgtgagacccccatctctaca

SEQ ID NO: 462553 - DNA, 2160 bp, Homo sapiens
accgcctcctcggcacgctgagcaagagctaaggggtaggtttatatcgaagtgcgttctgtgcggcgcgctccgagctccgttggtcgcgcgcgtgctgtggcgctgagtacggctgttgggtagtcgcgtggctcgccagtgatcgactgtatatcggatgggtggttcatccctggtcactgtggcgccgtccgtcgcttgcgtgttcgtgctgcggtccgccactccgaggcgtcgcggggttctggtgggctgcgggcgcgtgcggttgccggttctgatggtcgtcgcgcgcgcaatggagaagctgcagttcctttacctgtcagacaacctgctggattctatcccggggcctttgcccctgagcctgcgctctgtacacctgcagtccttccctccttcctctctccccttctcttcctcttcatctgtgccctctctctccatccatcccccctggggctcctcttctcacccttgttgtgtggctttggccctagatgcttcagtttctccagttgcaccagagcaggcagagctgaataacctgatagagaccatgcagagagacgtcttctgtgaccccgaggagcacaaacacacccgcaggcagctggaagacatccgcctggatggcaaccccatcaacctcagcctcttccccagcgcctacttctgcctgcctcggctccccatcggccgcttcacgtagctcggagcccttccactcctcccaggtcatctcttggaccagcgggcatcacattctccagcagccgccatctcacacgcctccctcctgtggccgccggcagcatggacaaaggtctccatgcagggggaggaggcctgcttctttccccacagctctcacgtctcccttctccctgcgggtgacaaagaagcccaaggaccacctccttcctgcctcattgtaataaaattccccacactgaggccttcttgtcttcaacctggcctgtccagcccttccagatatggccaaacccatggcctggatgggcttgtgtacttcctttcaaatgagcccacacagaacgccctgctctccccttcctcccctctgcactccttctgcctcctttttctctattctccttctgtgctcaggcaccacagcaaatagctttttgtttcctcctggcactaccagtcccagccctgccttcaggaattcttttctctctctctctctttttttaaaagactgggtctcactaggttacctaggctggttttgaactcttgggctcaaatgttcacctgccttagcctcctgagttcctgggattacagatgtgtgccactgtaccgactccagaattattttcttttgtgtctaacacacagttcagacacaggagggagtggaagtgtttcttgttatggcatctgtagaggaactgtgatgcaagggagtgagcactggaatgagaatctgaagacctgagtttgactaccctatatcctgatcacaccagcacctcactctgtcctggccccttggagttccctcactccaaatctgttgctcaaagcatatccaagcccaaggggtgtggtgcctatccctatcttattacatttctagtctaagaacaaagacccaaccctctcctactgttcccagtagcacagactaccattgacaaagaggtatcaaatggtaaaaggagaaaaggaaggaagtacagaaaatacagacacacaatcagtctagtctcacaagttgagctttctgagcccaaatcaactataccatggctttaaagcttgcttagctgcaggccttcctgacccttctctagtccatgcagaagagagaataatccaagcttttcaggccctttctgacccatcctgaaaccaaagcccccgcttcctttacctactcctgcctcctccccacctatcagagtcactgccacctcccgggaagctgagagggtttatcatcaaatcaggctttgtcataaagaaaacagatttattttcctcgctttgagaaggtgctgacaggagcagcgagggaaggggtgttttgtatattgaaagcctttctccccctgtggctaaatctcgcgctattttctaatttacctcaaatgctgctcctccagcctgcctctccat

SEQ ID NO: 462554 - DNA, 963 bp, Homo sapiens
accgcctcctcggcacgctgagcaagagctaaggggtaggtttatatcgaagtgcgttctgtgcggcgcgctccgagctccgttggtcgcgcgcgtgctgtggcgctgagtacggctgttgggtagtcgcgtggctcgccagtgatcgactgtatatcggatgggtggttcatccctggtcactgtggcgccgtccgtcgcttgcgtgttcgtgctgcggtccgccactccgaggcgtcgcggggttctggtgggctgcgggcgcgtgcggttgccggttctgatggtcgtcgcgcgcgcaatggagaagctgcagttcctttacctgtcagacaacctgctggattctatcccggggcctttgcccctgagcctgcgctctgtacacctgcagtccttccctccttcctctctccccttctcttcctcttcatctgtgccctctctctccatccatcccccctggggctcctcttctcacccttgttgtgtggctttggccctagatgcttcagtttctccagttgcaccagagcaggcagagctgaataacctgatagagaccatgcagagagacgtcttctgtgaccccgaggagcacaaacacacccgcaggcagctggaagacatccgcctggatggcaaccccatcaacctcagcctcttccccagcgcctacttctgcctgcctcggctccccatcggccgcttcacgtagctcggagcccttccactcctcccaggtcatctcttggaccagcgggcatcacattctccagcagccgccatctcacacgcctccctcctgtggccgccggcagcatggacaaaggtctccatgcagggggaggaggcctgcttctttccccacagctctcacgtctcccttctccctgcgggtgacaaagaagcccaaggaccacctccttcctgcctcattgtaataaaattccccacactgag

SEQ ID NO: 462555 - DNA, 5190 bp, Homo sapiens
tttgaaacctgaatatgtatttcattgtataatttactgttaggtcaccctcgtcgactgaaagtgaaacctgattctgaaattttagttatagaaaatggaacagctttcccatttcaggtggaagttttagatgaatcagacaacataacagcacaaccaaaattgattgttcattgtaagttttcaggtgctccaaaccttccagtctatgttgtagattgcagtagttctggaaccagtattttaacaggatctgcaattcaagttcagaatattaaaaaagaccagacgcttaaagcaagaattgaaatacctagttgtaaagatgtggcacctgtggagaagactattaagttgcttcccagtagccatgttgcaagactacaaatattcagtgtagaaggacaaaaggcaattcagatcaaacatcaggatgaggttaattggatagcgggtgatattatgcataatcttatttttcaaatgtatgatgaaggagaaagagaaatcaatataacatcagctttagcagaaaaaattaaagttaattggactcctgagattaacaaagaacacttgctacagggtctgcttcctgatgtgcaagtaccaacatctgtaaaagatatgcgctattgccaggtttcattccaagatgatcatgtgtctttggaaagtgcgtttacagtaagaccacttcctgatgaacctaaacatttaaaatgtgaaatgaaaggaggaaaaacagtacagatgggccaagagcttcaaggagaagtagatcagtacggaaatcagattcaagcattttcaccaagttctttatcttctttgtcaattgctggggttggacttgatagctcaaatttgaaaacaacctttcaggaaaacacacagagtataagtgtaagaggcatcaaatttattccaggtcctcctggaaataaggatctttgttttacttggcgtgagttttctgactttattcgagtgcaactaatttctggacctcctgctaaacttctccttatagactggccagaactaaaggagtccattccagtgattaatggaagagatttacagaaccctattattgttcaactttgtgatcagtgggataatccagcaccggtacaacatgttaaaataagtcttacaaaagctagcaatttaaaggttaaagccatctataacaaaagtatcatagaaggacctataattaagttaatgattcttccagacccagaaaaacccgttcgtctcaatgttaaatatgacaaagatgcatccttcttagcagggggtcttttcactgatgacagtatcattaaaaacattaatccagcacgtatttccatgaaaatgtggaagctgtctaccagtgggaaccgacccccagcaaatgatgactacgacaaccatactggaattgatttggttggcactataatagccaccattaaaggctctaatgaggaagatactgataccccactttttattgggaaagttagaacacttgaattccccttcgtgaatgatgttaagaagcagcaacaaatggcagcacttacaaaagaaaaggaccaattatctcagtctattgttatgtataaaagtttatttgaagccagccaacagcttcttaatgaaatgaaatgtcaagttgaagaagcaagattaaaagaggcccaattgcgaaatgaactaaaaatacataatattgacattcctacaacacaacagggcataatagctgatcatttagaagtatcacttgtggtggattgggaattgattgtatgatcaaaatgatgtgcaatatattcatgttttccatattgtctttttttaaatttaaaaagtcatgtgctttaatatctttttaaaatttctttttatttagatctctacctcatttccgaaatggaaaattgtattttaaacccattggagatccagtctttgctcgagacttgttaacatttccagataatgtagaacattgtgaaacaggtaaaagacattatggtgactttacttttgtacagatgttaaatttgtgacacaaatctataaattactgataatgaaaatttatattcttattttgcttatcagtcatagttttatcagtttttttagagtacaaataaaattagaacgaatactagcactctttcaaagaaagacttgcaatgtgcattatattttaatatggccaaggaaaatatcataattttcaaaattcatttattgacttttttagtatttggtatgctgttaggagacaccattattttggataatctggatgcggccaatcattatagaaaagaggtatgtatttgatttctttttaaatttgtagacttcagttttaatgtgtatcatgtccatttgatgatacatatacaaacgactagccttttcaaaaccaatttaaattctgcaaattgataagcaacataaaagtaggcaaaacgtaggaatgaatggaccaggatgcaaatttaaatagatgttttggggctacgaaattgtctaagactcaaaacagtgtctgttaggattggaaaaaagtactgtcaggtaattttggtgtaaaatgtaatttgctgtagccctttgtattggttttctagggcagccattaactgatgtgaataatagaaatattactgtcccacaacagactgggtggcttaaataatagaaatttattgtatcacagttctggaagctggagatccaaattcacagtttcaggagggttggttacctctaaagactgtgaatgaaggatctgttccaggcctctccctgccttggagatgaggactctcttccccctgtctcttcacatctgtgcgtgactgtgttcaaatttcccccttgttgtaaggataccagtcatactggattagggcccaccgcagtgacctcatattaacttgattatctcagtaaagaccctatctccaaataatgtcacattctgagggactgggggttacggactttaacatggatttgttgggggctggtcccaaacaaaggtaatgagttatctcaattgatggttcaccatcagctacagatctaactctgttttattctttcctccccttcttactagtctacttgactggtcttgtaaaaagtaaataaataaaagattatagtggagcacagtttagcccatagcacctttgcaggggagtttggtaaaataaatatttcagttatttactgctgctatatatataacactctaaattgtaagtttaaacaacaacatattagtcctctttgtagatttctccaagtgatgttggctagttgaactggggtggtggcagctctaaaatgcctgccttatgtagctggcaactggtacctgttgtcatctggcatcagctggtattagccaggggttcttttggggatgtctgctagggttattgttctcacccatgagggtgagatagagtagggtaatgccatttagagttttagaagcccttttgtctagctaagaggatccaggagggcagtagtttaaatctttcagaggtcttaacaaaggaacatccttgacttgattttaaccctaaagccacatgttataggcagtaccctggattgatctaagccagtatctgtaaatagtgtattctagaatcacggggactatagggatcatctaggatgatctaggacgagtgagaatagatgagagaccttaagctgagaacaaataatggagagctggacatgtgatgcatgcatgtagttccagctacttgggaagctgagggaggtttgcttgaacccaagagttcaaggctataggctgtcgtgtgctctgatcatgcctatgaatagccactgcactccagcctaggcaatataatgcgattctgtctaaaaaaataaaaattgttaaagaggtgggggatttgtcccaagtcacactttactaatttatggcagagctagaactaaactggtatgagtaatttttctttgggcctcgttaagaagcaataatagggcaccgggtacagtggctcctgcctgtaatcccagcactttgcgaggccaaggtaggggatcatttgaggtcagaagttcgagactagcctggccaacatggtgaaatcccgtctctactaaaaatacaaaaattagccaggcgtggtggcaggcacctgtaatcccaggtacttaggaggctgaggcaggagaatcacttgatcctgggaggtggaggttgcagtgagctgagatcatgccactgcactccagtccggggtgacagagcaagactctatctaaaaaaaaaaaaaaaaaaaaaaaaaaaaggcaataataaattcatcttagtttaggaaaactaaattactgggattttgagcattatatagctaattggaaaatggtatttggcatcttcatgaacgtttccttgtaaacctaatattaagtataatacactgtaccagaaactggctgtgggtgggagagctactatattctggtagtgattagcatttttatatatcccgaattatgaaatagaaacatacccattaaatgttatgataacatggaatcagtttggagacggtgagaagcttgctggtaaggattgaactaactaataggatggtaaccggaagactcctgttcaatgagatatttggatacttactatgtatgagacacagtagtgtgctattatgtgttgaactagctctctgaggaggcatgtggaagtccctgatttgtagcttttgccaatttctatggtgtaagtacttgtatcatggatgatttccagcagtctgtatgaagtccttcatgcctatatgaatgtggtgttcaggagacctggctttcatgacccagtacaagctggttccagcgtatcactaggcacagtgcactgagggttatacagtgatgaattagacaaaccagatagcctttggaaactccagctgagattagctaaaatgctatttcagatatgtatcttaatgaactggcaagagagtcaggattctaagtggaagtgggaacctggagagacaaacagaacactaatgccagatttttgcagtgagaacgtttgccaaactaattgaaccggatagcttcacaggatccgctagatca

SEQ ID NO: 462556 - DNA, 4132 bp, Homo sapiens
  misc_feature (4049)..(4049): n is a, c, g, or t
  misc_feature (4095)..(4095): n is a, c, g, or t
  misc_feature (4097)..(4097): n is a, c, g, or t
tttgaaacctgaatatgtatttcattgtataatttactgttaggtcaccctcgtcgactgaaagtgaaacctgattctgaaattttagttatagaaaatggaacagctttcccatttcaggtggaagttttagatgaatcagacaacataacagcacaaccaaaattgattgttcattgtaagttttcaggtgctccaaaccttccagtctatgttgtagattgcagtagttctggaaccagtattttaacaggatctgcaattcaagttcagaatattaaaaaagaccagacgcttaaagcaagaattgaaatacctagttgtaaagatgtggcacctgtggagaagactattaagttgcttcccagtagccatgttgcaagactacaaatattcagtgtagaaggacaaaaggcaattcagatcaaacatcaggatgaggttaattggatagcgggtgatattatgcataatcttatttttcaaatgtatgatgaaggagaaagagaaatcaatataacatcagctttagcagaaaaaattaaagttaattggactcctgagattaacaaagaacacttgctacagggtctgcttcctgatgtgcaagtaccaacatctgtaaaagatatgcgctattgccaggtttcattccaagatgatcatgtgtctttggaaagtgcgtttacagtaagaccacttcctgatgaacctaaacatttaaaatgtgaaatgaaaggaggaaaaacagtacagatgggccaagagcttcaaggagaagtagatcagtacggaaatcagattcaagcattttcaccaagttctttatcttctttgtcaattgctggggttggacttgatagctcaaatttgaaaacaacctttcaggaaaacacacagagtataagtgtaagaggcatcaaatttattccaggtcctcctggaaataaggatctttgttttacttggcgtgagttttctgactttattcgagtgcaactaatttctggacctcctgctaaacttctccttatagactggccagaactaaaggagtccattccagtgattaatggaagagatttacagaaccctattattgttcaactttgtgatcagtgggataatccagcaccggtacaacatgttaaaataagtcttacaaaagctagcaatttaaaggttaaagccatctataacaaaagtatcatagaaggacctataattaagttaatgattcttccagacccagaaaaacccgttcgtctcaatgttaaatatgacaaagatgcatccttcttagcagggggtcttttcactgatgacagtatcattaaaaacattaatccagcacgtatttccatgaaaatgtggaagctgtctaccagtgggaaccgacccccagcaaatgatgactacgacaaccatactggaattgatttggttggcactataatagccaccattaaaggctctaatgaggaagatactgataccccactttttattgggaaagttagaacacttgaattccccttcgtgaatgatgttaagaagcagcaacaaatggcagcacttacaaaagaaaaggaccaattatctcagtctattgttatgtataaaagtttatttgaagccagccaacagcttcttaatgaaatgaaatgtcaagttgaagaagcaagattaaaagaggcccaattgcgaaatgaactaaaaatacataatattgacattcctacaacacaacagggcataatagctgatcatttagaagtatcacttgtggtggattgggaattgattgtatgatcaaaatgatgtgcaatatattcatgttttccatattgtctttttttaaatttaaaaagtcatgtgctttaatatctttttaaaatttctttttatttagatctctacctcatttccgaaatggaaaattgtattttaaacccattggagatccagtctttgctcgagacttgttaacatttccagataatgtagaacattgtgaaacaggtaaaagacattatggtgactttacttttgtacagatgttaaatttgtgacacaaatctataaattactgataatgaaaatttatattcttattttgcttatcagtcatagttttatcagtttttttagagtacaaataaaattagaacgaatactagcactctttcaaagaaagacttgcaatgtgcattatattttaatatggccaaggaaaatatcataattttcaaaattcatttattgacttttttagtatttggtatgctgttaggagacaccattattttggataatctggatgcggccaatcattatagaaaagaggtatgtatttgatttctttttaaatttgtagacttcagttttaatgtgtatcatgtccatttgatgatacatatacaaacgactagccttttcaaaaccaatttaaattctgcaaattgataagcaacataaaagtaggcaaaacgtaggaatgaatggaccaggatgcaaatttaaatagatgttttggggctacgaaattgtctaagactcaaaacagtgtctgttaggattggaaaaaagtactgtcaggtaattttggtgtaaaatgtaatttgctgtagccctttgtattggttttctagggcagccattaactgatgtgaataatagaaatattactgtcccacaacagactgggtggcttaaataatagaaatttattgtatcacagttctggaagctggagatccaaattcacagtttcaggagggttggttacctctaaagactgtgaatgaaggatctgttccaggcctctccctgccttggagatgaggactctcttccccctgtctcttcacatctgtgcgtgactgtgttcaaatttcccccttgttgtaaggataccagtcatactggattagggcccaccgcagtgacctcatattaacttgattatctcagtaaagaccctatctccaaataatgtcacattctgagggactgggggttacggactttaacatggatttgttgggggctggtcccaaacaaaggtaatgagttatctcaattgatggttcaccatcagctacagatctaactctgttttattctttcctccccttcttactagtctacttgactggtcttgtaaaaagtaaataaataaaagattatagtggagcacagtttagcccatagcacctttgcaggggagtttggtaaaataaatatttcagttatttactgctgctatatatataacactctaaattgtaagtttaaacaacaacatattagtcctctttgtagatttctccaagtgatgttggctagttgaactggggtggtggcagctctaaaatgcctgccttatgtagctggcaactggtacctgttgtcatctggcatcagctggtattagccaggggttcttttggggatgtctgctagggttattgttctcacccatgagggtgagatagagtagggtaatgccatttagagttttagaagcccttttgtctagctaagaggatccaggagggcagtagtttaaatctttcagaggtcttaacaaaggaacatccttgacttgattttaaccctaaagccacatgttataggcagtaccctggattgatctaagccagtatctgtaaatagtgtattctagaatcacggggactatagggatcatctaggatgatctaggacgagtgagaatagatgagagaccttaagctgagaacaaataatggagagctggacatgtgatgcatgcatgtagttccagctacttgggaagctgagggaggggatcatttgaggtcagaagttcgagactagcctggccaacatggtgaaatcccgtctctactaaaaatacaaaaattagccaggcgtggtggcaggcacctgtaatcccaggtacttaggaggctgaggcaggagaatcacttgatcctgggaggtggaggttgcagtgagctgagatcatgccactgtgctctaccctgggggtagtagaacaagancctgtctctttaaaaataaaaagtaggtggggatgggaggagaatnantttttccgtagttagaatattatctaactgttact

SEQ ID NO: 462557 - DNA, 861 bp, Homo sapiens
cgtccttcattatacctaccctttaaaaaaaaaaaaaaaaaaaaggcaataataaattcatcttagtttaggaaaactaaattactgggattttgagcattatatagctaattggaaaatggtatttggcatcttcatgaacgtttccttgtaaacctaatattaagtataatacactgtaccagaaactggctgtgggtgggagagctactatattctggtagtgattagcatttttatatatcccgaattatgaaatagaaacatacccattaaatgttatgataacatggaatcagtttggagacggtgagaagcttgctggtaaggattgaactaactaataggatggtaaccggaagactcctgttcaatgagatatttggatacttactatgtatgagacacagtagtgtgctattatgtgttgaactagctctctgaggaggcatgtggaagtccctgatttgtagcttttgccaatttctatggtgtaagtacttgtatcatggatgatttccagcagtctgtatgaagtccttcatgcctatatgaatgtggtgttcaggagacctggctttcatgacccagtacaagctggttccagcgtatcactaggcacagtgcactgagggttatacagtgatgaattagacaaaccagatagcctttggaaactccagctgagattagctaaaatgctatttcagatatgtatcttaatgaactggcaagagagtcaggattctaagtggaagtgggaacctggagagacaaacagaacactaatgccagatttttgcagtgagaacgtttgccaaactaattgaaccggatagcttcacaggatccgctagatca

SEQ ID NO: 462558 - DNA, 919 bp, Homo sapiens
gacttaggatcgggaatggctgccttctatttgtaccacccaggtctgggagtatgggtggagcacttcccactgttcccaatgctctccaagtcagatccagtgcttgagggtaagccagagaaattttcatttggtcttctggatcttccttttcgtgttggagttccatttaatatccctctggagtttcaggatgaatttggtcataccagtcaactagtaactgatattcagccagttcttgaagcaagtggtttatctttacattatgaagaaataaccaaaggaccaaattgtgtaattcgaggtgttacagccaagggccctgtaaactcttgtcaaggcaagaattataatctgaaggttactctgcctggcttaaaagaagactcacagattttgaaaattagattactacctggtcaccctcgtcgactgaaagtgaaacctgattctgaaattttagttatagaaaatggaacagctttcccatttcaggtggaagttttagatgaatcagacaacataacagcacaaccaaaattgattgttcattgtaaggtaagcttattggaagatatttagattgagtcccattgtagtaagtggcaatgactattttagccacttaatagtaagtcttacacaggatttaagtctgaaacgattattccgtggaaggatttgtgggatcttattgccaatagtttttttttttaatcgtacctaaaccaataaagatgccaactgtgcccagtttcataaatttgtgaataaaagtttactcacctctcctctcttgactccatgcctctcatttcatatatatgaatagaaagacaaaaatgtctttcaggattgggaatgggctgctctgcctatggagtagccattctttattcctttactttaggga

SEQ ID NO: 462559 - DNA, 5281 bp, Homo sapiens
gacttaggatcgggaatggctgccttctatttgtaccacccaggtctgggagtatgggtggagcacttcccactgttcccaatgctctccaagtcagatccagtgcttgagggtaagccagagaaattttcatttggtcttctggatcttccttttcgtgttggagttccatttaatatccctctggagtttcaggatgaatttggtcataccagtcaactagtaactgatattcagccagttcttgaagcaagtggtttatctttacattatgaagaaataaccaaaggaccaaattgtgtaattcgaggtgttacagccaagggccctgtaaactcttgtcaaggcaagaattataatctgaaggttactctgcctggcttaaaagaagactcacagattttgaaaattagattactacctggtcaccctcgtcgactgaaagtgaaacctgattctgaaattttagttatagaaaatggaacagctttcccatttcaggtggaagttttagatgaatcagacaacataacagcacaaccaaaattgattgttcattgtaagttttcaggtgctccaaaccttccagtctatgttgtagattgcagtagttctggaaccagtattttaacaggatctgcaattcaagttcagaatattaaaaaagaccagacgcttaaagcaagaattgaaatacctagttgtaaagatgtggcacctgtggagaagactattaagttgcttcccagtagccatgttgcaagactacaaatattcagtgtagaaggacaaaaggcaattcagatcaaacatcaggatgaggttaattggatagcgggtgatattatgcataatcttatttttcaaatgtatgatgaaggagaaagagaaatcaatataacatcagctttagcagaaaaaattaaagttaattggactcctgagattaacaaagaacacttgctacagggtctgcttcctgatgtgcaagtaccaacatctgtaaaagatatgcgctattgccaggtttcattccaagatgatcatgtgtctttggaaagtgcgtttacagtaagaccacttcctgatgaacctaaacatttaaaatgtgaaatgaaaggaggaaaaacagtacagatgggccaagagcttcaaggagaagtagatcagtacggaaatcagattcaagcattttcaccaagttctttatcttctttgtcaattgctggggttggacttgatagctcaaatttgaaaacaacctttcaggaaaacacacagagtataagtgtaagaggcatcaaatttattccaggtcctcctggaaataaggatctttgttttacttggcgtgagttttctgactttattcgagtgcaactaatttctggacctcctgctaaacttctccttatagactggccagaactaaaggagtccattccagtgattaatggaagagatttacagaaccctattattgttcaactttgtgatcagtgggataatccagcaccggtacaacatgttaaaataagtcttacaaaagctagcaatttaaaggttaaagccatctataacaaaagtatcatagaaggacctataattaagttaatgattcttccagacccagaaaaacccgttcgtctcaatgttaaatatgacaaagatgcatccttcttagcagggggtcttttcactgatgacagtatcattaaaaacattaatccagcacgtatttccatgaaaatgtggaagctgtctaccagtgggaaccgacccccagcaaatgatgactacgacaaccatactggaattgatttggttggcactataatagccaccattaaaggctctaatgaggaagatactgataccccactttttattgggaaagttagaacacttgaattccccttcgtgaatgatgttaagaagcagcaacaaatggcagcacttacaaaagaaaaggaccaattatctcagtctattgttatgtataaaagtttatttgaagccagccaacagcttcttaatgaaatgaaatgtcaagttgaagaagcaagattaaaagaggcccaattgcgaaatgaactaaaaatacataatattgacattcctacaacacaacagggcataatagctgatcatttagaagtatcacttgtggtggattgggaattgattgtatgatcaaaatgatgtgcaatatattcatgttttccatattgtctttttttaaatttaaaaagtcatgtgctttaatatctttttaaaatttctttttatttagatctctacctcatttccgaaatggaaaattgtattttaaacccattggagatccagtctttgctcgagacttgttaacatttccagataatgtagaacattgtgaaacaggtaaaagacattatggtgactttacttttgtacagatgttaaatttgtgacacaaatctataaattactgataatgaaaatttatattcttattttgcttatcagtcatagttttatcagtttttttagagtacaaataaaattagaacgaatactagcactctttcaaagaaagacttgcaatgtgcattatattttaatatggccaaggaaaatatcataattttcaaaattcatttattgacttttttagtatttggtatgctgttaggagacaccattattttggataatctggatgcggccaatcattatagaaaagaggtatgtatttgatttctttttaaatttgtagacttcagttttaatgtgtatcatgtccatttgatgatacatatacaaacgactagccttttcaaaaccaatttaaattctgcaaattgataagcaacataaaagtaggcaaaacgtaggaatgaatggaccaggatgcaaatttaaatagatgttttggggctacgaaattgtctaagactcaaaacagtgtctgttaggattggaaaaaagtactgtcaggtaattttggtgtaaaatgtaatttgctgtagccctttgtattggttttctagggcagccattaactgatgtgaataatagaaatattactgtcccacaacagactgggtggcttaaataatagaaatttattgtatcacagttctggaagctggagatccaaattcacagtttcaggagggttggttacctctaaagactgtgaatgaaggatctgttccaggcctctccctgccttggagatgaggactctcttccccctgtctcttcacatctgtgcgtgactgtgttcaaatttcccccttgttgtaaggataccagtcatactggattagggcccaccgcagtgacctcatattaacttgattatctcagtaaagaccctatctccaaataatgtcacattctgagggactgggggttacggactttaacatggatttgttgggggctggtcccaaacaaaggtaatgagttatctcaattgatggttcaccatcagctacagatctaactctgttttattctttcctccccttcttactagtctacttgactggtcttgtaaaaagtaaataaataaaagattatagtggagcacagtttagcccatagcacctttgcaggggagtttggtaaaataaatatttcagttatttactgctgctatatatataacactctaaattgtaagtttaaacaacaacatattagtcctctttgtagatttctccaagtgatgttggctagttgaactggggtggtggcagctctaaaatgcctgccttatgtagctggcaactggtacctgttgtcatctggcatcagctggtattagccaggggttcttttggggatgtctgctagggttattgttctcacccatgagggtgagatagagtagggtaatgccatttagagttttagaagcccttttgtctagctaagaggatccaggagggcagtagtttaaatctttcagaggtcttaacaaaggaacatccttgacttgattttaaccctaaagccacatgttataggcagtaccctggattgatctaagccagtatctgtaaatagtgtattctagaatcacggggactatagggatcatctaggatgatctaggacgagtgagaatagatgagagaccttaagctgagaacaaataatggagagctggacatgtgatgcatgcatgtagttccagctacttgggaagctgagggaggggatcatttgaggtcagaagttcgagactagcctggccaacatggtgaaatcccgtctctactaaaaatacaaaaattagccaggcgtggtggcaggcacctgtaatcccaggtacttaggaggctgaggcaggagaatcacttgatcctgggaggtggaggttgcagtgagctgagatcatgccactgcactccagtccggggtgacagagcaagactctatctaaaaaaaaaaaaaaaaaaaaaaaaaaaaggcaataataaattcatcttagtttaggaaaactaaattactgggattttgagcattatatagctaattggaaaatggtatttggcatcttcatgaacgtttccttgtaaacctaatattaagtataatacactgtaccagaaactggctgtgggtgggagagctactatattctggtagtgattagcatttttatatatcccgaattatgaaatagaaacatacccattaaatgttatgataacatggaatcagtttggagacggtgagaagcttgctggtaaggattgaactaactaataggatggtaaccggaagactcctgttcaatgagatatttggatacttactatgtatgagacacagtagtgtgctattatgtgttgaactagctctctgaggaggcatgtggaagtccctgatttgtagcttttgccaatttctatggtgtaagtacttgtatcatggatgatttccagcagtctgtatgaagtccttcatgcctatatgaatgtggtgttcaggagacctggctttcatgacccagtacaagctggttccagcgtatcactaggcacagtgcactgagggttatacagtgatgaattagacaaaccagatagcctttggaaactccagctgagattagctaaaatgctatttcagatatgtatcttaatgaactggcaagagagtcaggattctaagtggaagtgggaacctggagagacaaacagaacactaatgccagatttttgcagtgagaacgtttgccaaactaattgaaccggatagcttcacaggatccgctagatca

SEQ ID NO: 462560 - DNA, 5040 bp, Homo sapiens
gttcaattctacacattgattgttcattgtaagttttcaggtgctccaaaccttccagtctatgttgtagattgcagtagttctggaaccagtattttaacaggatctgcaattcaagttcagaatattaaaaaagaccagacgcttaaagcaagaattgaaatacctagttgtaaagatgtggcacctgtggagaagactattaagttgcttcccagtagccatgttgcaagactacaaatattcagtgtagaaggacaaaaggcaattcagatcaaacatcaggatgaggttaattggatagcgggtgatattatgcataatcttatttttcaaatgtatgatgaaggagaaagagaaatcaatataacatcagctttagcagaaaaaattaaagttaattggactcctgagattaacaaagaacacttgctacagggtctgcttcctgatgtgcaagtaccaacatctgtaaaagatatgcgctattgccaggtttcattccaagatgatcatgtgtctttggaaagtgcgtttacagtaagaccacttcctgatgaacctaaacatttaaaatgtgaaatgaaaggaggaaaaacagtacagatgggccaagagcttcaaggagaagtagatcagtacggaaatcagattcaagcattttcaccaagttctttatcttctttgtcaattgctggggttggacttgatagctcaaatttgaaaacaacctttcaggaaaacacacagagtataagtgtaagaggcatcaaatttattccaggtcctcctggaaataaggatctttgttttacttggcgtgagttttctgactttattcgagtgcaactaatttctggacctcctgctaaacttctccttatagactggccagaactaaaggagtccattccagtgattaatggaagagatttacagaaccctattattgttcaactttgtgatcagtgggataatccagcaccggtacaacatgttaaaataagtcttacaaaagctagcaatttaaaggttaaagccatctataacaaaagtatcatagaaggacctataattaagttaatgattcttccagacccagaaaaacccgttcgtctcaatgttaaatatgacaaagatgcatccttcttagcagggggtcttttcactgatgacagtatcattaaaaacattaatccagcacgtatttccatgaaaatgtggaagctgtctaccagtgggaaccgacccccagcaaatgatgactacgacaaccatactggaattgatttggttggcactataatagccaccattaaaggctctaatgaggaagatactgataccccactttttattgggaaagttagaacacttgaattccccttcgtgaatgatgttaagaagcagcaacaaatggcagcacttacaaaagaaaaggaccaattatctcagtctattgttatgtataaaagtttatttgaagccagccaacagcttcttaatgaaatgaaatgtcaagttgaagaagcaagattaaaagaggcccaattgcgaaatgaactaaaaatacataatattgacattcctacaacacaacagggcataatagctgatcatttagaagtatcacttgtggtggattgggaattgattgtatgatcaaaatgatgtgcaatatattcatgttttccatattgtctttttttaaatttaaaaagtcatgtgctttaatatctttttaaaatttctttttatttagatctctacctcatttccgaaatggaaaattgtattttaaacccattggagatccagtctttgctcgagacttgttaacatttccagataatgtagaacattgtgaaacaggtaaaagacattatggtgactttacttttgtacagatgttaaatttgtgacacaaatctataaattactgataatgaaaatttatattcttattttgcttatcagtcatagttttatcagtttttttagagtacaaataaaattagaacgaatactagcactctttcaaagaaagacttgcaatgtgcattatattttaatatggccaaggaaaatatcataattttcaaaattcatttattgacttttttagtatttggtatgctgttaggagacaccattattttggataatctggatgcggccaatcattatagaaaagaggtatgtatttgatttctttttaaatttgtagacttcagttttaatgtgtatcatgtccatttgatgatacatatacaaacgactagccttttcaaaaccaatttaaattctgcaaattgataagcaacataaaagtaggcaaaacgtaggaatgaatggaccaggatgcaaatttaaatagatgttttggggctacgaaattgtctaagactcaaaacagtgtctgttaggattggaaaaaagtactgtcaggtaattttggtgtaaaatgtaatttgctgtagccctttgtattggttttctagggcagccattaactgatgtgaataatagaaatattactgtcccacaacagactgggtggcttaaataatagaaatttattgtatcacagttctggaagctggagatccaaattcacagtttcaggagggttggttacctctaaagactgtgaatgaaggatctgttccaggcctctccctgccttggagatgaggactctcttccccctgtctcttcacatctgtgcgtgactgtgttcaaatttcccccttgttgtaaggataccagtcatactggattagggcccaccgcagtgacctcatattaacttgattatctcagtaaagaccctatctccaaataatgtcacattctgagggactgggggttacggactttaacatggatttgttgggggctggtcccaaacaaaggtaatgagttatctcaattgatggttcaccatcagctacagatctaactctgttttattctttcctccccttcttactagtctacttgactggtcttgtaaaaagtaaataaataaaagattatagtggagcacagtttagcccatagcacctttgcaggggagtttggtaaaataaatatttcagttatttactgctgctatatatataacactctaaattgtaagtttaaacaacaacatattagtcctctttgtagatttctccaagtgatgttggctagttgaactggggtggtggcagctctaaaatgcctgccttatgtagctggcaactggtacctgttgtcatctggcatcagctggtattagccaggggttcttttggggatgtctgctagggttattgttctcacccatgagggtgagatagagtagggtaatgccatttagagttttagaagcccttttgtctagctaagaggatccaggagggcagtagtttaaatctttcagaggtcttaacaaaggaacatccttgacttgattttaaccctaaagccacatgttataggcagtaccctggattgatctaagccagtatctgtaaatagtgtattctagaatcacggggactatagggatcatctaggatgatctaggacgagtgagaatagatgagagaccttaagctgagaacaaataatggagagctggacatgtgatgcatgcatgtagttccagctacttgggaagctgagggaggtttgcttgaacccaagagttcaaggctataggctgtcgtgtgctctgatcatgcctatgaatagccactgcactccagcctaggcaatataatgcgattctgtctaaaaaaataaaaattgttaaagaggtgggggatttgtcccaagtcacactttactaatttatggcagagctagaactaaactggtatgagtaatttttctttgggcctcgttaagaagcaataatagggcaccgggtacagtggctcctgcctgtaatcccagcactttgcgaggccaaggtaggggatcatttgaggtcagaagttcgagactagcctggccaacatggtgaaatcccgtctctactaaaaatacaaaaattagccaggcgtggtggcaggcacctgtaatcccaggtacttaggaggctgaggcaggagaatcacttgatcctgggaggtggaggttgcagtgagctgagatcatgccactgcactccagtccggggtgacagagcaagactctatctaaaaaaaaaaaaaaaaaaaaaaaaaaaaggcaataataaattcatcttagtttaggaaaactaaattactgggattttgagcattatatagctaattggaaaatggtatttggcatcttcatgaacgtttccttgtaaacctaatattaagtataatacactgtaccagaaactggctgtgggtgggagagctactatattctggtagtgattagcatttttatatatcccgaattatgaaatagaaacatacccattaaatgttatgataacatggaatcagtttggagacggtgagaagcttgctggtaaggattgaactaactaataggatggtaaccggaagactcctgttcaatgagatatttggatacttactatgtatgagacacagtagtgtgctattatgtgttgaactagctctctgaggaggcatgtggaagtccctgatttgtagcttttgccaatttctatggtgtaagtacttgtatcatggatgatttccagcagtctgtatgaagtccttcatgcctatatgaatgtggtgttcaggagacctggctttcatgacccagtacaagctggttccagcgtatcactaggcacagtgcactgagggttatacagtgatgaattagacaaaccagatagcctttggaaactccagctgagattagctaaaatgctatttcagatatgtatcttaatgaactggcaagagagtcaggattctaagtggaagtgggaacctggagagacaaacagaacactaatgccagatttttgcagtgagaacgtttgccaaactaattgaaccggatagcttcacaggatccgctagatca

SEQ ID NO: 462561 - DNA, 2965 bp, Homo sapiens
gtgtaggctccctggatgaagagtgttccagcaacacgggatagtatgatccagttagaaatcaggaaaattgatgatcctctgcagcatcacttgcaaaatcaaagtattcagaagagtgtgaaacagtgccatgaacagaatatgtttggaaatattgttaatcagaacaaaggtcatttcctgctgaagcaagattgtgatacgtttgacttacatgaaaaacctttaaaatcaaatttaagttttgaaaaccagaaaaggagctctggcctaaagaactctgctgagtttaatagagatgggaaatccctttttcatgctaaccataaacaattttatactgaaatgaagtttcctgcaattgcaaaacctattaataagtcccagttcattaagcaacagagaactcacaacatagagaatgcccatgtatgcagtgaatgtgggaaagccttcctcaagttgtctcagtttattgatcatcagagagttcacactggagaaaaacctcatgtatgcagtatgtgtgggaaagctttctccagaaaatccagactaatggaccatcagagaactcatacagaactgaaacattatgaatgcactgaatgtgacaaaaccttcctcaagaaatcacagctcaatatacatcagaaaactcatatgggagggaaaccttacacatgtagccaatgtgggaaagccttcatcaagaagtgtcggctcatttatcatcaacgaactcatacaggagagaaaccccatggatgcagtgtatgtgggaaggccttctctacaaagttcagtctcactacacatcagaaaactcatacaggagaaaaaccttatatatgtagtgaatgtggaaaaggcttcattgagaagaggcgtcttactgcacatcatcgaactcatactggtgagaaaccctttatatgcaataaatgtgggaaaggcttcaccttgaagaacagtcttatcacacatcagcaaactcatacaggagagaaattatatacatgtagtgaatgtggaaaaggcttttcaatgaagcactgtctcatggtacatcaacgaactcatactggagagaaaccttataaatgcaatgagtgtggaaagggcttcgctttgaagagcccactcatcagacatcagcgaacacatactggagagaaaccctatgtatgcaccgaatgtcgaaaaggtttcaccatgaagagtgacctcattgtacatcagcgaactcatactgcagagaagccatatatatgcaatgattgtggaaaaggcttcactgtgaagagccgccttattgtgcatcagcgaactcatactggagaaaaaccctatgtatgtggtgagtgtggaaaaggctttccagcaaagatccggctaatgggacatcaacgaactcatacaggagagaaaccttatatttgcaatgagtgtggaaaaggcttcactgagaagagtcatctcaatgtacatcggcgcactcatacaggagagaaaccctatgtatgcagtgaatgtggcaaaggcttaactgggaaaagcatgctcattgcacatcagcgaactcatactggggagaaaccttatatatgcaatgaatgtggaaagggcttcaccatgaagagtactctcagtatacatcagcaaactcatactggagagaagccatacaaatgcaatgaatgtgataaaaccttcaggaagaagacatgcctcatacaacatcagcgatttcacacaggaaagacttcctttgcatgtactgaatgtggaaaattctctttgcgcaaaaatgatcttattacacatcagagaattcacacaggagagaaaccgtacaaatgcagtgactgcgggaaagccttcactacaaaatcagggctcaatgttcatcaaagaaaacatacaggagagaggccctatggatgtagtgattgtgggaaagcttttgcgcacttgtctatccttgttaaacacaggagaattcacaggtagtcattttgggaaagcctcttgccagatgtaggcccttaagatatctgcaaagaagagtaatttcatgaatgcagactacatggttgtttatttagtgatcagttacttcatgttttgtgtcagagaaaacatgtacaaaacatttgagaaaatattttaggacattatgtctaaaaattgtatactgagaaaaatcctatgaatgtggcagactataaaagcctttggtgggaagataaaccccctcagaagtgatcatagatcatgaataaactactaattcgtggaaatgtaataattataggaacgtctttgcccaaaaataaaacttcaacagattgagagagttcacactggagaaatactttcctctggcaaacccctgtggcagggttttcagtaaaatgttttgcctcatcgtgtgctaggaaataatgcagaaaaaacttatgaaaacattcaatgtagaagacttttaggaaaatatcagagaatttaatgaaggaaagaagccttggcaaaatgatggatgagagctttctgtcacaattctaaccttaacagataatatgcctcatgtgcatttgggaacaggatagcttgagccatattcctagttgccttgtcactgattttatacattttaaattgtgacttcctctaatcacgaactaaaatttaatattgtatataataccggagtattttatgcctgcctcattttattatatgattagctcctgcatttctttggttctaagtttgtgttatttcagaataactaaagtacttcagaatgaaactggatacagtatattcagttcataagtgtaattgaccatacttgaatatgtttaagtttataagtaacatcaggtgttatgaaattaatataaataagatgtttttttttatactttctcttaaacttagatctatgatctatttt

SEQ ID NO: 462562 - DNA, 564 bp, Homo sapiens
ggtgtattaaacacatttcaacttgcaatactttcaacctatgatgtactcaccggaatgtaacccattgtaaactgaggaacacctgtactcaccccactggaagggatgtgggaggaaggtcaagcgcctcttccaggtcagaaggggcagaggttggatacaaaccaggcagcctgggtccatggtaaaagaacctccactaagtgaggctggtctccagagcgagtcaccccctggctcccagacagccacacctggtgaaggagaatgcggtgacaatggagagaacccccaggttcagtaagctgcctcgtctggctcactacacctagctgtggggagatctcctcgtcagtcacctcagcctttggcgcacagaagggtccagggtcccctgctcagaggctaacactggccgaagagaaaggcaatttcagttggggtgactgtggcaggaaggggctcactctggccccaccaaggtgaggtggggaccaagtgatagagccctgatccacccactctctgaaacttctttgctaataaaacattcctactaaa

SEQ ID NO: 462563 - DNA, 2681 bp, Homo sapiens
agcccaggcgcctggacatccagcgagtccctggccagtgacgacggtggagcaccgggcatactctcccagggcgcgccctcggggctcctgatgcagccgctgtcgccgcgcgcgcccgtgcgcaacccgcgcgtcgagcacacgctccgggagaccagccggcggctggagctggcgcagacacacgagcgcgcgcccagccccggccgcggggtcccgcgcagcccacgcgggtccggccgcagcagccccgcccctaaccttgcccctgcttcgccccggccctgcccaactgcagctggtgcgcgagcagatggccgcggcgctgcggcgcctgcgcgagctcgaggaccaggcgcgaacgctgcccgagctgcaggagcaggtgcgcgcgctgcgcgccgagaaggcgcggctgctggccgggcgcgcgcagcccgagccggacggggaggctgagacgcgcccggacaagctcgcccagctgcggcggctcaccgagcgcctggccacctccgagcgcggcggccgtgccagggccagcccccgggctgacagcccagacggcctggctgcagggcgcagcgagggcgcgctccaggtcctcgacggggaggtcgggagtctcgatgggacgccccagacccgggaggtggccgccgaggccgtgcccgagacccgagaagcgggtgcccaggccgtgccggagacccgggaggccggcgtggaggctgcccccgagaccgtggaggcggacgcgtgggtgaccgaggcgctgctggggctgcctgcggccgccgagcgcgagctagagctgctgcgcgccagcctggagcaccagcgcggggtgagtgagcttctgcggggccggttgcgggagctggaggaagcccgcgaggctgcggaggaggcagcggcgggggcccgggcccagctacgcgaggccaccacccagaccccgtggagctgtgccgaaaaggccgcgcagaccgagtccccggcagaggcgccctccttgactcaggagagctcgcccggatccatggacggagacagggccgtggcgcccgcgggcatcctcaaatccatcatgaagaagagagacggcacacctggtgcccaacccagctccggacccaagagcctgcagtttgttggggtcctcaacggagagtgagcgcctttcccctcctgtggcagcttctgccgggacatagactggggttggaaccccagctctgcccctctactggcagcgtggtctgggcaatcctcagtttcctcatcgttaaatgggaacggccacacccacatcgcaggactccagaacgagcccacaggggaggtttagcagacacctcccaccctgcccccaggtacgagagctcctccagcgaggacgccagcgacagcatggcgacagcgagaacggtggcgccgagcccccgggtagctcctcgggctccggggatgacagcggcgggggatccgactcgggcacccctggccctcccagcggcggggacatccgggaccctgagcccgaggcggaggcagagcctcagcaggtggcacaggggaggtgcgagctgagcccgcgtctgagggaggcgtgcgtagcgctgcagcggcagctgagccggccccgcggagtagccagcgacggcggcgcagtgcgcctcgtggcccaggagtggtttcgagtgtccagccagcggcgctctcaggcggagcccgtggccaggatgctggaaggggtgaggcgcctgggacccgaactgctggcgcacgtggtgaacctggcggatggcaacgggaacacggccctgcactacagtgtgtcccacgggaacctggccatcgcaagcctgctcctggatacgggggcctgcgaggtcaaccgccagaaccgagccggctactcggccctcatgctggctgcactcacctctgtgaggcaggaagaggaggacatggctgtggtccagagactcttctgcatgggtgatgtcaatgccaaggccagtcagacggggcagacagccctcatgctggccatcagccatggccgacaggacatggtggcaaccctactggcgtgtggggctgatgtgaatgcgcaggatgcggatggggccacagcgctgatgtgtgccagtgagtatgggcgcctggacaccgtgcggctgctgctcacccagccaggctgtgaccctgccatcctggacaatgagggcaccagtgccctggccatcgccctggaggctgagcaggatgaggtggccgctctgctacatgcccacctgagctcgggccagcccgacacccagtctccagagcgagtcaccccctggctcccagacagccacacctggtgaaggagaatgcggtgacaatggagagaacccccaggttcagtaagctgcctcgtctggctcactacacctagctgtggggagatctcctcgtcagtcacctcagcctttggcgcacagaagggtccagggtcccctgctcagaggctaacactggccgaagagaaaggcaatttcagttggggtgactgtggcaggaaggggctcactctggccccaccaaggtgaggtggggaccaagtgatagagccctgatccacccactctctgaaacttctttgctaataaaacattcctactaaa

SEQ ID NO: 462564 - DNA, 503 bp, Homo sapiens
ggcagcctgggtccatggtaaaagaacctccactaagtgaggctggggctgaatcccacgtttcctgcctcaaggagattgcagcaggcccccctcttttcccctctctccagagcgagtcaccccctggctcccagacagccacacctggtgaaggagaatgcggtgacaatggagagaacccccaggttcagtaagctgcctcgtctggctcactacacctagctgtggggagatctcctcgtcagtcacctcagcctttggcgcacagaagggtccagggtcccctgctcagaggctaacactggccgaagagaaaggcaatttcagttggggtgactgtggcaggaaggggctcactctggccccaccaaggtgaggtggggaccaagtgatagagccctgatccacccactctctgaaacttctttgctaataaaacattcctactaaacttgtgttttgtttggggtagagggtgcaatcgacaaacacgacccccc

SEQ ID NO: 462565 - DNA, 2478 bp, Homo sapiens
agcccaggcgcctggacatccagcgagtccctggccagtgacgacggtggagcaccgggcatactctcccagggcgcgccctcggggctcctgatgcagccgctgtcgccgcgcgcgcccgtgcgcaacccgcgcgtcgagcacacgctccgggagaccagccggcggctggagctggcgcagacacacgagcgcgcgcccagccccggccgcggggtcccgcgcagcccacgcgggtccggccgcagcagccccgcccctaaccttgcccctgcttcgccccggccctgcccaactgcagctggtgcgcgagcagatggccgcggcgctgcggcgcctgcgcgagctcgaggaccaggcgcgaacgctgcccgagctgcaggagcaggtgcgcgcgctgcgcgccgagaaggcgcggctgctggccgggcgcgcgcagcccgagccggacggggaggctgagacgcgcccggacaagctcgcccagctgcggcggctcaccgagcgcctggccacctccgagcgcggcggccgtgccagggccagcccccgggctgacagcccagacggcctggctgcagggcgcagcgagggcgcgctccaggtcctcgacggggaggtcgggagtctcgatgggacgccccagacccgggaggtggccgccgaggccgtgcccgagacccgagaagcgggtgcccaggccgtgccggagacccgggaggccggcgtggaggctgcccccgagaccgtggaggcggacgcgtgggtgaccgaggcgctgctggggctgcctgcggccgccgagcgcgagctagagctgctgcgcgccagcctggagcaccagcgcggggtgagtgagcttctgcggggccggttgcgggagctggaggaagcccgcgaggctgcggaggaggcagcggcgggggcccgggcccagctacgcgaggccaccacccagaccccgtggagctgtgccgaaaaggccgcgcagaccgagtccccggcagaggcgccctccttgactcaggagagctcgcccggatccatggacggagacagggccgtggcgcccgcgggcatcctcaaatccatcatgaagaagagagacggcacacctggtgcccaacccagctccggacccaagagcctgcagtttgttggggtcctcaacggagagtacgagagctcctccagcgaggacgccagcgacagcatggcgacagcgagaacggtggcgccgagcccccgggtagctcctcgggctccggggatgacagcggcgggggatccgactcgggcacccctggccctcccagcggcggggacatccgggaccctgagcccgaggcggaggcagagcctcagcaggtggcacaggggaggtgcgagctgagcccgcgtctgagggaggcgtgcgtagcgctgcagcggcagctgagccggccccgcggagtagccagcgacggcggcgcagtgcgcctcgtggcccaggagtggtttcgagtgtccagccagcggcgctctcaggcggagcccgtggccaggatgctggaaggggtgaggcgcctgggacccgaactgctggcgcacgtggtgaacctggcggatggcaacgggaacacggccctgcactacagtgtgtcccacgggaacctggccatcgcaagcctgctcctggatacgggggcctgcgaggtcaaccgccagaaccgagccggctactcggccctcatgctggctgcactcacctctgtgaggcaggaagaggaggacatggctgtggtccagagactcttctgcatgggtgatgtcaatgccaaggccagtcagacggggcagacagccctcatgctggccatcagccatggccgacaggacatggtggcaaccctactggcgtgtggggctgatgtgaatgcgcaggatgcggatggggccacagcgctgatgtgtgccagtgagtatgggcgcctggacaccgtgcggctgctgctcacccagccaggctgtgaccctgccatcctggacaatgagggcaccagtgccctggccatcgccctggaggctgagcaggatgaggtggccgctctgctacatgcccacctgagctcgggccagcccgacacccagtctccagagcgagtcaccccctggctcccagacagccacacctggtgaaggagaatgcggtgacaatggagagaacccccaggttcagtaagctgcctcgtctggctcactacacctagctgtggggagatctcctcgtcagtcacctcagcctttggcgcacagaagggtccagggtcccctgctcagaggctaacactggccgaagagaaaggcaatttcagttggggtgactgtggcaggaaggggctcactctggccccaccaaggtgaggtggggaccaagtgatagagccctgatccacccactctctgaaacttctttgctaataaaacattcctactaaa

SEQ ID NO: 462566 - DNA, 473 bp, Homo sapiens
ttggatagatatgtaaagagatttattatgggagttggctcatgcaattgtggagtcctagaagacccaccacctcctgtctgcaagctggagaaacagcaaagccagtgacgtaattaagtctgaatccaaaggcataagatcaaggagaactgatggtgtaagtcccaaagtccaaaggcttgagaaccaggagctctgatatctaagggaagatgtcccagctccggaagacagaattcacccttcctctgccttttgttttatttgagccctcaatgggctggatgatgcctattcacattggtgagggtggatcttctttactcagtctactgattaacacctgttccagaaacgccctcacaggcacacccagagatattgttttcccagctatctgggcaccccttagcccagtcaaatcaacacataaaattaatcatcataggctctaagttctacttagctcc

SEQ ID NO: 462567 - DNA, 2269 bp, Homo sapiens
tgtgtgctgacagtcatgaccctttggacgtctgcatgtttgtctctggggatcttgacagttaaaagtaacacagaacacccagatcaggctccacaagcctccccagcctcaggcattgctgatgaagaaaaagtaaagtcttctgtgcatctctggaatcagcttctaaagagtgacccctgggaggcaagcctgatgtgtggtgctcaaagtcgggacagtggttacactggaatggccatcaagggtccccttcctgtggggacctggattgacgatgcctgtcagagtcctggaggggtgggttctgcagcttcgccccatgctgacatgcgaatgtccaggcctgcctttctgctgcagggcaatgctccaggttacaacatcgacaccaagcagtttgttgagaaaactttggacctcatgagctgggcaagagcggcctggcaggtggtaggagagcagcctgtccatgcctcagctgtggctccactggctctgtgactgtgcagattttctaacttttgaagacctctgtttggatatccataaaataggtaagatggtgctaatacctacctgtgatgttgtgaagatttaatagcataatacttaaaagcactttgcatacattagcaaagtgcctaaatattagttatttggcggaggctattaaccagtgtgctatgaggtgcaaagtaagttgttaccaataactcaaagaactccagtttgcaaatgttttacttttacttaagagaatctttgcgggagaattaaaaccaattaattcccaccactggccaagagctcatgctgtaattatccaagacagaatagctcaacagaaaaccaagtcatgcaattctgagcacttgtccttgggatgccactttggggctcccatatctgaaatcattttgttctcagtccacctgtgtgacatttctgtcctgctcagccacgggttcacaataatcaagggaatgacccaagggattcacttcttccaagcagccgatgcctttggaagttatgttgacattgcttgtttaaacctagggcaagaaatcctttctctgccagacctgactcttcaggcacactcctcagtttggagacgtgacttgccatgtagtactgagagggaaaacaggccagaaacagccttgttgaaaacttcttttctgcttagctgccctctgaacagtcaccataaagattgtgaggtgctggagccagggatgacctcataaagccctttgctaaatacttagtgagctggtactgtgggccaggcactgtgctcatcatgaacaaaaccaaggcagacaacactgtcattaatggagcttatcatgtaatacggaagcctgggataagcaacaaattacacaagtgacaaatgtgatgagtgctgtgaagcagagtgcggggtgcccagggaatcagcagagccctggaggataacagcctgagctccaggaaggaagtttcttcaagtgtaaaatgagagattggatggatcagaagattcaggcctccttgaagatccccatgggtgaaccccaacacacaggctattcagccagcagccccaagtcctttatgaaaagccaaggttgattgaaactctcccttctcaggagagaaactagaggcaaagcttcctcatcagcagagataaacttgacaggagccaattcaggtaggaccatggccaactcagggctcgtgcttgatcgaaggggatctgtgttagtcagcattctccagagaaatggaacccattggatagatatgtaaagagatttattatgggagttggctcatgcaattgtggagtcctagaagacccaccacctcctgtctgcaagctggagaaacagcaaagccagtgacgtaattaagtctgaatccaaaggcataagatcaaggagaactgatggtcacctgtgtatacttccattatggcatgtaacatgctggcaagaaattgattcattgggttgtgtcttctcagctgcctgaagaatgaaatcatatactctagtttcatatgcccagcattgtacacaacttgacacatcacagcagctctaggaaagcacataggctgacaactgagtgaacaacccactgactgtgtgtcgttcagggttgggaaagcaagggcaggtctctgtgccccatctctagcttttcctcaacttaggctttataaacccttgcatcaaaaaataaaagctaaggctaattgtttcaa

SEQ ID NO: 462568 - DNA, 682 bp, Homo sapiens
gcaacacagcaatcatggctgtccccagtaattttgtcccctctcagtttcaacagtcttctcttggctcttcagataatggggtctgccaccaatacaccaactgtctcaagtcaggtgctgaaacaactcaaaccaggaaatatgaagacatagatatatctcatttaatgctgatacctttaacttttatgagctcagttccctcaacaaaaataagtggagagttgtacttgagaaagaatggtggcagagtacatgcatggaagtgctaccatagctgctctgaaatcagaggaaagtggaattataagaagaccccatctgacaaggctcataaaggagagcaactcttatggaatacatccaagatatatacgtctttgaagaaagacatcactcaactgtgaaagatcaccatgacccctgctttaatttcatcaaaaaacttagtccatcagctcagttaccctttagccttgcatgggaattgactcagagcttctgcgagatcagggtgaatatgaattgtttagcttcagatgatcattcctaaagtgaaaactcctggaacttattggcaaaaaagagaactctttgctatttctaatataaatgtgttattagaattggtctactgttctaataaataacagtaatggaaatggattgaaataatgaa

SEQ ID NO: 462569 - DNA, 1611 bp, Homo sapiens
ggctcaagtcagcccacagcatcccccatacagccccacctggtctgcttcaagtcctacctggcccctggcaagtcccacttggtgacatcttgtgcctgggtccttgagggctgccccagatccgcgattgtcctggggaccggtagttcctccccggatgccagcaaagctccctccagcctccacgcctgcacagtctccagtatgccttcaacagccattagtcaccctcttgtcccccacaagaacaatgttggggagtggggggattgacactcacacagaggatcccctggagactgtcatgagccctgggaaggaggagagcagtcctctccagcaggctgcttcgggcgtgctaatggctggagccaccgagggacaccaggagtttcccccctgctcgccctgcgagcggtcaagactcaggctagcccaggccatccgaaaggctaaacagcgggatgagcccaggggacggtcactgctcacccacgatcaggcatgtcctcgtgtcaccgatgatgaagcggccctagctctggagacaaaccagcaggcctgggtgttccccccacagagcacagagagcagcaggcgctgtgaggggcagcctgggtgggaaagagggaatggagggaggggtgcagaccgcagagaggccgctccaagctgaaaaatggggcacatcagccaaagttgtctttggtgggtatggagaggatgggggtgccctacagctgagtgctgaggctggaggctgcattgacccccaggtagaaggggcaccccaccgccacccccaaatccccaggtactccctcggcttcatttctgtgccctgccacataaaacaacacagccctgacgtttggaatgatctaaggctattttagacaaaaggggaagttatattttggggaatgctgcatctaagagaagagtgaaattatggggtatattttaagcaccataaaaaggtctccttggaatttggagaaagttgattaaaagctgaagtgtaaggtctgggacacccctgccacagccctgccctccccaaatgttctgggggttttactgctccagggttatggagacaggggacccatctgtctatcggcgatgtcagcctcaatgtttggggcgggagtgtgggcaggcatcaatcagccacagggcctggctgccaatttgtttcctagtgattatccaggatagatccgatttctgcaggcctcgccctgggcagctcagtccccaatgtcacagtgcagttgccacctaaggtttccttctgtgtgacttggccacagcaagccagaaccagctcctgaaaccagtcccctcgagaaccccattcccgggagtgcccagaggcagcttggcatcttctgcccagctgctgactggccctgtgaccccgacacgtggttcctcctggtaaaagaaagaaagggatgacttagcagtggtcaggcaccagcacccaacaccttccctagagggggttctctgtaaatcccggacagtatcatcacctctttaagggagagtgaattacggccacctctgtctttgtcagtgtcattacagtattctcagccc

SEQ ID NO: 462570 - DNA, 1417 bp, Homo sapiens
  misc_feature (1403)..(1403): n is a, c, g, or t
  misc_feature (1405)..(1406): n is a, c, g, or t
  misc_feature (1408)..(1408): n is a, c, g, or t
  misc_feature (1410)..(1411): n is a, c, g, or t
  misc_feature (1414)..(1415): n is a, c, g, or t
actcggaaagcagattgtggagctgactatggggaggcctgggtcctgccacagccattttcctgccaagggaggctgtgactgagcgggctacccagcctgggaaactgctttttccatggaactgtgcaacccacagttcagaagattccacttgtgaacccttgccactggagcctgagatctgaaccctggaggttgaaggtatgccagagcgtggtcattgaggacaagttgatgagagattcccgagtacatctatggtcagccttgcgaggacattacaattcagagatgtggccatagaattctctctggaggagtggcattgcctggacacagcacagcggaatttatatagggatgtgatgttagagaactacagaaacttggtcttccttgatccagtttttcaagaaaatcttcagaatttgtgcatttagaaaagaattacttccgtgcctcatgcctgtaatcccagcactttgggaggctgaggcgggggattacctgaggccaggagcttgagaccagcctggccaactaacgaaagtacaaaaaattagctgggggctgtggcacacacctgtaaccccagctacttaggagggtgaggcaggagaatcgcttgaacccaagaggcagaggttgcagtgagttgagatcatgccattacactccagcctgggtgacagagcaagtttccatctcaaggaaaaaaaaaaaagaaaaaaatttcttcaacatgtttcatctaaatataaactttccacatttctgaaatgtggcaaagctttcaaccagtcctcaaaccttactacacataagaaaattcatactggagagaaaccctacaaatgtgaagactgtggcaaagcctttaacttctcctctaaccttactacacataagaaaattcatactgaagagaaaccctacaaatgtgaagaatgtggcaaaaccttcagttggtcctctattcttattacacataaaatgattcatactggagagaaaccatacaagtgtgaacgatgtggcaaagcttttaaccattctgcaactttttttcgcataagaaaattcatattggagggaaaccatacaatgacaccccttaaatttaaactagaccttccaagcaatagaccaactcttcctgagggtaaagggcccctaactcccatggggaccttctttggtggctccccaggaagtaagaaaatgggaactgtactgcaaaaatctatggcagcagtgcctgctgtggtgggggacaattgttgtacattttatggaggctgtgaaggccccgagctctggaagcccacactatttatcagtgatcagacaaataagcaggtggtaaggacgtgcggatgtggggtaaacaggtgaggacntnngnanntcnnta

SEQ ID NO: 462571 - DNA, 848 bp, Homo sapiens
actgcacacggttttcagcctcatgcctccgtggaacctgcctgtcaggcgggcacctggaatctcaagcaactttctcaagaagggccaaggcgttatcgtcggccacgcacaagatttctctccaaacaactcacagcattgagagaattgcttgaaaagaccatgcacccaagtttggctacaatggggaaactggcttcaaagctacaacttgatctatccgtagtaaagatctggttcaagaaccagcgtgccaaatggaagaggcagcagcggcagcaaatgcagacacggccatcactagggccagcaaaccagacaacttcagtgaagaaggaggagactccctcagccataactactgcaaacattcgtccagtaagtcctggaatctctgatgcaaatgaccatgatctacgtgagccttctggtatcaagaatcctggaggagccagcgcctctgcgagggtttcatcctgggattctcagtcatatgacattgaacagatatgtctgggggcttcaaatcctccttgggcctccactctctttgaaatagatgaatttgtaaagatctatgacttgccaggggaagatgacaccagcagcctaaatcaatatctttttccagtatgccttgaggactgcatcctaaatcccctagctctggaaatggaagggattaggcatatgtgagtctccctagctcacagagaaaaaggtggttttaagcaggcacacaagcacttcagggctagccttcctccaccacactcccccaaccagagcagtgcagagaaggggtcaaaatgtacagctcccagttactcctcaaaaaggatttg

SEQ ID NO: 462572 - DNA, 3458 bp, Homo sapiens
ctctggttttccacacagcccggcagcgcgtctggagttgttcgttcctctcgatggccccgtggtcttgctggcttcaggagtgaagctgcagatcttctcggagcccagctggcttcacccagtggatcccgcactggggctgcaggtggagctgcctgccagtcctgcgccatgcgctcgcactcctcagcccttgggcggtcgatgggactcggcgccctggagcagggggcggtgctcgtagggaaggctccgcagcgccggtgggctggcattgctgggggaccctccgcagcccctggcccgggtgctaagtccctcattgcccggggccagcagggccggccggctgctccgagtgcggggcccgccaagctcacgcccatccggaactccagctggcccgcaagcgccgcgcgcagccccggttcccgctcgcgcctctccctccacaccttcccgcaagctgagggagtgggctccggccttggccagcccagaaacgggctcccacagtgccgtggtgggctgaagggctcctcaagtgccactaaagtaggagcccaggcagaggaggtgccgagagcaagcgagggctctgaggactgccagcacgctgtcacctctcaccgtaagtctctgtcagacatttctttcaaagactggggacaggtgggttctcactgtaatttatcttggcactgacaacaggagctggtttggctgcttgtagacaaggaggtcctgtgataattttacaaaatctttctgagaacatggtatgtgactgcctccctcacccagctgcctggttctgttttaactcacttcagttagccagggagagtccaggtcgtctgttgactagtgatgcttaaacattgttcaggcctcttttattcgtatgcaaagattttggcaaggtttagtccttggagacacttagatttaaaacaaatcctgttgaaacaactcttcatagcattttaatactgcagtgacacagtgtgtcaaatacagtgtaaagtgggttccatgggactaacaggttcttctggtgagcccaagtcatgctctgtggcttggtcagcagatattctgggattgaatggctaggtaagggctcctgtgatatttgaaaactcacagaaagctgtatggcaatcatattggggaatttaagaaacaaaataattgcagactgaaaatagcattttaaatgttttctttcaataaataaaagttaatggagtgtttccatgtcaagcattttctgactcattattatgtctagtactcttcgttacatgaactgagtggctgtaagattaaacaagtggattttcaatggatatacagacaggatcaaaatttttaaggactgccaaatttctactcattcattgtaaaagtataatgcatattttaggtagatttttttttttttggttttgtttttgcacttgcatggcaattaaggactacaatttagcaggagtgtgagaatttgattggaaattttattttaatcatgtatttttttaattttgtaatgctgtatgtagaaatgacaagataataattttctctttatctaatgacaagctcattttcacatgatgatttcagtatatcttataaaatatcatgaaggagatatacaaacacttagaactattgcaaataaacttttgtgtaaatttatttggaaagtgtaatgattataatgagaatgtgattgacgattcaggtcatatccttgaaaggaagcatcatattcaaaacagatgcttacatctgatttcaactctagtttttattggaagtgtttattagtagaaattgggcaaaaatgtcattttatattttacatctaccctttcacagtctgatatcaagcagtttagtagttcccaaagggtagtgttgttttgagagctggttaacaatgaaaatatatgaggagcctgggaattcaaatttatggtaagtttctcaggttatcttcatgtacaaaatttgaagacaactgatttcaaaagtagatcattctccagtttggtcataaaatcatgattaatttttaaatttctttctctaggaacttcaaaaattctcatgtcatattgataaaatgcttacaaacaatagcacaaagaccaaacttataaggagaaattgacaacggttggttcacgcaaactcaaaataataattcaaaaagcaggtcaaaaggaagattggcaacctgcagcatattatacaaactacagctcttgctttccatgaaatgcttctccttatatttacaatgtaaaaggactacattggcccaatcttcaagataaataacaaaaccgacaattttttaagcacttgcctaaacaggtggtgatgaaaagcagaaactatatttacaatactaaacaatagaaaaatactcaaagtaaacttaggatggttaacagaatctgagacctggcactgattaaaagaagggtagatatgacttccagccctggttcttggctatattgggggttaaaaaaaaaaaaaaaaaagctctacaagatctgtatctttcacttcagcccaccagagggagagcagataggagtctgttttgacttaagcaatagctgggaatatagagcatactctcacccaatatcccctgaggctttatcacttggtcacttcatggagtatttactatttggacataggtttattatgcctagatgtgaagacaaattcaaaagaacaggattaaatattaatcctttatatggagttactttttgagcctttaggatattctgaataatattcaatagatgacattctttcaacattttaaagaaattaagaagatataatttctttgcacagaatgcttatctctttattctttgtttaaacgtaacaatcgtttaatgtagaatggataacttcacaatatatagaagtgagatgtacaagtctcttgctcatgtggtaaaggtgccagtttaccaggatgtggtacaactagtaacttcttaggatccatattccatgatatgcctcatgctgtatcctcaagagtttatggctttcttacaggttttggtctctggaagataccttttctaacagctgcgtagatgtagaaaaaggatgctaatgtaaaaatttgattaatacaatgaaaattccttgattatttaatggtattaaacaaaagttaatttcttagctttgacaaatgaaccatgtttgtgtaaaatgttaatataagaagagtttggaaaaggtacatgggaattctctatactatcttcatgaaacgctaatctaaaattatttcaaaacttcaaaattgtttaaaagtgtatcatgtgacacgaaagtaaatttacttgggggattttcagataattttcttcaatatagatgggaacagattttcacag

SEQ ID NO: 462573 - DNA, 1568 bp, Homo sapiens
gaaatttcagagcaccaagaataaagagaaaatcctaaaaagcgcctagaggaaagccagatgtcatgcaaaggatcaagaatccaagcagctttgggtgtgcaaaaactagcagacaacagagcaaggctttcaaagttccaaggaaaagttattttcagctagaattgctaaataacaaaagaccaaacatgaaggtgcaataaagatataatcggatgttcaaggactccaaaacttaacttcccacataccctttctcagaaagctactggaggatgtgttccattcaaacgaggagggtcttgctgtgtcgcccaggctggagtgcagtggtgcaatcatgactcactgcatccttgaactcctgggctcaagcaatccttccacctcagcctcccaagtaggtgggaccacgggtgcacatcaccacatctggctaattaaaaaacaaaaaacaaaaaacccccacaaacatatatatatcctcatgctgccagggcccaccattgccacctctgccacgcgacctccaccagcctccaatgaggtctccacctccgtcctctcctccaccatcactcctgcaccaccaatgtcagtgctatcccatcacaccctccatatcacctccaactccagcacctcctcctcctccaccacctccagcacctccacctcctccttcatcacctcttccttcaccacctccacctccatcacctccacctccagcacctcttccttcaccacctccaccgccacgacctccacctccatctccatcacctccacctccagcatctcctcctccatcacctccacctccacttccaccacctccacctccagcaactccaccacctccaccgtcacctccacctccacttccacctccaccacctccaccatcacctccacctccacttccacctccattacctccacctccagcacctctacctctacctcctccaccttcacctccaccacctccacctccaccacctccacctccaccacctccacctctacctccgccacctcctccatctgagggtttgggtcctgacaggatgcccactccatgcagccagccctgcacctcctccaggaccctggggactgaggccctgattccaggagcaatcacccccgagaggctctgatctgaggactccagttatccctgctgttcccgctgtgtccagcagagggcagccgtccccgccccaacccaggaaagggcgggggctgtaggctgtgtctcatgcgggggaaagggggctggactggggggagaccctcaagttccggatgaaggcgtttcctgcagaccccttgggatttggcccacacacaccagctctatcccacttcctgcctttctaaaagttgctggggacagccaaccaccccggggcccaagagggtggtctgacctgctgccctcttgggccctgcctggtgttggaccatcttagcctcagtttccccaactgtaagatggtcttgatcatggttgggctgtggggaagggtctagccagaaaagtcctgaatgaatac

SEQ ID NO: 462574 - DNA, 3148 bp, Homo sapiens
cagcttaagtgattaccagctaacgctctcacttggtttatacttacctagctatgactccctcctggccattgcaccaaaccctgtcttccatacaccagttgcccaggccacccctagatatgctggccccctccagtccctggaacacaggacaaaccagcttctccccttgagctgggctgtggttggtctcccatccagaaagcctctgcctctccctccagcaccttgtctaccagtcagcatgcaacaaacctgtgccaaaagcctactgagcgtccagtaccagacattcctggcccagtcactatgggccctgttcacctcctctctggccatctccctggtgtttgccgtcatccccttctgccgcgacgtgaaggtgctggcctcagtcatggcgctggcgggcttggccatgggctgcatcgacaccgtggccaacatgcagctggtaaggatgtaccagaaggactcggccgtcttcctccaggtgctccatttcttcgtgggctttggtgctctgctgagcccccttattgctgaccctttcctgtctgaggccaactgcttgcctgccaatagcacggccaacaccacctcccgaggccacctgttccatgtctccagggtgctgggccagcaccacgtagatgccaagccttggtccaaccagacgttcccagggctgactccaaaggacggggcagggacccgagtgtcctatgccttctggatcatggccctcatcaatcttccagtgcccatggctgtgctgatgctgctgtccaaggagcggctgctgacctgctgtccccagaggaggcccctgcttctgtctgctgatgagcttgccttggagacacagcctcctgagaaggaagatgcctcctcactgcccccaaagtttcagtcacacctagggcatgaggacctgttcagctgctgccaaaggaagaacctcagaggagccccttattccttctttgccatccacatcacgggcgccctggtactgttcatgacggatgggttgacgggtgcctattccgccttcgtgtacagctatgctgtggagaagcccctgtctgtgggacacaaggtggctggctacctccccagcctcttctggggcttcatcacactgggccggctcctctccattcccatatcctcaagaatgaagccggccaccatggttttcatcaacgtggaggtgctggctgcagtgtgtggagcccatcccagccaacaactggctatgagcgtgaggaaagccagtgctggccctggtcctcctgtgtttaccttggtgcccagctgctcagagccctccagtcagtggaaagctgtggaggccagggatcccacaaccgttggcgtggtggtgacgttcctggtgctgcttattttctcctacaacgtcgtcttcctgttcgtggggacggcaagcctgggcctgtttctcagcagcaccttccccagcatgctggcctacacggaggactcgctgcagtacaaaggctgtgcaaccacagtgctggtgacaggggcaggagttggcgagatggtgctgcagatgctggttggttcgatattccaggctcagggcagctatagtttcctggtctgtggcgtgatctttggttgtctggcttttaccttctatatcttgctcctgtttttccacaggatgcaccctggactcccatcagttcctacccaagacagatcaattggaatggaaaactctgagtgctaccagaggtaaaactgggtgaagaaggcaagagaagactttcagcctcttgatcaccagcacgaccatactgtttcagaaagctgggtggtggtggaggcgctctctcaatggctattcaagtcttctccactaaaacttggttgggtagaggaaattaaattgagtcctggtacctggtcaaaatcattagaagtttacctggcttctcaagttatcttcttccctggttcagactgttggtaagagctgtccagatacccagatgggaaggaaggagacagccgcgcgcttcactccatttgtcacctcatgcatggaccatactctgggtttgagatcattcttcattgaagtttgtaaaaataggttgaaattgtaaagctccatgatcattgctatatgtagatatatttcaatttaagcaaaacaagctgcaagttattccctggcatgctcaaaggattttcgtgcttttcacttaatagtccaaagtctcttaaattcctgctgcagacatcaatagcttatctatattctcaaacaccaaaaggaaaagttgaatcttgctctctttggtatactaatgtagtggtatgctaagctggctcataccaacttagaaaagctgattgtaaaattttcattttgacagctggttattaaatgcagccattattaaaaatcaaatcatacaaacttataattaaatcaattacatttaaaacaaaggtaataaatattcaaagcatatcacttcctaatttgatcttgatgctcttgaggtaatttacgtccatggtacctgtgtggtggaattactatatatgatggtgtgctactgtgcaccttgtctcaactccactcttcgtgatagcatgttggtagcttgaaatcagcctggtgggagtattaccatggacactggcaaaagctacagatcccggagagccagtggttaaacatttaccagcataccactgctagtaatcaaggctaactggtccagaaatcgcccaggagaatgaaatggatgttccatttttttctactgacattgactagcatataaaaggaatttggacatttcagaatcctgtggaatcaccctgttcccagattttcctctgctacttgtatatggaaatctaacccatcaggcacatcggattcactaaaagaagacacagtgacatagagttcttttagagtgaatttcgtttattcagtcaaaaaggatttgttaagcacctgctatgttcaaggcactaatctaggtacagacatacagtggtgactgagacagaagtccctgcctcacaaggattataccgcaggtgaagacatacagacagcaaacaaatactacacgtaacatgccacagg

SEQ ID NO: 462575 - DNA, 1667 bp, Homo sapiens
  misc_feature (301)..(301): n is a, c, g, or t
  misc_feature (306)..(306): n is a, c, g, or t
  misc_feature (323)..(323): n is a, c, g, or t
  misc_feature (326)..(326): n is a, c, g, or t
  misc_feature (334)..(334): n is a, c, g, or t
  misc_feature (338)..(338): n is a, c, g, or t
  misc_feature (342)..(342): n is a, c, g, or t
  misc_feature (346)..(346): n is a, c, g, or t
  misc_feature (351)..(351): n is a, c, g, or t
  misc_feature (367)..(367): n is a, c, g, or t
  misc_feature (369)..(370): n is a, c, g, or t
  misc_feature (382)..(382): n is a, c, g, or t
  misc_feature (394)..(394): n is a, c, g, or t
  misc_feature (407)..(407): n is a, c, g, or t
  misc_feature (411)..(411): n is a, c, g, or t
  misc_feature (423)..(424): n is a, c, g, or t
  misc_feature (428)..(428): n is a, c, g, or t
  misc_feature (434)..(434): n is a, c, g, or t
gggcaatccaggagcagaggtacatgagagataatttgacagagactcatcaagcgacagtctctgcagcatgcacagtatttctgtgctttagaatgaagcttgcaactgcctgatgtttacgtttactgagcaccaccataggtcaggcactgatcctctggactgctccagtcttcccaaaccacatctctcagcaaccttcacagagcacgtcccatgcttccatcctggtgctagagtctggagatacgaaaataaacagaacttgccgggcacggtggctcacgcctgtaatccnagcantttgggaggctgaggcnggnggatcacntgangtcnggantttgngaccagcctggccaananngtgaaaccccanctctactaaaantacaaaattagcnaggngtggtggcaggnncctntaatcncagctcagcctcccaagtagctgtgactacaggcgcatgccatcacgcacagctaattttttgtatttttagtagagacgggatttcaccgtgttagccaggatggtcttgatctcctgacctcatgatctgcccgtctcggcctcccaaagtgctgggattacaggcgtgagccactgcacccagccaaaaattttacatcttttatagagggaaaaaaactctttataccatggcaaggccttttctttcacaaaaagctgggcctactgaacaattcaagctgtgcagtagtagactgaaagcaggatttgttgaggagttacagctcctgtccagagcaaatcctgtagtgatacaaggagaatgtaaacttgccagcttagacagggatcagtcctgagactgctggcagtagcaaatggctattagagtaactgtataatggttttgcctgcactttctctatgtatatacaaatgtacatgtataaatataaaaattaagtgatcatggttcttggtaacctgtcccaagtgctgtgattcacacgcctgacactaaaaggttcttcctggtccagtcagccagctgtgaccaccagcagcacagctgagtgctgagaatctggctggaaagagaaacgtggctcaagtgctggctcaccttctagctgtgtggccctgggcaggttactgaggctcttccaacctcacttttcacatgtaaaatggcatttctaaaagtacctaccctacctcaaaggaattctgaaaaaagtaagtgaatttgtataaagcaaagcactcacaatatgcctgacacacaaactgcttaataaatgttagtaatttttaaaacctcctcataagcggcttagaaattattcatgtttggtacatatttattgcaagtcaagcagatccaacttttttgaaagctggtggtctaggagtatagttttaattatatttgtaaatactcaaaagtattagatgccagtctaatttaaatgcagtctgactgtagcgagtaactgacctgggcaatgaaaaagcagttgtatttttcttgtggtttttcaagaaaatatcctttttatacagatttagaaagaagaatcaatggctatatcgaagttgattgtgactaatttgttaatacagaaaacaacattaacacaaatctaagagtacctttcctaaaataaaatatttaaacttaaaaaaaaag

SEQ ID NO: 462576 - DNA, 946 bp, Homo sapiens
ttgacagggtctcactctgtcacccaggctggagtgcagtggtgcgatcatggctcactgcagcctccaattcatgggctcgagggaccctcctaccttagcctcccaagtagctgggactacaggtgcacaccaccatgcccagttaatttttttaaattttactttttgtagagaccaagtcttgtgatattgcccagactggtcttgaactcctggcctcaagagatcctcccacttctgactcctaaagtactgggatgtgccttccgaaatgcatatgccactgtgcctggccagcaacctggattgtaatgctggcttctgtctccttaacttgcttttaccaaaccaaaccttctctttttgttaggctgtgcaaccacagtgctggtgacaggggcaggagttggcgagatggtgctgcagatgctggttggttcggtatgtggggacctgtaagggagaggggagcatttggggagcactcctctgacaggtgagaagatgcagatagccaccttctgaactcaaactgtccctttcctgagtctccagcaaagccagcagggccccctgtgccgttgttacctgtttccgtttccaagccagccctgagagctgagcctccatatgtgggatctggagatgtaaacggatgcatggaaaagtccaaagcaaacacaagccatgtctgggagcagggccagagggggcccgtgggaatgctgtttagctctcagagcctgagatgggttggaactgcagtcagagttctttttccatcccttcggaacccaccactccctaccccacctctcacagcctctggccaccctgcagagggcccagcttcctgctcaactcctgccctgaccgagagggccaactcttccagttctattcaaatccacccatgtttcatttattcaccaggaaaaaaaaa

SEQ ID NO: 462577 - DNA, 3524 bp, Homo sapiens
cgcgggcctccccagcccggccggccctcccgcgggcggcactcgggcaccgggctcgccgggaccagatccgcgagcccgtcagcctgcgccatgggctgcgacggccgcgtgtcggggctgctccgccgcaacctgcagcccacgctcacctactggagcgtcttcttcagcttcggcctgtgcatcgccttcctggggcccacgctgctggacctgcgctgtcagacgcacagctcgctgcccagatctcctgggtcttcttctcgcagcagctctgcctcctgctgggcagcgccctcgggggcgtcttcaaaaggaccctggcccagtcactatgggccctgttcacctcctctctggccatctccctggtgtttgccgtcatccccttctgccgcgacgtgaaggtgctggcctcagtcatggcgctggcgggcttggccatgggctgcatcgacaccgtggccaacatgcagctggtaaggatgtaccagaaggactcggccgtcttcctccaggtgctccatttcttcgtgggctttggtgctctgctgagcccccttattgctgaccctttcctgtctgaggccaactgcttgcctgccaatagcacggccaacaccacctcccgaggccacctgttccatgtctccagggtgctgggccagcaccacgtagatgccaagccttggtccaaccagacgttcccagggctgactccaaaggacggggcagggacccgagtgtcctatgccttctggatcatggccctcatcaatcttccagtgcccatggctgtgctgatgctgctgtccaaggagcggctgctgacctgctgtccccagaggaggcccctgcttctgtctgctgatgagcttgccttggagacacagcctcctgagaaggaagatgcctcctcactgcccccaaagtttcagtcacacctagggcatgaggacctgttcagctgctgccaaaggaagaacctcagaggagccccttattccttctttgccatccacatcacgggcgccctggtactgttcatgacggatgggttgacgggtgcctattccgccttcgtgtacagctatgctgtggagaagcccctgtctgtgggacacaaggtggctggctacctccccagcctcttctggggcttcatcacactgggccggctcctctccattcccatatcctcaagaatgaagccggccaccatggttttcatcaacgtggaggtgctggctgcagtgtgtggagcccatcccagccaacaactggctatgagcgtgaggaaagccagtgctggccctggtcctcctgtgtttaccttggtgcccagctgctcagagccctccagtcagtggaaagctgtggaggccagggatcccacaaccgttggcgtggtggtgacgttcctggtgctgcttattttctcctacaacgtcgtcttcctgttcgtggggacggcaagcctgggcctgtttctcagcagcaccttccccagcatgctggcctacacggaggactcgctgcagtacaaaggctgtgcaaccacagtgctggtgacaggggcaggagttggcgagatggtgctgcagatgctggttggttcgatattccaggctcagggcagctatagtttcctggtctgtggcgtgatctttggttgtctggcttttaccttctatatcttgctcctgtttttccacaggatgcaccctggactcccatcagttcctacccaagacagatcaattggaatggaaaactctgagtgctaccagaggtaaaactgggtgaagaaggcaagagaagactttcagcctcttgatcaccagcacgaccatactgtttcagaaagctgggtggtggtggaggcgctctctcaatggctattcaagtcttctccactaaaacttggttgggtagaggaaattaaattgagtcctggtacctggtcaaaatcattagaagtttacctggcttctcaagttatcttcttccctggttcagactgttggtaagagctgtccagatacccagatgggaaggaaggagacagccgcgcgcttcactccatttgtcacctcatgcatggaccatactctgggtttgagatcattcttcattgaagtttgtaaaaataggttgaaattgtaaagctccatgatcattgctatatgtagatatatttcaatttaagcaaaacaagctgcaagttattccctggcatgctcaaaggattttcgtgcttttcacttaatagtccaaagtctcttaaattcctcagcctcccaagtagctgtgactacaggcgcatgccatcacgcacagctaattttttgtatttttagtagagacgggatttcaccgtgttagccaggatggtcttgatctcctgacctcatgatctgcccgtctcggcctcccaaagtgctgggattacaggcgtgagccactgcacccagccaaaaattttacatcttttatagagggaaaaaaactctttataccatggcaaggccttttctttcacaaaaagctgggcctactgaacaattcaagctgtgcagtagtagactgaaagcaggatttgttgaggagttacagctcctgtccagagcaaatcctgtagtgatacaaggagaatgtaaacttgccagcttagacagggatcagtcctgagactgctggcagtagcaaatggctattagagtaactgtataatggttttgcctgcactttctctatgtatatacaaatgtacatgtataaatataaaaattaagtgatcatggttcttggtaacctgtcccaagtgctgtgattcacacgcctgacactaaaaggttcttcctggtccagtcagccagctgtgaccaccagcagcacagctgagtgctgagaatctggctggaaagagaaacgtggctcaagtgctggctcaccttctagctgtgtggccctgggcaggttactgaggctcttccaacctcacttttcacatgtaaaatggcatttctaaaagtacctaccctacctcaaaggaattctgaaaaaagtaagtgaatttgtataaagcaaagcactcacaatatgcctgacacacaaactgcttaataaatgttagtaatttttaaaacctcctcataagcggcttagaaattattcatgtttggtacatatttattgcaagtcaagcagatccaacttttttgaaagctggtggtctaggagtatagttttaattatatttgtaaatactcaaaagtattagatgccagtctaatttaaatgcagtctgactgtagcgagtaactgacctgggcaatgaaaaagcagttgtatttttcttgtggtttttcaagaaaatatcctttttatacagatttagaaagaagaatcaatggctatatcgaagttgattgtgactaatttgttaatacagaaaacaacattaacacaaatctaagagtacctttcctaaaataaaatatttaaacttaaaaaaaaag

SEQ ID NO: 462578 - DNA, 2346 bp, Homo sapiens
ttgacagggtctcactctgtcacccaggctggagtgcagtggtgcgatcatggctcactgcagcctccaattcatgggctcgagggaccctcctaccttagcctcccaagtagctgggactacaggtgcacaccaccatgcccagttaatttttttaaattttactttttgtagagaccaagtcttgtgatattgcccagactggtcttgaactcctggcctcaagagatcctcccacttctgactcctaaagtactgggatgtgccttccgaaatgcatatgccactgtgcctggccagcaacctggattgtaatgctggcttctgtctccttaacttgcttttaccaaaccaaaccttctctttttgttaggctgtgcaaccacagtgctggtgacaggggcaggagttggcgagatggtgctgcagatgctggttggttcgatattccaggctcagggcagctatagtttcctggtctgtggcgtgatctttggttgtctggcttttaccttctatatcttgctcctgtttttccacaggatgcaccctggactcccatcagttcctacccaagacagatcaattggaatggaaaactctgagtgctaccagaggtaaaactgggtgaagaaggcaagagaagactttcagcctcttgatcaccagcacgaccatactgtttcagaaagctgggtggtggtggaggcgctctctcaatggctattcaagtcttctccactaaaacttggttgggtagaggaaattaaattgagtcctggtacctggtcaaaatcattagaagtttacctggcttctcaagttatcttcttccctggttcagactgttggtaagagctgtccagatacccagatgggaaggaaggagacagccgcgcgcttcactccatttgtcacctcatgcatggaccatactctgggtttgagatcattcttcattgaagtttgtaaaaataggttgaaattgtaaagctccatgatcattgctatatgtagatatatttcaatttaagcaaaacaagctgcaagttattccctggcatgctcaaaggattttcgtgcttttcacttaatagtccaaagtctcttaaattcctcagcctcccaagtagctgtgactacaggcgcatgccatcacgcacagctaattttttgtatttttagtagagacgggatttcaccgtgttagccaggatggtcttgatctcctgacctcatgatctgcccgtctcggcctcccaaagtgctgggattacaggcgtgagccactgcacccagccaaaaattttacatcttttatagagggaaaaaaactctttataccatggcaaggccttttctttcacaaaaagctgggcctactgaacaattcaagctgtgcagtagtagactgaaagcaggatttgttgaggagttacagctcctgtccagagcaaatcctgtagtgatacaaggagaatgtaaacttgccagcttagacagggatcagtcctgagactgctggcagtagcaaatggctattagagtaactgtataatggttttgcctgcactttctctatgtatatacaaatgtacatgtataaatataaaaattaagtgatcatggttcttggtaacctgtcccaagtgctgtgattcacacgcctgacactaaaaggttcttcctggtccagtcagccagctgtgaccaccagcagcacagctgagtgctgagaatctggctggaaagagaaacgtggctcaagtgctggctcaccttctagctgtgtggccctgggcaggttactgaggctcttccaacctcacttttcacatgtaaaatggcatttctaaaagtacctaccctacctcaaaggaattctgaaaaaagtaagtgaatttgtataaagcaaagcactcacaatatgcctgacacacaaactgcttaataaatgttagtaatttttaaaacctcctcataagcggcttagaaattattcatgtttggtacatatttattgcaagtcaagcagatccaacttttttgaaagctggtggtctaggagtatagttttaattatatttgtaaatactcaaaagtattagatgccagtctaatttaaatgcagtctgactgtagcgagtaactgacctgggcaatgaaaaagcagttgtatttttcttgtggtttttcaagaaaatatcctttttatacagatttagaaagaagaatcaatggctatatcgaagttgattgtgactaatttgttaatacagaaaacaacattaacacaaatctaagagtacctttcctaaaataaaatatttaaacttaaaaaaaaag

SEQ ID NO: 462579 - DNA, 393 bp, Homo sapiens
agagtctcactctgttgccaggctggaatgcagtggcgtcatctcggctcactgcaacctccgcctcccagtttcaagcgattctcctgcctcagcctcccaagtagctgtgactacaggcgcatgccatcacgcacagctaattttttgtatttttagtagagacgggatttcaccgtgttagccaggatggtcttgatctcctgacctcatgatctgcccgtctcggcctcccaaagtgctgggattacaggcgtgagccactgcacccagccaaaaattttacatcttttatagagggaaaaaaactctttataccatggcaaggccttttctttcacaaaaagctgggcctactgaacaattcaagctgtgcagtagtagactgaaagc

SEQ ID NO: 462580 - DNA, 375 bp, Homo sapiens
aaaacctcctcataagcggcttagaaattattcatgtttggtacatatttattgcaagtcaagcagatccaacttttttgaaagctggtggtctaggagtatagttttaattatatttgtaaatactcaaaagtattagatgccagtctaatttaaatgcagtctgactgtagcgagtaactgacctgggcaatgaaaaagcagttgtatttttcttgtggtttttcaagaaaatatcctttttatacagatttagaaagaagaatcaatggctatatcgaagttgattgtgactaatttgttaatacagaaaacaacattaacacaaatctaagagtacctttcctaaaataaaatatttaaacttaaaaaaaa

SEQ ID NO: 462581 - DNA, 2124 bp, Homo sapiens
cgcgggcctccccagcccggccggccctcccgcgggcggcactcgggcaccgggctcgccgggaccagatccgcgagcccgtcagcctgcgccatgggctgcgacggccgcgtgtcggggctgctccgccgcaacctgcagcccacgctcacctactggagcgtcttcttcagcttcggcctgtgcatcgccttcctggggcccacgctgctggacctgcgctgtcagacgcacagctcgctgcccagatctcctgggtcttcttctcgcagcagctctgcctcctgctgggcagcgccctcgggggcgtcttcaaaaggaccctggcccagtcactatgggccctgttcacctcctctctggccatctccctggtgtttgccgtcatccccttctgccgcgacgtgaaggtgctggcctcagtcatggcgctggcgggcttggccatgggctgcatcgacaccgtggccaacatgcagctggtaaggatgtaccagaaggactcggccgtcttcctccaggtgctccatttcttcgtgggctttggtgctctgctgagcccccttattgctgaccctttcctgtctgaggccaactgcttgcctgccaatagcacggccaacaccacctcccgaggccacctgttccatgtctccagggtgctgggccagcaccacgtagatgccaagccttggtccaaccagacgttcccagggctgactccaaaggacggggcagggacccgagtgtcctatgccttctggatcatggccctcatcaatcttccagtgcccatggctgtgctgatgctgctgtccaaggagcggctgctgacctgctgtccccagaggaggcccctgcttctgtctgctgatgagcttgccttggagacacagcctcctgagaaggaagatgcctcctcactgcccccaaagtttcagtcacacctagggcatgaggacctgttcagctgctgccaaaggaagaacctcagaggagccccttattccttctttgccatccacatcacgggcgccctggtactgttcatgacggatgggttgacgggtgcctattccgccttcgtgtacagctatgctgtggagaagcccctgtctgtgggacacaaggtggctggctacctccccagcctcttctggggcttcatcacactgggccggctcctctccattcccatatcctcaagaatgaagccggccaccatggttttcatcaacgtggaggtgctggctgcagtgtgtggagcccatcccagccaacaactggctatgagcgtgaggaaagccagtgctggccctggtcctcctgtgtttaccttggtgcccagctgctcagagccctccagtcagtggaaagctgtggaggccagggatcccacaaccgttggcgtggtggtgacgttcctggtgctgcttattttctcctacaacgtcgtcttcctgttcgtggggacggcaagcctgggcctgtttctcagcagcaccttccccagcatgctggcctacacggaggactcgctgcagtacaaaggctgtgcaaccacagtgctggtgacaggggcaggagttggcgagatggtgctgcagatgctggttggttcggtatgtggggacctgtaagggagaggggagcatttggggagcactcctctgacaggtgagaagatgcagatagccaccttctgaactcaaactgtccctttcctgagtctccagcaaagccagcagggccccctgtgccgttgttacctgtttccgtttccaagccagccctgagagctgagcctccatatgtgggatctggagatgtaaacggatgcatggaaaagtccaaagcaaacacaagccatgtctgggagcagggccagagggggcccgtgggaatgctgtttagctctcagagcctgagatgggttggaactgcagtcagagttctttttccatcccttcggaacccaccactccctaccccacctctcacagcctctggccaccctgcagagggcccagcttcctgctcaactcctgccctgaccgagagggccaactcttccagttctattcaaatccacccatgtttcatttattcaccaggaaaaaaaaa

SEQ ID NO: 462582 - DNA, 1160 bp, Homo sapiens
ctcttaagactcggggtctcatggaaactgagcctctgcaagctaagaagggagaatacaacttccatgcaagggcctcccaggactcagggctggtgagcaaaccaggtctgcaggaacttggcttgactctgcagcccaaaaggcacattttggaggcttgggtctggtcccacttcagactcaggaacaaaacaacaggtcctggttccctggaggatgagggtggcccttacactgactgttccttcaacccaatgcccataccaacatgtgagcagagttttcatgtctttaccctccctaaaggcaagccacgggacacctgcatctgccaacaagactggaagcaggtgaggcacacagagggggaggcccgcagctgcgtgggaggaggggtggtctgagggacgtgggatgccgggaatgaggctggtttgcaggttggcgcatggacattttcccagaaagggacagagacggcgaagtttgacggtctggaaagcagagaccagcagggctgactgcttgggagcaccaaatatccggacagcgcctctcgggaggtccgagaagagaaccgcgatctgtttcagcaccggggctcaggacagttcccagcgggctccgtttcgtctccagaaccctggacagctcctccagcttggaatgcactccctccacctccaaccagagctccccacaactgaccctgccttcttctgcaagctccatttcatcaagggaaacgatccttattgcctcaccatttcccacgtgaagtctgtattgacattctcatagacctgggatattgtgtctgcagcacatagtccaattattttcatgttatctactgacaggtctatttgtctccctgttacactgtgagctccgtgagggcagaaacaatgttagtattttcactgctgtgtccccagcgcctggtccggggcccggcacacagcaggcatataataagcatgtgttgaatcaataaaggcatcaaagaataaaccaatacatcaatcaataaatgaatgaatggcctcagcacacacaggaagatccttcttctaggtctcccccagagagatactggagggcaatggttgctggaggtgtttattggggaagcataattgaatttgtggacactt

SEQ ID NO: 462583 - DNA, 1212 bp, Homo sapiens
ctcttaagactcggggtctcatggaaactgagcctctgcaagctaagaagggagaatacaacttccatgcaagggcctcccaggactcagggctggtgagcaaaccaggtctgcaggaacttggcttgactctgcagcccaaaaggcacattttggaggcttgggtctggtcccacttcagactcaggaacaaaacaacaggtcctggttccctggaggatgagggtggcccttacactgactgttccttcaacccaatgcccataccaacatgtgagcagagttttcatgtctttaccctccctaaaggcaagccacgggacacctgcatctgccaacaagactggaagcaggtgaggcacacagagggggaggcccgcagctgcgtgggaggaggggtggtctgagggacgtgggatgccgggaatgaggctggtttgcaggttggcgcatggacattttcccagaaagggacagagacggcgaagtttgacggtctggaaagcagagaccagcagggctgactgcttgggagcacgagggacagctctccaccgaccgaaggaggagaatgctatttatttcagcaccaaatatccggacagcgcctctcgggaggtccgagaagagaaccgcgatctgtttcagcaccggggctcaggacagttcccagcgggctccgtttcgtctccagaaccctggacagctcctccagcttggaatgcactccctccacctccaaccagagctccccacaactgaccctgccttcttctgcaagctccatttcatcaagggaaacgatccttattgcctcaccatttcccacgtgaagtctgtattgacattctcatagacctgggatattgtgtctgcagcacatagtccaattattttcatgttatctactgacaggtctatttgtctccctgttacactgtgagctccgtgagggcagaaacaatgttagtattttcactgctgtgtccccagcgcctggtccggggcccggcacacagcaggcatataataagcatgtgttgaatcaataaaggcatcaaagaataaaccaatacatcaatcaataaatgaatgaatggcctcagcacacacaggaagatccttcttctaggtctcccccagagagatactggagggcaatggttgctggaggtgtttattggggaagcataattgaatttgtggacactt

SEQ ID NO: 462584 - DNA, 1297 bp, Homo sapiens
ctcttaagactcggggtctcatggaaactgagcctctgcaagctaagaagggagaatacaacttccatgcaagggcctcccaggactcagggctggtgagcaaaccaggtctgcaggaacttggcttgactctgcagcccaaaaggcacattttggaggcttgggtctggtcccacttcagactcaggaacaaaacaacaggtcctggttccctggaggatgagggtggcccttacactgactgttccttcaacccaatgcccataccaacatgtgagcagagttttcatgtctttaccctccctaaaggcaagccacgggacacctgcatctgccaacaagactggaagcaggtgaggcacacagagggggaggcccgcagctgcgtgggaggaggggtggtctgagggacgtgggatgccgggaatgaggctggtttgcaggttggcgcatggacattttcccagaaagggacagagacggcgaagtttgacggtctggaaagcagagaccagcagggctgactgcttgggagcaccaaatatccggacagcgcctctcgggaggtccgagaagagaaccgcgatctgtttcagcaccggggctcaggacagttcccagcgggctccgtttcgtctccagaaccctggacagctcctccagtagagacggggtttcaccatgttggccaggctggtctcaaactcttgacctcttcatccgtccacctcagcctcccaaagtgctaggattacaggcgtgagtcactgcgcctggcccaagtccggaattttcaacagcttggaatgcactccctccacctccaaccagagctccccacaactgaccctgccttcttctgcaagctccatttcatcaagggaaacgatccttattgcctcaccatttcccacgtgaagtctgtattgacattctcatagacctgggatattgtgtctgcagcacatagtccaattattttcatgttatctactgacaggtctatttgtctccctgttacactgtgagctccgtgagggcagaaacaatgttagtattttcactgctgtgtccccagcgcctggtccggggcccggcacacagcaggcatataataagcatgtgttgaatcaataaaggcatcaaagaataaaccaatacatcaatcaataaatgaatgaatggcctcagcacacacaggaagatccttcttctaggtctcccccagagagatactggagggcaatggttgctggaggtgtttattggggaagcataattgaatttgtggacactt

SEQ ID NO: 462585 - DNA, 901 bp, Homo sapiens
ctcttaagactcggggtctcatggaaactgagcctctgcaagctaagaagggagaatacaacttccatgcaagggcctcccaggactcagggctggtgagcaaaccaggtctgcaggaacttggcttgactctgcagcccaaaaggcacattttggaggcttgggtctggtcccacttcagactcaggaacaaaacaacaggtcctggttccctggaggatgagggtggcccttacactgactgttccttcaacccaatgcccataccaacatgtgagcagagttttcatgtctttaccctccctaaaggcaagccacgggacacctgcatctgccaacaagactggaagcagaaagggacagagacggcgaagtttgacggtctggaaagcagagaccagcagggctgactgcttgggagcaccaaatatccggacagcgcctctcgggaggtccgagaagagaaccgcgatctgtttcagcaccggggctcaggacagttcccagcgggctccgtttcgtctccagaaccctggacagctcctccagcttggaatgcactccctccacctccaaccagagctccccacaactgaccctgccttcttctgcaagctccatttcatcaagggaaacgatccttattgcctcaccatttcccacgtgaagtctgtattgacattctcatagacctgggatattgtgtctgcagcacatagtccaattattttcatgttatctactgacaggtctatttgtctccctgttacactgtgagctccgtgagggcagaaacaatgttagtattttcactgctgtgtccccagcgcctggtccggggcccggcacacagcaggcatataataagcatgtgttgaatcaataaaggcatcaaagaata

SEQ ID NO: 462586 - DNA, 1468 bp, Homo sapiens
ctcttaagactcggggtctcatggaaactgagcctctgcaagctaagaagggagaatacaacttccatgcaagggcctcccaggactcagggctggtgagcaaaccaggtctgcaggaacttggcttgactctgcagcccaaaaggcacattttggaggcttgggtctggtcccacttcagactcaggaacaaaacaacaggtcctggttccctggaggatgagggtggcccttacactgactgttccttcaacccaatgcccataccaacatgtgagcagagttttcatgtctttaccctccctaaaggcaagccacgggacacctgcatctgccaacaagactggaagcaggtgaggcacacagagggggaggcccgcagctgcgtgggaggaggggtggtctgagggacgtgggatgccgggaatgaggctggtttgcaggttggcgcatggacattttcccagaaagggacagagacggcgaagtttgacggtctggaaagcagagaccagcagggctgactgcttgggagcaccaaatatccggacagcgcctctcgggaggtccgagaagagaaccgcgatctgtttcagcaccggggctcaggacagttcccagcgggctccgtttcgtctccagaaccctggacagctcctccagtagagacggggtttcaccatgttggccaggctggtctcaaactcttgacctcttcatccgtccacctcagcctcccaaagtgctaggattacaggcgtgagtcactgcgcctggcccaagtccggaattttcaacaggacatgggtgttactgtgcccatgtgacatttggggaacccaaggccctgagaaaggcagaaaaataacccacgcagggactctcagcccacaagtgaagctgagaaccgggaatggaaaacagggaggcagcacagaggcaggaaactcaggtgtcatagcttggctcagcttggaatgcactccctccacctccaaccagagctccccacaactgaccctgccttcttctgcaagctccatttcatcaagggaaacgatccttattgcctcaccatttcccacgtgaagtctgtattgacattctcatagacctgggatattgtgtctgcagcacatagtccaattattttcatgttatctactgacaggtctatttgtctccctgttacactgtgagctccgtgagggcagaaacaatgttagtattttcactgctgtgtccccagcgcctggtccggggcccggcacacagcaggcatataataagcatgtgttgaatcaataaaggcatcaaagaataaaccaatacatcaatcaataaatgaatgaatggcctcagcacacacaggaagatccttcttctaggtctcccccagagagatactggagggcaatggttgctggaggtgtttattggggaagcataattgaatttgtggacactt

SEQ ID NO: 462587 - DNA, 1399 bp, Homo sapiens
ctcttaagactcggggtctcatggaaactgagcctctgcaagctaagaagggagaatacaacttccatgcaagggcctcccaggactcagggctggtgagcaaaccaggtctgcaggaacttggcttgactctgcagcccaaaaggcacattttggaggcttgggtctggtcccacttcagactcaggaacaaaacaacaggtcctggttccctggaggatgagggtggcccttacactgactgttccttcaacccaatgcccataccaacatgtgagcagagttttcatgtctttaccctccctaaaggcaagccacgggacacctgcatctgccaacaagactggaagcaggtgaggcacacagagggggaggcccgcagctgcgtgggaggaggggtggtctgagggacgtgggatgccgggaatgaggctggtttgcaggttggcgcatggacattttcccagaaagggacagagacggcgaagtttgacggtctggaaagcagagaccagcagggctgactgcttgggagcaccaaatatccggacagcgcctctcgggaggtccgagaagagaaccgcgatctgtttcagcaccggggctcaggacagttcccagcgggctccgtttcgtctccagaaccctggacagctcctccagtagagacggggtttcaccatgttggccaggctggtctcaaactcttgacctcttcatccgtccacctcagcctcccaaagtgctaggattacaggcgtgagtcactgcgcctggcccaagtccggaattttcaacaggacatgggtgttactgtgcccatgtgacatttggggaacccaaggccctgagaaaggcagaaaaataacccacgcagggactctcagcccacaagtgaagctcttggaatgcactccctccacctccaaccagagctccccacaactgaccctgccttcttctgcaagctccatttcatcaagggaaacgatccttattgcctcaccatttcccacgtgaagtctgtattgacattctcatagacctgggatattgtgtctgcagcacatagtccaattattttcatgttatctactgacaggtctatttgtctccctgttacactgtgagctccgtgagggcagaaacaatgttagtattttcactgctgtgtccccagcgcctggtccggggcccggcacacagcaggcatataataagcatgtgttgaatcaataaaggcatcaaagaataaaccaatacatcaatcaataaatgaatgaatggcctcagcacacacaggaagatccttcttctaggtctcccccagagagatactggagggcaatggttgctggaggtgtttattggggaagcataattgaatttgtggacactt

SEQ ID NO: 462588 - DNA, 1152 bp, Homo sapiens
ctcttaagactcggggtctcatggaaactgagcctctgcaagctaagaagggagaatacaacttccatgcaagggcctcccaggactcagggctggtgagcaaaccaggtctgcaggaacttggcttgactctgcagcccaaaaggcacattttggaggcttgggtctggtcccacttcagactcaggaacaaaacaacaggtcctggttccctggaggatgagggtggcccttacactgactgttccttcaacccaatgcccataccaacatgtgagcagagttttcatgtctttaccctccctaaaggcaagccacgggacacctgcatctgccaacaagactggaagcaggtgaggcacacagagggggaggcccgcagctgcgtgggaggaggggtggtctgagggacgtgggatgccgggaatgaggctggtttgcaggttggcgcatggacattttcccagaaagggacagagacggcgaagtttgacggtctggaaagcagagaccagcagggctgactgcttgggagcaccaaatatccggacagcgcctctcgggaggtccgagaagagaaccgcgatctgtttcagcaccggggctcaggacagttcccagcgggctccgtttcgtctccagaaccctggacagctcctccagtagagacggggtttcaccatgttggccaggctggtctcaaactcttgacctcttcatccgtccacctcagcctcccaaagtgctaggattacaggcgtgagtcactgcgcctggcccaagtccggaattttcaacagcttggaatgcactccctccacctccaaccagagctccccacaactgaccctgccttcttctgcaagctccatttcatcaagggaaacgatccttattgcctcaccatttcccacgtgaagtctgtattgacattctcatagacctgggatattgtgtctgcagcacatagtccaattattttcatgttatctactgacaggtctatttgtctccctgttacactgtgagctccgtgagggcagaaacaatgttagtattttcactgctgtgtccccagcgcctggtccggggcccggcacacagcaggcatataataagcatgtgttgaatcaataaaggcatcaaagaata

SEQ ID NO: 462589 - DNA, 1254 bp, Homo sapiens
ctcttaagactcggggtctcatggaaactgagcctctgcaagctaagaagggagaatacaacttccatgcaagggcctcccaggactcagggctggtgagcaaaccaggtctgcaggaacttggcttgactctgcagcccaaaaggcacattttggaggcttgggtctggtcccacttcagactcaggaacaaaacaacaggtcctggttccctggaggatgagggtggcccttacactgactgttccttcaacccaatgcccataccaacatgtgagcagagttttcatgtctttaccctccctaaaggcaagccacgggacacctgcatctgccaacaagactggaagcaggtgaggcacacagagggggaggcccgcagctgcgtgggaggaggggtggtctgagggacgtgggatgccgggaatgaggctggtttgcaggttggcgcatggacattttcccagaaagggacagagacggcgaagtttgacggtctggaaagcagagaccagcagggctgactgcttgggagcaccaaatatccggacagcgcctctcgggaggtccgagaagagaaccgcgatctgtttcagcaccggggctcaggacagttcccagcgggctccgtttcgtctccagaaccctggacagctcctccagtagagacggggtttcaccatgttggccaggctggtctcaaactcttgacctcttcatccgtccacctcagcctcccaaagtgctaggattacaggcgtgagtcactgcgcctggcccaagtccggaattttcaacaggacatgggtgttactgtgcccatgtgacatttggggaacccaaggccctgagaaaggcagaaaaataacccacgcagggactctcagcccacaagtgaagctcttggaatgcactccctccacctccaaccagagctccccacaactgaccctgccttcttctgcaagctccatttcatcaagggaaacgatccttattgcctcaccatttcccacgtgaagtctgtattgacattctcatagacctgggatattgtgtctgcagcacatagtccaattattttcatgttatctactgacaggtctatttgtctccctgttacactgtgagctccgtgagggcagaaacaatgttagtattttcactgctgtgtccccagcgcctggtccggggcccggcacacagcaggcatataataagcatgtgttgaatcaataaaggcatcaaagaata

SEQ ID NO: 462590 - DNA, 911 bp, Homo sapiens
aaaaagtccagattcagtgtggatacggccatggggacattcacatcaaattaatgtgctccacttttattgctgaaagagcgcaggagatcagagaatctatgtggagctgaattcccacataaatgatgaagctgaagccaaaagaggttcagtacttacccaaggccacatacggttgataagtagcagagacattttggaattcgggtttgctatctctaggccctaagttctggagaatcagtctcttcatttcaacttctcaccctcaccatgcccccacatgcccccagatatccttttaataagagagagctcaggcaaagatctggctatcagctcgggaagccactgagggaactgttttgcttgttttattctttttggctctctgcttcttgtgtcaaccgaattgtgtgtgctggcccttctcctctccctggtttcacgggaaaggttcttgaggctggagagcgcagttatcaacacgtcccaccctcagagagctctgtgagaaggaagcatgtagagcacgtgctcagtatttgctgggagctagtgaaagctgtggaatgccgctggtcaagctgcagagacagggcaactggggcaggtgatggcagtggcagtgctgttggtggcagatggctggggcccaggacactgagggtggcctggctccgtcattcctcagacaactgtgctggctatatatactccaaccctgtctatgttatttccaccacggcgatttggggtggatgtacggggaagaaattctaggcatagagaatcccagcaaaccccaaagcaggacaacacagggccaaagggtgggtgtgagcagcaggaggaatgcagtttggctgagctgaggagtagacagggagtggcgggaagagggaggg

SEQ ID NO: 462591 - DNA, 1848 bp, Homo sapiens
  misc_feature (3)..(3): n is a, c, g, or t
  misc_feature (7)..(7): n is a, c, g, or t
  misc_feature (9)..(11): n is a, c, g, or t
aanttantnnnaagaaaaggctgtaaaaatgtggatgagtttaagatgcacaaaaaaggttataatagacataaccagtgtttgacaacttcccatagcaaaatatttcagtgtgacaaatatgtgaaagtctttcataaattttcaaattcaaacagacataagataagacatacttcgaagaaacctttcaaatgtaaagaatgtggaaaattattttgcattctttcacacttagctcaacataaaaaaattcatactggagagaaatcctacaaatgtgaagaatatggcaaagcctttaatgagtcctcaaactgtactacacataaaagaattactgagaaaaaaccttacaaatgtaaagaatgtggcaaagcctttaactggttttcacattttactacacataagagaattcatactggagaaaaaccctaccaatgtgagaaatgtggcaaattttttaaccaatccacaaaccttactacacataaaagaattcatactggagagaaaccctataaatgtgaagaatgtggcaaagcctttaaccagtcctcaaaccttactgaacataagaaaattcatactaaagagcaaccatacaaatgcgaaaaatgtggcaaagcttttaagtggtcctcaacccttacaaaacataaaagaattcataatggagaaaaaccctacaaatgtgaagaatgtggcaaagcttttaaccgatcctcaacccttaatagacataagataactcatactggagggaaaccctacaaatataaagaatgtggtaaagcttttaaccaatcctcaactcttactatacataagataattcatactgtagagaaattttacaaatgtgaagaatgtggcaaagcctttagccgtatctcacaccttactacacataagagaattcatactggagagaaaccctacaaatgtgaagaatgtggcagagctttcaaccagtcctcaacccttactacacataaaagaattcatactggagagaaaccctatgaatgtgaagaatgtggcaaagcttttaaccggtcctcaaccctcactacacataagataattcattctggggaaaaaatctacaaatgtaaagaatgtggtaaagcctttaggcggttctcacaccttactaggcataagacaattcatacataaaattgtaaagactgtggcaaagcttttaaacaatctttataccttactacacataagataattcatactgaagagaaaccctacaaatgtgaagaatgtggcaaagcttttaaccagtcctcaaatcttactaaacataaggtaattcatactggagaaaaacctacaaatgtgaagaatgtggcaaagtcttcaaccaatcttcacaccttactacacataagataattcatactggagagaaaccctacaagtgtgaagaatgtgacaaagcctttaacaaatccttaattcttaacagacatgattcataccagagagaaactctacaaacctgaaagttttaacagtgcttttgacaacacctcaaacttttccagatgtcaaagaaatgctggtgagaaattctagaaatatgaagaatgtgacaaagccattaaattgttgtcacatttaattgtaggtaaggtgattcatactggagaaaacttctacaagtgtaaacaaagtggcaaaacttttaaccaatgctcacactttattgcacaggacatttatacttgagaataaatatacaagtgtaaagaaagtgaaaaccctattaatatctgctcacatcaactcaacatcagagttcatacttaataaaatcattaaaagtgc

SEQ ID NO: 462592 - DNA, 1421 bp, Homo sapiens
ggctcggagggagctgggaaggaggggcgattgcaattgaggatggaaccagagaccgttgttgaatttagggtcagaaaaatctgttgtctagatgaagaattaaatagagcaaagacaattgttgctccaactccaggtttcactcataaaacaacgtgggcgtttgtcagagactcagggttcaaactattggaggtccagatgacatctggcttctcagctcccccagaatactggctgcagtgcttatcagtgcattattcatcaaaactgatgatgcaaggcagaatgaacagtaatcccagagatcctgagatgagaaaagggtgtttgacttattcaaagaagaccaaggaagcccaaagaccagagaagagtgcaggaaaggggcggcggtctgagatgcagtcagagcagtggcaagcccccagagtctgtggcaaagacttcaggtttcatcctgaagaggaagacaggtctttggagagttttgatcaaggaagtgagatgaaatatcttaggcttacaaagaactactctgacatctaaatggaaaatggactgatgaagcaaaagaagccacaaggaagccagttcagaggctattgaaatgctccagctgaacagaatcccgacataagtttgggatcatgaacccatgacatcaacatagtcaggttgagtatgaagaacactgtgctgtggtgacagggagcctggttttttcctggttttggcattagctctatgtgtgacctcaaccaagtcactcaagctgttacagtctctctatgtggatgaaatgaaggggttgaaatagctactcactgtagctctgaatggctataattctatgaaactagaaaagaataaaatgtgtttatagtcattctctgaccctatttctccttttttaataaacaaaacacaatcctaaaacacgtttgttttttcaaagacagtttttgctttattcacactccttcctctgctttgtgggatgatctcaatgaatttctgaggaactgagaagaccaatttccaaatcatctggagtaattaattccagtggttggagttaattatgattaggcaattcataaagtatacagtagaaaaaaagcagcaattgatgagacttcatctgcagtgagatttttttcaaaggcattcttctggcaatgcatttcaaagttaaacatatgtgtgcttcaatggtgggaaaatagtttacgagggtatcattagttttattttctcagaccatataggagccagggaaaaaagacctgtatacgccaaaggatgaccatgatgaaatgaatcttttcaagccatagatctatgatttgcatactctaagaaatgggcagccaaaacaattttctaaactcaggtacatgtgcacattgtgcagg

SEQ ID NO: 462593 - DNA, 3311 bp, Homo sapiens
ggctcggagggagctgggaaggaggggcgattgcaattgaggatggaaccagagaccgttgttgaatttagggtcagaaaaatctgttgtctagatgaagaattaaatagagcaaagacaattgttgctccaactccaggtttcactcataaaacaacgtgggcgtttgtcagagactcagggttcaaactattggaggtccagatgacatctggcttctcagctcccccagaatactggctgcagtgcttatcagtgcattattcatcaaaactgatgatgcaaggcagaatgaacagtaatcccagagatcctgagatgagaaaagggtgtttgacttattcaaagaagaccaaggaagcccaaagaccagagaagagtgcaggaaaggggcggcggtctgagatgcagtcagagcagtggcaagcccccagagtctgtggcaaagacttcaggtttcatcctgaagaggaagacaggtctttggagagttttgatcaaggaagtgagatgaaatatcttaggcttacaaagaactactctgacatctaaatggaaaatggactgatgaagcaaaagaagccacaaggaagccagttcagaggctattgaaatgctccaggaggaaataaattttttctgggttagtttgctgtaaagaccaaatactctgcagtgcctaggaggcaggagcctgggaataagtccagctccacatgttggcctgtgtgtgttgtccagtgagggaactgagagtccagcaccaatgaatgtgacacacagaggcccaagtcttggaagaggaagcagaaatcaaaactgctccagagcacatctggaaaaaacaagcaaagctcatcttcctttattttgtgttttgtaacactgagcaatttgattaaaacaaatcagcaggacaaaaaatgaagttgcttttctgtggggagacaaaatcaatgagaagaatcaaggttgagtaaatatcttatggatactcaggggagataatattccaatttccagaatttaaaggaaaatttttagaattagttgttttctaaaacataaagttacttttattttgtaccttaaatgacattgaaagtatggggcacttgtaagagtaaatagttcacacctaagaaggtcccaaaagtgcttataatatgttttttaccagataagatgtggacatttaaaataaaataatgtctttacaaaactatttgcataagtgatttagatagagttggcatctaaaccagatttggtgacacaggtgaaatgatctgattggctgtcataaatttcaacccaggcaatgacactggaaaagaatcaatgcctgcaagtgtgtcgccatggtggtgcaccactcagagatgcctccaagggtgaacctgctacaaagagtgcgcatggccaacagcccctggttgtgctgactttgggatctgcctcagcttttgagcagatatcaagcacttgcaaggcagcctcctgccaatgactgagcaaagcagcagtagatgggcttgcaatttatttctggacggtgagatgctcctttttgggcccttcttgtgctggagctactcgttgtgttagccgaggctttcccagggctacaccatggtctgaggctctcctccctgttctttcttccttcccttgcacctttgcaaggtgtcagacctccatcatggtctaaaaggcttttcctaactgctcttgtttcttttcccctttctctttcaagtcactctccccagttaatgtcttgtgcttctagctctgtcttggcatctgcttctgggaggactcaactagtttattgcattatcttttactttgtcatatcagggagcccccagggaagatgtgggaagataataattaagcttgcttttattgtttttcttttatttgtattttccccattaataccaatttttgctttttaggaagatatgacaaactctaggtcattccttgtctccgattcctgcttttcagatttctgctctggctaggttacatagattctttctgagagagaatttagcagctctcaggttaacactaaccttttgatttagtgtgaatagtaaccgtttgatttttaaaaagtatacatctttaaaacgtaaattttactctgacaactaaaaaaactacaaatttttatccactattttccaattcttccttgaagtcctctgatgcagaattggtttctaccaaacataacagatttatattctctaaccacaacatatttagagaggaaagattgtgacggtgaatctgaaaacaactgagacgaagttggggtgggttcacccaaatccaagctttcctcagataagaataccagggctttcctgagcacagggctcattgtcaatgaatccccacaattgccaacctcttagtgtccatgtatgatttttatctgatttttgttttataagtcttacaagacccattatccttctttcttatttctcagctgaacagaatcccgacataagtttgggatcatgaacccatgacatcaacatagtcaggttgagtatgaagaacactgtgctgtggtgacagggagcctggttttttcctggttttggcattagctctatgtgtgacctcaaccaagtcactcaagctgttacagtctctctatgtggatgaaatgaaggggttgaaatagctactcactgtagctctgaatggctataattctatgaaactagaaaagaataaaatgtgtttatagtcattctctgaccctatttctccttttttaataaacaaaacacaatcctaaaacacgtttgttttttcaaagacagtttttgctttattcacactccttcctctgctttgtgggatgatctcaatgaatttctgaggaactgagaagaccaatttccaaatcatctggagtaattaattccagtggttggagttaattatgattaggcaattcataaagtatacagtagaaaaaaagcagcaattgatgagacttcatctgcagtgagatttttttcaaaggcattcttctggcaatgcatttcaaagttaaacatatgtgtgcttcaatggtgggaaaatagtttacgagggtatcattagttttattttctcagaccatataggagccagggaaaaaagacctgtatacgccaaaggatgaccatgatgaaatgaatcttttcaagccatagatctatgatttgcatactctaagaaatgggcagccaaaacaattttctaaactcaggtacatgtgcacattgtgcagg

SEQ ID NO: 462594 - DNA, 873 bp, Homo sapiens
ggctcggagggagctgggaaggaggggcgattgcaattgaggatggaaccagagaccgttgttgaatttagggtcagaaaaatctgttgtctagatgaagaattaaatagagcaaagacaattgttgctccaactccaggtttcactcataaaacaacgtgggcgtttgtcagagactcagggttcaaactattggaggtccagatgacatctggcttctcagctcccccagaatactggctgcagtgcttatcagtgcattattcatcaaaactgatgatgcaaggcagaatgaacagtaatcccagagatcctgagatgagaaaagggtgtttgacttattcaaagaagaccaaggaagcccaaagaccagagaagagtgcaggaaaggggcggcggtctgagatgcagtcagagcagtggcaagcccccagagtctgtggcaaagacttcaggtttcatcctgaagaggaagacaggtctttggagagttttgatcaaggaagtgagatgaaatatcttaggcttacaaagaactactctgacatctaaatggaaaatggactgatgaagcaaaagaagccacaaggaagccagttcagaggctattgaaatgctccagttcctttggccacgctgtaatcactagtgagctcttctggcagttataagtcacatgtcatgtgacagattttcctgtatgattttcattaaaatgctttggaatcctgggacagaaagaaattatgtaaataggaacagcggtttattgaaaggaaagcaaatgtccagaagcaaaaacaaacaaacaaaaaacaaacaaacaaacaaaaacagaaaaaacttccccaaaagtaaagaatcacagcttta

SEQ ID NO: 462595 - DNA, 3929 bp, Homo sapiens
tgggcaaagccaacagcactggaatcctatctgtgcgaggaggtgtggtggtgagggacattggcgacaccaccatccagctcagctggagccgtggcttcgacaaccacagccccatcgctaagtacaccctgcaagctcgcactccacctgcagggaagtggaagcaggttcggaccaatcctgcaaacatcgagggcaatgccgagactgcacaggtgctgggcctcaccccctggatggactatgagttccgggtcatagccagcaacattctgggcactggggagcctagtgggccctccagcaaaatccggaccagggaagcaggtgagagtcctgtgtgtcccaaaaagctatcatcagggcagagaccctggcaccacttatagggaatgccaagccagccgcaattatgctgagttccaaccctgctcacagggttcagactctcacaaaacagaggaggacagaacaccaagactcagcggaggaggtggagcccccggagagctcatcgtcaactggacgctgcagaaaggaccactgcacagctctgactcaaacgcggataacttcctgtcccccttccacgcacccgctgccccttacgcgaatccacgctgcaggccccatgtcacgggagtaccagaacggagacggcttcggctacctgctgtccttccgcaggcagggcagcactcactggcagaccgcccgggtgcctggcgccgatgcccagtactttgtctacagcaacgagagcgtccggccctacacgccctttgaggtcaagatccgcagctacaaccgccgcggggatgggcccgagagcctcactgcactcgtgtactcagctgaggaagagatgaacgtgacctgggaacccgtgcagcaggacatgaatggtatcctcctggggtatgagatccgctactggaaagctggggacaaagaagcagctgcggaccgagtgaggacagcagggctggacaccagtgcccgagtcagcggcctgcatcccaacaccaagtaccatgtgaccgtgagggcctacaaccgggctggcactgggcctgccagcccttctgccaacgccacgaccatgaagcccccaccacaccctggcaccgtcatttcccactccgtggcgatgctgatcctcataggctccctggagctctgatcctggaacccctccctctgcgccgcagctggacgccacctccgacggacacagccagccccttcctgctgccaagagatggccctctgggaccctatacggactccgccacttgagagcagtcctaggcccggcaggaacaccagacatgaacaggttgaagaactggagcgaagtgcacacctcaccatccttcagtctaaggaagaagggcaagccctgggaccaagagctctcccgccttctccctcgagcagcagcaaggaccctgacgctgtccccgataactccctaggggctcctgcctgcccaagcggctgagaaccagcgccccgatgcctgaggctgggagcctgagccccttcagctttgaggggggtgatactccaggctgtttggggtgggagccaaaaagagttgagaggccagggcccttggtggaaaggggcaccagccttggtctgagatagtcacaacccaggtgacgatgccctctcagccaacactgccaacctgaccctgtcatcccgattgacagcgccacttcaggtggctgggtgactaaagggcttgtcttggtggggtctcccacccctccaagacccattctgcacagtccctccagggtttgggcaggagatggccaatcatgcgcccacctctccagtgctgcctgcagtcagctcggcctccccgacctgcagccccagactctgctctcccagcactgactcactcctgcctgggaggggaatgcagcattcatgctgtgtgtcctggtattgggaggtttctgggaagggcagaggataaatgtggccctgcctgctcccaggtatacctaggaccacctggccagatccgctcccagacggccttggactgcttgcatttccccggagaaaaaggggttaataaatgggccatcctttcctgagctctgggtatactaccagtcacagaacgtcagagctggaagaagccttagagctcaacttcttcaagcccctcactttacagatgaggaaatggaggtggtccagagagggtctgggattcccaaggtcacacagcccagaagagatggggctgggttaagaactcgagtcttccacctttctgttcaaggctgtttgtctacccagaggaaggaggcactgctgaatggctatggcctggctaagaaggtgattagtcagtagggtgtgaaaattctacttcaaggggttcggattggtgatcatggggattggcatggctgggttcccgtccaaggtgtgggcagagcttctaccaaacttcaacatggagggctgacttgaagctccctgtccccctcactcttgccccaagaaaagaggccaaagcaagagcagattccctaggcaagagcagcagcacaactaggaaaccccaaagcccatgctccgacaggtggcccttcacagggggcagcgggacaggcatcttgaagggcatatgtcctcggaagctccgagcctgttttctgtagtttatagttagagctctattttgttatggttttttaaacttttaagtcctgctctattttcctgggcaggtttatgttgatgtttacccactacaattttttaaaaatataagctcacatgccttttccctgccacagccaaacccccactgcaccctacccacccacccctagcccaggtcagctttcctggagctggctaatgaaagcctcctcacctcttcccaacccttacaagcaagggtgctaggggctcagctatacgaccattctccctgacagggagtccaaacttggcctagcatccctcctggcccccctctggccacgacttggcctgtgcctggttctctatcagaaaggggatgctgaacaaaacctccttccaagttttatccaattcgttcctcattgcctcgggctgcgtcaggggaagcaggggacaggtgtccagttgctgggccgagggaggagctggtttggcataggacctaaccagtgaagctagaggctacagccactaaacttgcttcaggccaacgatagttactcacaagtaagtaccttaatgctaatgaggtccactaaaaaggggaggaaggcagacctcctgggagacccacgaagggtttttagccagggaaaactgagccccaggaaaacctaaccactgggcaggcagaatttgtttgagggatagaacgacaacaaaataaatgttcctgcagcctgagatttcaggtagagtactgactaaggtttaataagacaataggtgacctgaggacatgcaagcttgtaaaatgcaacagcctcctgctagagtgacttgtacatgagcttgcttgcagaagactagattagatgtttctcaggatcccctcctgcgcaggggttctctgattttcgtgttctctgcccagatgggctgggggagttgagagtgtgcttattttcactgcgatcatgagaccacagttctgggttatctcctctcatacatcaagccccagaggaggcggcaagaggaacagccacaaacaagtactttaccccacagcttagtggccagtaaacaccctgggggactaggaaaaggaaccaactgtaggcacctctccagggcctagggagacaagtgtcctctcttctgcatacatttgggctccccttacagagccctttgccctggctctctggtccttgttgctctaacagtccagatgtaca

SEQ ID NO: 462596 - DNA, 2313 bp, Homo sapiens
  misc_feature (1)..(1): n is a, c, g, or t
  misc_feature (5)..(6): n is a, c, g, or t
  misc_feature (8)..(8): n is a, c, g, or t
ngtgnncnaggcacaccatgcattaccccatgggtcatcgtcttgtgcatggcaccgaccccctgaccctgtgtgtccccaggatgctgcccatcacagaccgcctgctgcacctcctggggctggagaagacggcgttccgcatatacgcggtgtccacccttctcctcttcctgctcttcttcctgttccgcctgctgctgcggttcctgaggctctgcaggagcttctacatcacctgccgccggctgcgctgcttcccccagcctccccggcgcaactggctgctgggccacctgggcatgtaccttccaaatgaggcgggccttcaagatgagaagaaggtactggacaacatgcaccatgtactcttggtatggatgggacctgtcctgccgctgttggttctggtgcaccctgattacatcaaaccccttttgggagcctcagctgccatcgcccccaaggatgacctcttctatggcttcctaaaaccttggctaggggatgggctgctgctcagcaaaggtgacaagtggagccggcaccgtcgcctgctgacacccgccttccactttgacatcctgaagccttacatgaagatcttcaaccagagcgctgacattatgcatgctaaatggcggcatctggcagagggctcagcggtctcccttgatatgtttgagcatatcagcctcatgaccctggacagtcttcagaaatgtgtcttcagctacaacagcaactgccaagagaagatgagtgattatatctccgctatcattgaactgagcgctctgtctgtccggcgccagtatcgcttgcaccactacctcgacttcatttactaccgctcggcggatgggcggaggttccggcaggcctgtgacatggtgcaccacttcaccactgaagtcatccaggaacggcggcgggcactgcgtcagcagggggccgaggcctggcttaaggccaagcaggggaagaccttggactttattgatgtgctgctcctggccagggatgaagatggaaaggaactgtcagacgaggatatccgagccgaagcagacaccttcatgtttgagggtcacgacacaacatccagtgggatctcttggatgctgttcaatttggcaaagtatccggaataccaggagaaatgccgagaagagattcaggaagtcatgaaaggccgggagctggaggagctggagtgggacgatctgactcagctgccctttacaactatgtgcattaaggagagcctgcgccagtacccacctgtcactcttgtctctcgccaatgcacggaggacatcaagctcccagatgggcgcatcatccccaaaggaatcatctgcttggtcagcatctatggaacccaccacaaccccacagtgtggcctgactccaaggtgtacaacccctaccgctttgacccggacaacccacagcagcgctctccactggcctatgtgcccttctctgcaggacccaggaattgcatcggacagagcttcgccatggccgagttgcgcgtggttgtggcactaacactgctacgtttccgcctgagcgtggaccgaacgcgcaaggtgcggcggaagccggagctcatactgcgcacggagaacgggctctggctcaaggtggagccgctgcctccgcgggcctgagcgtgggcgcgcccctgcggctcccgagggtccaggccccgcccccaaaggaccaggactcgccccaaagatcccgagggcataggccacccccctcgaagttcaggttcagctcctggatgaccaggcaccgctgttgagcagcctggtggtactggccacgcccctcaaggcaaggctcctccccttagggggcctgatcccgccccttgaggcttaggtcccgccccctgacttctcgcacctgtcctgtttgagggaccagggtcgaccctgcccccttgggctcaggccccgcccccaggatcctacggattgaggtcctcaggccacgcccctgcagatccaggtctccaggccttgcccactgagccttcagaggacctaagacccacctatgactcagggcccaccacaccccacccccccccaactggctgaacccctggcaggcttccaaactgaggaaagctggagcctgacagttttgggttgggcatgtatatttgggaagccttagtataaatattttatatatttttccaaaagctagtgaagcgatttcaaatgggggtgatttttcctaccagatgacattcgttgttatttggaaacatttttggttgtcacaacc

SEQ ID NO: 462597 - DNA, 661 bp, Homo sapiens
  misc_feature (2)..(3): n is a, c, g, or t
  misc_feature (9)..(10): n is a, c, g, or t
  misc_feature (12)..(12): n is a, c, g, or t
gnngctctnncncaggctctctcagttcagttcaagcccagaggtgatggctgatgagtggtttatcttccagctacatgttttcgaccttcacacaggaggccctcaattaaaagggaagcctgagctatggtcagctgtaatgaacatcaactgtcctgtagcctgtggccagatgccctccccacaggggcctctcgcgcagactcagggagctttggtcacctgggcccaacaagtgtggagcagagagcagaacacagtagtaatgatggcagcaaaagcccatctggggcctgagactagaggaggaggaggctggccagaccctcctcagatgcgcagaggacagcttcaggataaggagagatcagatcatgcctgctccatctcggcgggctcatcttctctcgcccccatctgcatggtcctcttgattttcttcataataataacactgaaatcctttgagtgctaacattactgtctgtgctggtggggaagccagtgaagtcagatagggcataggggctgctgtaaaaggcttcagcttttattctgaatgcaatggagtcccgtcggaaggttttgaaaaaaggcgtgacattgtctgctttctactgtagaacagaagaaacaagtggaggtgggaggagaggaa

SEQ ID NO: 462598 - DNA, 699 bp, Homo sapiens
  misc_feature (2)..(3): n is a, c, g, or t
  misc_feature (9)..(10): n is a, c, g, or t
  misc_feature (12)..(12): n is a, c, g, or t
gnngctctnncncaggctctctcagttcagttcaagcccagaggtgatggctgatgagtggtttatcttccagctacatgttttcgaccttcacacaggaggccctcaattaaaagggaagcctgagctatggtcagctgtaatgaacatcaactgtcctgtagcctgtggccagatgccctccccacaggggcctctcgcgcagactcagggagctttggtcacctgggcccaacaagtgtggagcagagagcagaacacagtagtaatgatggcagcaaaagcccatctggggcctgagactagaggaggaggaggctggccagaccctcctcagatgcgcagaggacagcttcaggataaggagagatcagatcatgcctgctccatctcggcgggctcatcttctctcgcccccatctgcatggtcctcttgattttcttcataataataacactgaaatcctttgagtgctaacattactgtctgtgctggtggggaagccagtgaagtcagatagggcataggggctgctgtaaaaggcttcagcttttattctgaatgcaatggagtcccgtcggaaggttttgaaaaaaggcgtgacattgtctgctttctactgtagaacagaagagttttctgtgcttgtctccagttccttttggaggactaagtgtggctgctgtgttaagcataga

SEQ ID NO: 462599 - DNA, 5841 bp, Homo sapiens
  misc_feature (1)..(2): n is a, c, g, or t
nngtcagagcattcccgacatctccacgctgccctggttctcgctcagtacccctatggtctgcctcctcttcatccgtgccacccgggacctggtggacgacatggggagacacaagagtgacagagccatcaacaacagaccctgccagattctgatggggaagaggtgaggctggggctgcagctggggatccgcggggacacgggggctccagcccagcagggtcatcggcctcggcaagtgtccatcaccttccgtgctccctgatctcccggctggttgagtccgacaggaaccgggcctgcattcattaggcgtttggccgggacgaggacagaggccgaggccctgatggcgaacccttgcagagcttagggctcgggcgatggggaggacaaggaaagtctgaagaggacgtgggtgcaggaccctggaggtcactgggtgggagcgtggacccgcggggagtggggtgggagcccggggaaggcttcctgagggggcaaaggcccggaggtggggactgcagctgcgggccccccgtcatcccgtgcctctggtctcccggtgtggggagggtttgcagagggaggggcctccttcacaaccccctctccccgcagcttcaagcagaagaaatggcaggatctgtgcgtgggggatgtggtctgtctccgcaaggacaacatcgtcccagtgagctggggttgaccccgaggtcccagaaccacgcgccccctcaccgagagcacccctcccagggtggggagggctgccgcacccccaatttgtcttgcatcccctcttgcaacgctgccccccactccacaccaggccgacatgctcttgctggccagcacggagcccagcagcctgtgctatgtggagacggtggacattgacggggagaccaacttgaagttcagacaggccctgatggtcacccacaaagaactggccactataaagaagatggcgtcctttcaaggcacagtgacgtgtgaggcgcctaacagtcggatgcaccacttcgtggggtgcctggaatggaatgacaagaaatactccctggacattggcaacctcctcctccgaggctgcaggattcgcaacacagacacctgctatggactggtcatttatgctggttttgacacaaaaattatgaagaactgtggcaagatccatttgaagagaaccaagctggacctcctgatgaacaagctggtggttgtgatcttcatctccgtggtgcttgtctgcctggtgttggccttcggcttcggtttctcagtcaaagaattcaaagaccaccactactacctctcgggggtgcatgggagcagcgtggccgcagagtccttcttcgtcttctggagcttcctcatcctgctcagcgtcaccatcccgatgtccatgttcatcctgtccgagttcatctacctggggaacagcgtcttcatcgactgggacgtgcagatgtactacaagccgcaggacgtgcctgccaaggcccgcagcaccagcctcaacgaccacctgggccaggtggaatacatcttctcggacaagacgggcacgctcacgcagaacatcttgaccttcaacaagtgctgcatcagcggccgcgtctatggtgcggccccgacacctgagctcccagctgggtcctcgatcttcaaggggctcagggtgcctgagaaccagagccacgtggtggaaactgaggtcagctttcgccccaagattgctcggggtgtcggttccagggccacaggcctggcttgtgtggctgcaccagtggcccccggaagcctgaaactaggggtcaggggctatgggatcccgaatggggggcctgtgggagctgaagcaggaagctgtgtctttccccagggccggattcagaggccacgacccgacctaagcggcccacccacagccggcccgtgcccccgccacccccaggagaacccctacctctggaacaagttcgccgacgggaagctgctcttccacaatgcggccctgctgcacctcgtgcggaccaacggggacgaggccgtgcgggagttctggcgcctgctggccatctgccacacggtgatggtgcgggagagcccccaccagctgttgtaccaggcggcctcccccgacgagggggcgctggtcaccgcagcccggaacttcggctacgtgttcctgtcccgcacccaggacaccgtcacgatcatggagctgggggaggaacgggtctaccaggtcctggccataatggacttcaacagcacgcgcaaacggatgtcggtgctggttcgaaagccagagggcgccatctgcctgtacaccaagggcgccgacacggtcatcttcgaacgcttgcacaggaggggggcaatggaatttgccacagaggaggccttggctgcctttgcccaggagaccctgcggacactgtgcctggcctacagggaggtggctgaggacatttacgaggactggcagcagcgccaccaggaggccagcctcctgctgcagaaccgggcacaggccctgcaacaggtgtacaacgagatggagcaggacctcaggctgctgggagccacagccatcgaggacagactccaggacggtgtccctgaaaccatcaaatgtctcaagaagagcaacatcaaaatatgggtgctcaccggggacaagcagggcagccagtgcggggcgggtcgcagaggcgctgagctggtctgcttcgcagaaacggctgtgaacatcggcttcgcctgcgagctgctgtcagagaatatgctcattctggaggagaaggagattagccgcatcctggagacctactgggaaaacagtaacaaccttctaaccagggagtccctgtcgcaggtcaagctggccttggtcattaacggagacttcctggacaaactgctggtgtccctgcggaaggagccgcgcgccctggcgcagaacgtgaacatggacgaggcgtggcaggagctcggccagtccaggagggatttcctctacgccaggcgcctgtccctgctgtgccggaggttcgggctcccgctggctgcaccgccagcccaggactccagagcccgccgtagctccgaggtgctgcaggagcgcgccttcgtggacctggcgtccaagtgccaggcggtcatctgctgccgcgtgacgcccaagcagaaggccctgatcgtggccctggtcaagaagtaccaccaggtggtgaccctggccatcggggacggtgccaacgacatcaacatgatcaagagtggctgcttgtgccctgcagccgcggacgtgggcgtggggctggcgggccaggagggcatgcaggcagttcagaacagcgacttcgtgctcggccagttctgcttcctgcagcgcctcctgctggtgcacggccgctggtcctacgtgcggatctgcaagttcctgcgctacttcttctacaagagcatggccagcatgatggtgcaggtctggtttgcctgctacaacggcttcaccggccagcccctgtatgaaggatggttcctggctcttttcaacctcctgtacagcaccctgccagttctctacattgggctctttgagcaggacgtgagcgcagagcagagcctggagaagccggagctgtacgtggtggggcagaaggacgagctcttcaactactgggtcttcgtccaagccatcgcccatggtgtgaccacctctctggtcaacttcttcatgacactgtggatcagccgcgacacggcgggacccgccagcttcagcgaccaccagtcctttgcggtcgtggtggccctgtcttgcctgctgtccatcaccatggaggtgggcaaggtcctcacctccccggggccttggacatggcctatggaggcctcctcccctggggacccctgctttgggggcattgccaggtgcccttcctggaccccaggggctggtgtcctggtgcaagccccgctaggccccggatttaccccaccgctgcctgtccaggtcattcttatcatcaagtactggaccgccctgtgcgtggcgaccatcctcctcagccttggtttctacgccatcatgactaccaccacccagagcttctggctcttcagagtatcccccacgaccttcccgtttctgtgtgagcccccatggggaagtgggacgggcgatgccgacctcagcgtgatgtcctctccctccatcctgctggtggtcctgctgagtgtgtccataaacaccttccctgtcctggccctccgagtcatcttcccagccctcaaggagctacgtgccaaggaggagaaggtggaggagggccccagcgaggagattttcaccatggagcccttgcctcatgtacaccgggagtctcgtgcccgccgttccagctatgctttctcccaccgccagctgacgttggagagccagccagactcctcggaggagaagtcagcatttttgaagccctccacaccgttccggaagagctggcaaaaggagcctcacacccccaaggaggggacggtgccacttccagacaagacccacaaatctcaggtggagactctgccaccaagtctggaagaatcgtccacgtccacgagcgagcagcctatggaggtggagctgtggcccgcggagaagcagtcatcatcatccatggagtggctgctggtgcccggggaggagcagctatccttgcccccagaggagcagtcattgccctctgcggaggggaccagggttcagcagtgacgtagcatctgaatccctagacccatctgatgaagaggcatcttcgagcccaaaggagtcacgctggcatatcaggaagatgtccttcctgggaagaagaagctccagccagttctgctgcaagtcaaccagcatgcagggggccttcctctaaagacaaggactccacatgcttttctttttctaataaaccagggtccatctgaccccagcgctaattcaggctccctctttccctacactttttttgtgatggaatattccttcccggtttttaaaatcaaaacactgacctctagtggtccagccgggtatttgcagggaaaactttccttcttcatgctgggcctctgttcccaagctggcacatctgtgcccctttccacctccagggactatctggggatggctcagggacgtggcctcatggcacaagaggagtcagaggcagaggacattgtcccagagccccctttgatgattttggggagtcctctgttctgactcatttaaataagaaatctgtaaacgccactggtcctttctgccgcagtctctctcgcgatcacgctccctctaactttccctctggtctccagccctgacattcaatgcgtctcccacggaactcgtcaaagaaacgacatgccatcgtctgcaaaattataatttaacggtataaagcttcaagtcacgtattccaaaaactagctaaggatttttttttaatcacataaactatacattaaatattttgaggtatttcagagaaaattgtcaaaggctcgaaggaattgtgctggaggtgttgatccctgcatggagaacgcatgctctttggtatgtgacagccaagtgggcatgcggggaggcaggagagggcctgaggggccggcgggcaggtcggggatagagccttctgtgggggtctggccaagtttggggtggggtccggaaacaggtaggggtgtgtgtgtgtgtgtgtgtgtgtgtgtgtgtgtgtgtgtgtgtgtgatacgaagatatctgaaaaggatccaggag

SEQ ID NO: 462600 - DNA, 2266 bp, Homo sapiens
  misc_feature (1)..(1): n is a, c, g, or t
  misc_feature (9)..(10): n is a, c, g, or t
nctcctctnngccaaggaagcggccccctaaaaccgcttccgggactgcagcttctctccccacactctcaaggagcagagccttctcgggccacaattctccgcgacccaaaaataactacacagatgtgaggaaaagggccaaagcctacagcacaaggtggttctcagttaaagccttatcgcttacggccaggaagctcgaaacctaacccagcgccagccttttatagccggtccctcgagccccgccctagcaacttctcctagcaacgcctcgccccgtgctctgccgccttatctgcctccgccaggcctttcctgttcccctcccccagcccgcaccgccccgccgcccggctcacttgacccgccccaggggaggggaggggtgaacggaagcgtgaggggcggggcgttggaagatgctcgcgtcatcaagaggcgccgggcgagttgcggcgcctggtgtctcagagaggcttgaggttcgggtagtcggtgacatggcggaggccgcggcgctggtgtggattcgcggccctggcttcgggtgcaaggcggtgcggtgtgcctcgggtcggtgcaccgtccgggattttatccaccggcactgccaagatcagaatgttccagtggaaaacttctttgtgaaatgcaatggagcactcattaacaccagtgacacagtgcagcatggagctgtttatagtttggaacccagactttgcggtggaaaaggaggttttggatctatgctccgagcacttggtgctcagattgagaagacaaccaatcgagaagcttgtcgggatctcagtggaaggagactacgcgatgtcaatcatgaaaaagcaatggctgaatgggtaaaacaacaagccgagcgagaggctgaaaaggagcagaagcggctggagcgactgcagcggaagcttgtagaacccaagcactgcttcaccagccccgactaccagcagcagtgccatgagatggctgagcgtctggaggattccgtcctcaaaggtatgcaggctgcctccagcaagatggtttcagcagaaatcagtgagaatcggaaacggcaatggcctactaaatctcaaacagacagaggagccagtgcgggaaagaggagatgcttctggttgggcatggagggactagagactgcagaagggtccaactctgagagttcagatgatgacagtgaagaagcaccaagcacttcaggaatgggtttccatgctccaaaaattggtagcaatggtgtcgagatggcagccaaatttcccagtggttctcagagggcgagagtagtgaatacagaccatggatcaccagaacaactgcagatcccggtgactgactctgggaggcatattttagaagactcatgtgctgagctgggggagtccaaagagcacatggaaagcaggatggttacagaaacagaagagacccaggagaagaaggcagagagtaaagaacccatagaagaggagcccactggggctggactgaataaggataaagagacagaagaaaggactgatggggaaagagttgctgaggtagcacctgaagaaagggaaaacgttgccgttgccaaactgcaggaaagccagccaggaaacgcagttattgataaggaaactatagatttattggcgttcacctctgttgcagaactggagttgctgggtttggagaagctcaaatgtgaactgatggcccttggactgaaatgtgggggcactctgcaggagcgggcagcaagactcttctctgtcagaggactggcaaaggagcaaattgacccggctttatttgccaagcctttgaaagggaagaaaaaatgagtatcatcagagctgattcctatttgtttatagtgtctaccatttacaacctgcataatgtggactcttgaccagtattcctgttgatattaaaagctaactttttagtaacccaattctaactatcccctttttccttgtcagggctgtagaattaatgtctgaaaccatctgggccttaaattttctttgtctggttttctatagtgtatttaataaatatagggctattcacattttttggtttgatcttggtgtcatttaggtaatgaatctatccaagaaatctatccttttgacccaggctgaataatattccattgtatgaatagactccattttgtttatccatttgatttgtttgttttgagatggattctcactgtcacccaggttgtgggtcc

SEQ ID NO: 462601 - DNA, 450 bp, Homo sapiens
aaataactaacgcagggataaataattaggtttggggagggctgggtatgaacttgtcagtctcaaggttacaaattgtgcagtggtgctttaaaaaatctgctcctagactagaatgtttatcattttaaatctgtgtaaatttgagattaactgtataaaatgttggtatcttaagaaatttaaatctggagctgtagattgcagctctttttgcaatccatgttatttatgatttctttaaacttagtccctatagtagaaactgagttgttaaaatttctggttaggtatgcaggctgcctccagcaagatggtttcagcagaaatcagtgagaatcggaaacggcaatggcctactaaatctcaaacagccatttaggtaacagccatttaggtgcagccatttaggtacagccatttaggtaacagccatttaggaggatcctg

SEQ ID NO: 462602 - DNA, 1530 bp, Homo sapiens
aaataactaacgcagggataaataattaggtttggggagggctgggtatgaacttgtcagtctcaaggttacaaattgtgcagtggtgctttaaaaaatctgctcctagactagaatgtttatcattttaaatctgtgtaaatttgagattaactgtataaaatgttggtatcttaagaaatttaaatctggagctgtagattgcagctctttttgcaatccatgttatttatgatttctttaaacttagtccctatagtagaaactgagttgttaaaatttctggttaggtatgcaggctgcctccagcaagatggtttcagcagaaatcagtgagaatcggaaacggcaatggcctactaaatctcaaacagacagaggagccagtgcgggaaagaggagatgcttctggttgggcatggagggactagagactgcagaagggtccaactctgagagttcagatgatgacagtgaagaagcaccaagcacttcaggaatgggtttccatgctccaaaaattggtagcaatggtgtcgagatggcagccaaatttcccagtggttctcagagggcgagagtagtgaatacagaccatggatcaccagaacaactgcagatcccggtgactgactctgggaggcatattttagaagactcatgtgctgagctgggggagtccaaagagcacatggaaagcaggatggttacagaaacagaagagacccaggagaagaaggcagagagtaaagaacccatagaagaggagcccactggggctggactgaataaggataaagagacagaagaaaggactgatggggaaagagttgctgaggtagcacctgaagaaagggaaaacgttgccgttgccaaactgcaggaaagccagccaggaaacgcagttattgataaggaaactatagatttattggcgttcacctctgttgcagaactggagttgctgggtttggagaagctcaaatgtgaactgatggcccttggactgaaatgtgggggcactctgcaggagcgggcagcaagactcttctctgtcagaggactggcaaaggagcaaattgacccggctttatttgccaagcctttgaaagggaagaaaaaatgagtatcatcagagctgattcctatttgtttatagtgtctaccatttacaacctgcataatgtggactcttgaccagtattcctgttgatattaaaagctaactttttagtaacccaattctaactatcccctttttccttgtcagggctgtagaattaatgtctgaaaccatctgggccttaaattttctttgtctggttttctatagtgtatttaataaatatagggctattcacattttttggtttgatcttggtgtcatttaggtaatgaatctatccaagaaatctatccttttgacccaggctgaataatattccattgtatgaatagactccattttgtttatccatttgatttgtttgttttgagatggattctcactgtcacccaggttgtgggtcc

SEQ ID NO: 462603 - DNA, 213 bp, Homo sapiens
ccatatgctagtagtaagcatggctcacctttctaagagaatatcacagtatgaacaagtgcattaattcgtcagagacattttatatataaaagtgtatatgtaatatatctattcagttatatctcttcctccctcatccccagaatggctgaatgggtaaaacaacaagccgagcgagaggctgaaaaggagcagaagcggctggagcga

SEQ ID NO: 462604 - DNA, 2217 bp, Homo sapiens
  misc_feature (1)..(1): n is a, c, g, or t
  misc_feature (9)..(10): n is a, c, g, or t
nctcctctnngccaaggaagcggccccctaaaaccgcttccgggactgcagcttctctccccacactctcaaggagcagagccttctcgggccacaattctccgcgacccaaaaataactacacagatgtgaggaaaagggccaaagcctacagcacaaggtggttctcagttaaagccttatcgcttacggccaggaagctcgaaacctaacccagcgccagccttttatagccggtccctcgagccccgccctagcaacttctcctagcaacgcctcgccccgtgctctgccgccttatctgcctccgccaggcctttcctgttcccctcccccagcccgcaccgccccgccgcccggctcacttgacccgccccaggggaggggaggggtgaacggaagcgtgaggggcggggcgttggaagatgctcgcgtcatcaagaggcgccgggcgagttgcggcgcctggtgtctcagagaggcttgaggttcgggtagtcggtgacatggcggaggccgcggcgctggtgtggattcgcggccctggcttcgggtgcaaggcggtgcggtgtgcctcgggtcggtgcaccgtccgggattttatccaccggcactgccaagatcagaatgttccagtggaaaacttctttgtgaaatgcaatggagcactcattaacaccagtgacacagtgcagcatggagctgtttatagtttggaacccagactttgcggtggaaaaggaggttttggatctatgctccgagcacttggtgctcagattgagaagacaaccaatcgagaagcttgtcgggatctcagtggaaggagactacgcgatgtcaatcatgaaaaagcaatggctgaatgggtaaaacaacaagccgagcgagaggctgaaaaggagcagaagcggctggagcgactgcagcggaagcttgtagaacccaagcactgcttcaccagccccgactaccagcagcagtgccatgagatggctgagcgtctggaggattccgtcctcaaaggtatgcaggctgcctccagcaagatggtttcagcagaaatcagtgagaatcggaaacggcaatggcctactaaatctcaaacagacagaggagccagtgcgggaaagaggagatgcttctggttgggcatggagggactagagactgcagaagggtccaactctgagagttcagatgatgacagtgaagaagcaccaagcacttcaggaatgggtttccatgctccaaaaattggtagcaatggtgtcgagatggcagccaaatttcccagtggttctcagagggcgagagtagtgaatacagaccatggatcaccagaacaactgcagatcccggtgactgactctgggaggcatattttagaagactcatgtgctgagctgggggagtccaaagagcacatggaaagcaggatggttacagaaacagaagagacccaggagaagaaggcagagagtaaagaacccatagaagaggagcccactggggctggactgaataaggataaagagacagaagaaaggactgatggggaaagagttgctgaggtagcacctgaagaaagggaaaacgttgccgttgccaaactgcaggaaagccagccaggaaacgcaaactggagttgctgggtttggagaagctcaaatgtgaactgatggcccttggactgaaatgtgggggcactctgcaggagcgggcagcaagactcttctctgtcagaggactggcaaaggagcaaattgacccggctttatttgccaagcctttgaaagggaagaaaaaatgagtatcatcagagctgattcctatttgtttatagtgtctaccatttacaacctgcataatgtggactcttgaccagtattcctgttgatattaaaagctaactttttagtaacccaattctaactatcccctttttccttgtcagggctgtagaattaatgtctgaaaccatctgggccttaaattttctttgtctggttttctatagtgtatttaataaatatagggctattcacattttttggtttgatcttggtgtcatttaggtaatgaatctatccaagaaatctatccttttgacccaggctgaataatattccattgtatgaatagactccattttgtttatccatttgatttgtttgttttgagatggattctcactgtcacccaggttgtgggtcc

SEQ ID NO: 462605 - DNA, 2453 bp, Homo sapiens
  misc_feature (4)..(5): n is a, c, g, or t
  misc_feature (7)..(10): n is a, c, g, or t
  misc_feature (604)..(604): n is a, c, g, or t
  misc_feature (606)..(606): n is a, c, g, or t
  misc_feature (608)..(608): n is a, c, g, or t
  misc_feature (610)..(610): n is a, c, g, or t
  misc_feature (612)..(613): n is a, c, g, or t
gagnncnnnnagcactgcagccccagcctgagcagcagtcgttctcacagatgcacctgggccaccgcggccacatgcgtcgcagtgagagcacctactctgtaaatagtactggccggcgggggcgtggcaccctgggacagcctccacctggacggcgatggaacccagcgatgcaggccatagtgccagcaagagcccctgcatgttggtggccctgcggccaaccaacgtggaccgtgagggagacaagttctttcagtcgcattacacctacaatccacagttcgagtaccaggagcccatgcctatggctgtggtgaagtactgcgaggcctctggacagttcatccatcaggcagttggcatcattgaggctgttctggagaagtttggaacctacgaacactttgaggctgccaccggcaggcagctgctcaccaagtgccagatatggtccattgtggaggttgtggtgcagctgagtgaagacctgctgtcccaggcggtgatgatggtggagaacagccggcccacattggcggtcaacctgaccagagcccgccagtactggttggagggcatgctgtggcatgaaataggncngngngnnggcacccactacctgcggggcggtaacaacgcgcgccagccgtggcacaacgcggagggccggctgcggtacgggctacggccggcgaaccccacgaggagggcctggccaccctgcacagcgtgctgctccgcaagcagccgttcctgtggcgcgctgcgctgctctgctctgctacaccagccgccacgctgtgcgtctgtccttccgccagctcttccaggacctggcgcgctacgtgcgggacgccgacgtgcgctgggacaaggaccaggtgtacctgaacggcatcctgtgcattctgggacatcgccagaccatcgatttcccgctgctgacctcactgggcaaggtgtcctatgaggatgtggaccacctgcggccccatggggtgctggataatacccggatgccccaccttatgcaggacttggcacgctaccggcagcagctgaagcacatcatggccaccaaccggctggatgtggcggagctgggtcgcctgctgcccgactgatcattcgtgctgtctgcttctcactgggtcctggtgggggtcgggatcccttctcctggggtgattgatggcctgagcttggggtactacctggggtagtagagacccagttggtctggggtgtgctttccaacattttgcctctctcactggtcatgtatttattccatatttatatgatctacttcctgtggctgggagcagcagctcctgaaggttccatggcagggaacaagacactccttctggaaggcaccgattttcctagccccactcccattacacgcacacacacacacacacatacagagtgattcaggccttgtgaatcaagcccaagagctcccttggccctgtccccactccctccactggcctctgcttttcctgtctttgcccacaccctcacagctggtctctggcacaggctggcatagcctaggagcagctgcagttgtccctgagggacaggccctagagtttggtggcccaagtcctaaacccctcctggaccaggtgaggtgcagagcgccttttgtgtaagttactggtcagaatcctcactgagctcccagtccagagggaagccagacaattaaaacagtaataacaaaaaaaaaaaagaaaaaagaaaaaaagggataagaagcctgacatataaatagcatgaattgataagaacaaacaacccgacagaacgatgcaggaaaatgctaaaagtgtttaaatcctagacttgaaaagaaaaaatcgccaacaaaatgtgaaataaaaatgctcagtttaattagttaagaattcaactacattcaaatgaaaataaaagccatttgtcatccttagaaagaaaaatgataaaaacaggagtaaaatcctgtgcgtgaggccaaaggaaattggacactcttgtccctcacatggaggagggcaaagtactaaaacctttccgaaaaatatctattaaagtaaaaacaggcacactctaaataagtcatcccacttttgcgaatctgttctgtggaaaatgcatgttcttcctaacctttgctaagcatttaaacacactcatatatattatgacgtataaatgtttgtgcagtgatatctattatggcactgttcattgtggcaaaaatccggaagcaaccttatgtccattaaaggtgagaggattgaataaattatgcatatctgcactatggaatattttgaagctattaaaaaagaatgatatgattttataaatacttaattggagaaatgttcatgacattggtaatgaaaatgaaagagtaatttgtaaagcatgaacttattgaaaaa

SEQ ID NO: 462606 - DNA, 2424 bp, Homo sapiens
  misc_feature (2)..(2): n is a, c, g, or t
  misc_feature (5)..(6): n is a, c, g, or t
  misc_feature (8)..(8): n is a, c, g, or t
tnttnntngaaccagaggccggggcaagcgcctcttaggctcccacagccccctgtgttcctcactccaggtctgaccttctgggtagtagttgtctaattaggtgcgtatctccttcgactggggtgcctgcgggaggcctttcattgtcccgcgctaggattatgcaaataagcaggcctcgggcccaggatccagtccgaactagcgccctccacccccagcgcatcccagttttgtaaggcgcgttcctgccccgcacacgcacgcgcgaacccttcagcttcttgttcctttgggccgcgggctgtaccaagtaaacccaggcagcgaggggcaaagcacggcgccccccgcgcgggtctcgtcgacggcccgacgcgcatagcccctcttcccacagcgctacaggactagtccgtctcgccgcgcaagcgccctaggctcttcacgccccctgcgcgctgtcctaccctacttgcgacgcaggcgcagaggctgggcgtgcagccgccgccgcagagccggagcgggggccgccggcgccgcatccctctctacctgccaacatcctgtattagagaacttgtggccggaggtgtggctgtggagagctggccggggagggacgctgctcagctgctgctctgctcctgtctcctgtcccctcccccggtcatgacagagacccgtgagccagctgagactgggggctacgccagcttggaagaagatgatgaagacctttccccaggctggaagggagtggcgcaatcatggctcaaatgcagcctggaactcctcggctcaagtgatcctcccgcctcagcctcccgagaagctggtactacaggccccgagcattcctctgattcagaatacactctctcagagccggactccgaagaggaagaagatgaggaggaggaggaagaggagaccactgacgatcctgaatatgatcctggctacaaggtgaagcagcgccttggcgggggccgtggtggcccatcccgccgggccccccgtgcagcccagcccccggcccagccttgccagctctgtggccgctcaccccttggggaggccccaccgggaaccccaccctgccggctctgctgccctgctacagccccccaggaagcaccagcccctgaaggcagggccctcggggaggaagaggaggaaccacctcgggctggggagggccgaccagctgggcgggaggaggaggaggaagaggaggaggagggaacctaccactgtacggaatgtgaggattccttcgacaacctgggggagctgcacgggcacttcatgctgcatgcccggggtgaggtgtaggcagagcccccatacggggagcttggcagaaggggtggggtgggaggagggggctgaggaaattggggttgtgacagtggtcatgggggatggggtactgccggtctgtgttgtcttagaagtagatgtgtgatggccagaataaaagccaaaatctgtatctgtgtgtgttggttcagagtgtgtgtgtgtgtgtgtgtattcccgcccgtgtgtgtgtttgtgtgtgtgtgtgtgtgtgtgtattccccctgggctccttcttggggaaccttggggtcttttgggaaagataacatttactgcgtgcttgtattcgatgaggtttccatgtatttacttacagaccccataatgtaaaggctctaataatagaattttgtttctcactcacaaaatggtgctgggtgagtcatttggggacccaggccatcccttaagcctgttgtctcccccatggtccagactgggtggccatagcctgggtcctgctggcagaagaggacaggatgcctggtgaggtgcacgtgttgtcttacaagccctggcctgccaggggcacacactgcttccattgacacgcctttgctgagaaattagatatgtggccgcagctaactgcaaaaacaacctgggagaagcagtctagccaagcgcccagaaagcagaaaacagttcatggaggacagctagggctttctgccacatagcctaggaacttccacaaagaggactttaattataatcacagctacgctttctcagcgcttcctgggtatctggtgccagtccaagggctttatatatattgactcatagaaatggtgcatctaggaacttacaaaaatagaaccttaatgataattgcagctgccattttcccagcacttacagagtgctgtacttaatttgcatgagattatcagcttcttagaataaccctgtgagacagggattgtgatccattaattcatttaacaaatatttttgagtacctgctgtgtgctaagcattgggaacacagcagtgaataaaataaaatcgttgtcctcatggagcttacatgggagtgggtagagg

SEQ ID NO: 462607 - DNA, 2035 bp, Homo sapiens
  misc_feature (2)..(2): n is a, c, g, or t
  misc_feature (5)..(6): n is a, c, g, or t
  misc_feature (8)..(8): n is a, c, g, or t
tnttnntngaaccagaggccggggcaagcgcctcttaggctcccacagccccctgtgttcctcactccaggtctgaccttctgggtagtagttgtctaattaggtgcgtatctccttcgactggggtgcctgcgggaggcctttcattgtcccgcgctaggattatgcaaataagcaggcctcgggcccaggatccagtccgaactagcgccctccacccccagcgcatcccagttttgtaaggcgcgttcctgccccgcacacgcacgcgcgaacccttcagcttcttgttcctttgggccgcgggctgtaccaagtaaacccaggcagcgaggggcaaagcacggcgccccccgcgcgggtctcgtcgacggcccgacgcgcatagcccctcttcccacagcgctacaggactagtccgtctcgccgcgcaagcgccctaggctcttcacgccccctgcgcgctgtcctaccctacttgcgacgcaggcgcagaggctgggcgtgcagccgccgccgcagagccggagcgggggccgccggcgccgcatccctctctacctgccaacatcctgtattagagaacttgtggccggaggtgtggctgtggagagctggccggggagggacgctgctcagctgctgctctgctcctgtctcctgtcccctcccccggtcatgacagagacccgtgagccagctgagactgggggctacgccagcttggaagaagatgatgaagacctttccccaggccccgagcattcctctgattcagaatacactctctcagagccggactccgaagaggaagaagatgaggaggaggaggaagaggagaccactgacgatcctgaatatgatcctggctacaaggtgaagcagcgccttggcgggggccgtggtggcccatcccgccgggccccccgtgcagcccagcccccggcccagccttgccagctctgtggccgctcaccccttggggaggccccaccgggaaccccacctgcacgggcacttcatgctgcatgcccggggtgaggtgtaggcagagcccccatacggggagcttggcagaaggggtggggtgggaggagggggctgaggaaattggggttgtgacagtggtcatgggggatggggtactgccggtctgtgttgtcttagaagtagatgtgtgatggccagaataaaagccaaaagatctggtaaaaaacaaaaagaaaacaaaaaaaaaaaagaaaagaaaaaagaaaaccaaaaaaaaaagaaagaaaaaagaaaaaaaaaaagggggggggggcgcgggcacgaaaataacatcccgcgggggggggcccgcacttagaccgcatccccccgcttttttgtgtgaaaaaggggggccccaagggggggggcaaataaaaagggggggggggggggggcggaaaaacggggggggggggggacacagcgtggccggggggcgacttcttggggagagagcgacacccccctcgcggggcggggcgggggaaacacttggggggaccaaccaccccccaacaaaatatataaggagcgcggagggaaaacaataaaaaccccgaggcgtgcacagagggggtacaccacccgagggaatatggcgggggggagaaaagatgggaccacggggaatatgttagaggaacacactttccgccgcggcgtgattataaaacgagagtgaagtatgaggcccggccgcgggggcgcaaaacaaccacgacgcagagatagaaagagcagaagcatggcagaaagcaacgacgaggcagaggccaagagggccgcgggagcagaccagaacaacacgagggaggagaagcaaccgaagggagccaagcagaaccgcacgaaaggaagcgcaacgacacccaccacacaacacacgaccggaaccgaagcgaacaaccaggcggaccacgctgcgcaagccggcagcgagcgggcagcgaagagcgaacagaggggggggggccgagagcgggaagaaagaaacaaggcatgg

SEQ ID NO: 462608 - DNA, 2325 bp, Homo sapiens
  misc_feature (2)..(2): n is a, c, g, or t
  misc_feature (5)..(6): n is a, c, g, or t
  misc_feature (8)..(8): n is a, c, g, or t
tnttnntngaaccagaggccggggcaagcgcctcttaggctcccacagccccctgtgttcctcactccaggtctgaccttctgggtagtagttgtctaattaggtgcgtatctccttcgactggggtgcctgcgggaggcctttcattgtcccgcgctaggattatgcaaataagcaggcctcgggcccaggatccagtccgaactagcgccctccacccccagcgcatcccagttttgtaaggcgcgttcctgccccgcacacgcacgcgcgaacccttcagcttcttgttcctttgggccgcgggctgtaccaagtaaacccaggcagcgaggggcaaagcacggcgccccccgcgcgggtctcgtcgacggcccgacgcgcatagcccctcttcccacagcgctacaggactagtccgtctcgccgcgcaagcgccctaggctcttcacgccccctgcgcgctgtcctaccctacttgcgacgcaggcgcagaggctgggcgtgcagccgccgccgcagagccggagcgggggccgccggcgccgcatccctctctacctgccaacatcctgtattagagaacttgtggccggaggtgtggctgtggagagctggccggggagggacgctgctcagctgctgctctgctcctgtctcctgtcccctcccccggtcatgacagagacccgtgagccagctgagactgggggctacgccagcttggaagaagatgatgaagacctttccccaggccccgagcattcctctgattcagaatacactctctcagagccggactccgaagaggaagaagatgaggaggaggaggaagaggagaccactgacgatcctgaatatgatcctggctacaaggtgaagcagcgccttggcgggggccgtggtggcccatcccgccgggccccccgtgcagcccagcccccggcccagccttgccagctctgtggccgctcaccccttggggaggccccaccgggaaccccaccctgccggctctgctgccctgctacagccccccaggaagcaccagcccctgaaggcagggccctcggggaggaagaggaggaaccacctcgggctggggagggccgaccagctgggcgggaggaggaggaggaagaggaggaggagggaacctaccactgtacggaatgtgaggattccttcgacaacctgggggagctgcacgggcacttcatgctgcatgcccggggtgaggtgtaggcagagcccccatacggggagcttggcagaaggggtggggtgggaggagggggctgaggaaattggggttgtgacagtggtcatgggggatggggtactgccggtctgtgttgtcttagaagtagatgtgtgatggccagaataaaagccaaaatctgtatctgtgtgtgttggttcagagtgtgtgtgtgtgtgtgtgtattcccgcccgtgtgtgtgtttgtgtgtgtgtgtgtgtgtgtgtattccccctgggctccttcttggggaaccttggggtcttttgggaaagataacatttactgcgtgcttgtattcgatgaggtttccatgtatttacttacagaccccataatgtaaaggctctaataatagaattttgtttctcactcacaaaatggtgctgggtgagtcatttggggacccaggccatcccttaagcctgttgtctcccccatggtccagactgggtggccatagcctgggtcctgctggcagaagaggacaggatgcctggtgaggtgcacgtgttgtcttacaagccctggcctgccaggggcacacactgcttccattgacacgcctttgctgagaaattagatatgtggccgcagctaactgcaaaaacaacctgggagaagcagtctagccaagcgcccagaaagcagaaaacagttcatggaggacagctagggctttctgccacatagcctaggaacttccacaaagaggactttaattataatcacagctacgctttctcagcgcttcctgggtatctggtgccagtccaagggctttatatatattgactcatagaaatggtgcatctaggaacttacaaaaatagaaccttaatgataattgcagctgccattttcccagcacttacagagtgctgtacttaatttgcatgagattatcagcttcttagaataaccctgtgagacagggattgtgatccattaattcatttaacaaatatttttgagtacctgctgtgtgctaagcattgggaacacagcagtgaataaaataaaatcgttgtcctcatggagcttacatgggagtgggtagagg

SEQ ID NO: 462609 - DNA, 1255 bp, Homo sapiens
aaggaaggacggaaggaaagatagagaggggacatgactttggttttggggtaggggtgagggggatgtctcatgcgagagtaggggccctggggactagtgaccagcagattcctgacccacacacctcctcccccaacccccaggagggccctggagagtggctgacgctggactcccaggtcatcatggcagacagtgagatctgtggcaccaaggaccccaccttccaccgcatcctcctggacacgcgctttgagctacccttagacattcctgaagaggaggctcgctactgggccaagaagctggagcagctcaatgctatgcgggaccaggatgaatattcgttccaagatgagcaagacaagcctctgcctgtccccagcaaccagtgctgcaactggaattattttggctggggtgagcagcacaacgatgaccccgacagtgcagtggatgatcgtgacagtgactaccgcagtgaaacgagcaacagcatcccgccgccctattatactacgtcacaacccaacgcctcagtccaccaatattctgttcgcccaccacccctgggctcccgggagtcctacagtgactccatgcacagttacgaggagttctctgagccacaagccctcagccccacgggtagcagccgctatgcctcttccggggagctgagccagggaagctctcagctgagcgaggacttcgaccctgacgagcacagcctgcagggctccgacatggaggatgagcgggaccgggactcctaccactcctgccacagctcggtcagctaccacaaagactcgcctcgctgggaccaggatgaggaagagctggaggaggacctggaggacttcctggaggaggaggagctgcctgaagatgaggaggagctggaggaggaggaggaggaggtgcctgacgatttgggcagctatgcccagcgtgaagacgtagctgtggctgagcccaaagacttcaaacgcatcagcctcccgccagctgccccagggaaggaggacaaggccccagtggcacccaccgaggcccccgacatggccaaggtggcccccaagccagccacgcccgacaaggtgcctgcagctgagcagatccctgaggctgagccacccaaggacgaggagagggccaaggccaactggctgcgtgccttcaacaaggtgcggatgcagctgcaggaggaaaactccctggaggagatgacacttaaggagaagtgatg

SEQ ID NO: 462610 - DNA, 312 bp, Homo sapiens
aaggaaggacggaaggaaagatagagaggggacatgactttggttttggggtaggggtgagggggatgtctcatgcgagagtaggggccctggggactagtgaccagcagattcctgacccacacacctcctcccccaacccccaggagggccctggagagtggctgacgctggactcccaggtcatcatggcagacagtgagatctgtggcaccaaggaccccaccttccaccgcatcctcctggacacgcgctttgagctacccttaggtgagtacaggggcccgggaccttcacccagccccagcccca

SEQ ID NO: 462611 - DNA, 741 bp, Homo sapiens
aatattgacccctctttaattcatcaagatgaatccagcttcccgcagtaattatctcccttccagtccagatgcaaggatgggtgagcagttcaggatgagaccatttcttcttcttacctacttcatcattcatgctcatctcaatgttggctataaggtaaagggaagcacgcctcaagtgatcatgcaaacaactccagtgaagacactgcgcatgctctcttcccaagtgcgggcaggcagctgtgcatgtgggcagcccaccccaaaggaagaagaatcaggaaagaaggggcgcaagactccggacgtatgccaacgcataaaaccccaagtcaaaagctcaaaccacacatctgtcctccaagatgcctacttggccccttccaagagtaatttactttcgtttcattcctgctctaaagctttttaataaatgttcactcttgctctaaatcttgccttggcctctttttctgccttgtgcccctcagtcagattctttcatctgaggagggaagaattgaagttgctgtagacccgtatagattcgctgccagcagctcgggatacctgccaccactaacattttgatgttagatgtctgcagatcccacaatccctccctctctttcctgagatgagagtctgtaatgaagaatttgcccgtgctcttgcatggtcattcctccccctgaagcctcagtgggctgtcatttgcccagaggcaacatgtgt

SEQ ID NO: 462612 - DNA, 1568 bp, Homo sapiens
agaagcctgctccttgggacccacactgggtgaggtttcctattcccatatttagtgcgagtggtgagatcccagatgtggtgagcctgtggtatggaggcccttgactccagtgaccctgatgtgagctcctgtggtgctcccggctgcagcaatgcctgagccgccagatgcgcaccaccagctccaggagccacttcgctctttttgtcctttttgtctcttttaatcctcgccccagaccctgaggaggccaggctcagccttcttcctccagggagggggttctggctgcgccaaggtgaaaatgcactccagaaggttcctgtcatctcaggctttccgcgggaccacagaacctcgtgtcctgtgcatggtccttccacagaaccctccagatcccatccttgcccaggacctctgtggggatggcagcgtgattgacgtcctccacaaactccaccagggcggcctgggccttcttatccatcaagcccttcatgtgttgcagcccgaacgtgcccaggggcaggagggtcgactgcaggacggcttcaacatccacctgctccaggccctccaggatcccggtgaccagcagggccctgtgcgcgtccatgtccaggcccctggcactagcagaaagaacctggtggcaaagttccagaggttagcggagcctagcatggaggcggtggtcaaggtgaagccccacgacaaggatgccaaaatgaaataccaggagtgcaacaagatcgtgaagcagaaggcctttgagcgggccatcgcaggcgacgagcacaagcgctccgtggtggactcgctggacatcgagagcatgaccatcgagggtgagtacagcggacccaagcttgaggacgacaaagtgacaatcaccttcatgaaggggctcatgcagtggtacaaggaccagaagaaactgcaccagaaatgcgcctaccaggtaatgcacctgtcaggtaccgggcacccgggaaccctgggatggcatcacagcactgccaggcgcgggcactgagcaaaatgacaggagaagggcagccacaacagccaacaccaaacaggagtcgtggtcattatggattggcagtaatccctcccaatattcagatacaataaactatctctacaaataaagccaccaaccttggctcacttgttcagaagatagcaccccatcctgtaacaacatgcctctgagcttcttactacctgggttgaggtctcctggattgtgccctgtccccacttttttttaatgacaacaaacttttaaatatttattcattggatctgattttgttttggacactggcatgcaaaggggagggagatggtcataggactgttgtcaacgttcaaaagcaaaacaggatttatatgagaaagttgtaaaagaccttccaccctgcgtgtgtgtgcacacacacacagcctcagatttctcatctgggaaatagagataataatggggctggctttacatgactgtggtgaagattaaatgaagcaatatattaaaggctattctagccaatgtctggcat

SEQ ID NO: 462613 - DNA, 1615 bp, Homo sapiens
agaagcctgctccttgggacccacactgggtgaggtttcctattcccatatttagtgcgagtggtgagatcccagatgtggtgagcctgtggtatggaggcccttgactccagtgaccctgatgtgagctcctgtggtgctcccggctgcagcaatgcctgagccgccagatgcgcaccaccagctccaggagccacttcgctctttttgtcctttttgtctcttttaatcctcgccccagaccctgaggaggccaggctcagccttcttcctccagggagggggttctggctgcgccaaggtgaaaatgcactccagaaggttcctgtcatctcaggctttccgcgggaccacagaacctcgtgtcctgtgcatggtccttccacagaaccctccagatcccatccttgcccaggacctctgtggggatggcagcgtgattgacgtcctccacaaactccaccagggcggcctgggccttcttatccatcaagcccttcatgtgttgcagcccgaacgtgcccaggggcaggagggtcgactgcaggacggcttcaacatccacctgctccaggccctccaggatcccggtgaccagcagggccctgtgcgcgtccatgtccaggcccctggcactagcagaaagaacctggtggcaaagttccagaggttagcggagcctagcatggaggcggtggtcaaggtgaagccccacgacaaggatgccaaaatgaaataccaggagtgcaacaagatcgtgaagcagaaggcctttgagcgggccatcgcaggcgacgagcacaagcgctccgtggtggactcgctggacatcgagagcatgaccatcgagggtgagtacagcggacccaagcttgaggacgacaaagtgacaatcaccttcatgaaggggctcatgcagtggtacaaggaccagaagaaactgcaccagaaatgcgcctaccaggatttcagacaaaaatcaggaatcatcaccagccaagactgtgttcagaccacgtgacgtcttccaggcaccaggaagaaatacgaccaacctccgtaacaaatgagagaaacttcacctgactgtgttttgtgcatttggtttatgagtcgttttaaaaacgtgtacttttactgctgcgttcaggttttcagccatagaatattctagaaaaaaatagtgataacatttatttcaccgctataaccctgaatgtgtagctgtgttttttaaaaaaacatttttttacaattgtagaatatgtaacatgcctccagaaacgtgccctaaacacaaatatataatttggcaaataattacatagcaagtcctatgttactgtcatctgatctagaaatcatcgtcctcccagaagcccctcatgtgctctggccatctcaaatccctccctgccccagggataaataacatcctgttttgtgataaactctgccttttctatacacgtgtatgcttattaacaaactatgaatttctccacacggtagatttgattatgtttgaatcttacatgaatgtaatcctattggtggattgtttttgctgtatgtgtgtgtgtttcagaaaaaatacattaagaaaagaaaagga

SEQ ID NO: 462614 - DNA, 1635 bp, Homo sapiens
gaattatgtgcttcaaacaggttgaaagtgataccttctgcagccgtcatttccagggctgagactataaatgctacagtttccgcttttgcttcttcctcattttctcttgccaccactaagtaagaagagccttttgcctcccaccatgattctgaggccttaccagccatgtggaactgttaaagaatttgacaccaattttacatatgtgcaacagtcagaattctacttggagccaaacattaagtacgtatttcaagtgagatgtcaagaaacaggcaaaaggtactggcagccttggagttcaccgttttttcataaaacacctgaaacagttccccaggtcacatcaaaagcattccaacatgacacatggaattctgggctaacagttgcttccatctctacagggcaccttacttctgacaacagaggagacattggacttttattgggaatgatcgtctttgctgttatgttgtcaattctttctttgattgggatatttaacagatcattccgaactgggattaaaagaaggatcttattgttaataccaaagtggctttatgaagatattcctaatatgaaaaacagcaatgttgtgaaaatgctacaggaaaatagtgaacttatgaataataattccagtgagcaggtcctatatgttgatcccatgattacagagataaaagaaatcttcatcccagaacacaagcctacagactacaagaaggagaatacaggacccctggagacaagagactacccgcaaaactcgctattcgacaatactacagttgtatatattcctgatctcaacactggatataaaccccaaatttcaaattttctgcctgagggaagccatctcagcaataataatgaaattacttccttaacacttaaaccaccagttgattccttagactcaggaaataatcccaggttacaaaagcatcctaattttgctttttctgtttcaagtgtgaattcactaagcaacacaatatttcttggagaattaagcctcatattaaatcaaggagaatgcagttctcctgacatacaaaactcagtagaggaggaaaccaccatgcttttggaaaatgattcacccagtgaaactattccagaacagaccctgcttcctgatgaatttgtctcctgtttggggatcgtgaatgaggagttgccatctattaatacttattttccacaaaatattttggaaagccacttcaataggatttcactcttggaaaagtagagctgtgtggtcaaaatcaatatgagaaagctgccttgcaatctgaacttgggttttccctgcaatagaaattgaattctgcctctttttgaaaaaaatgtattcacatacaaatcttcacatggacacatgttttcatttcccttggataaatacctaggtaggggattgctgggccatatgataagcatatgtttcagttctaccaatcttgtttccagagtagtgacatttctgtgctcctaccatcaccatgtaagaattcccgggagctccatgcctttttaattttagccattcttctgcctcatttcttaaaattagagaattaaggtcccgaaggtggaacatgcttcatggtc

SEQ ID NO: 462615 - DNA, 1532 bp, Homo sapiens
gaattatgtgcttcaaacaggttgaaagtgataccttctgcagccgtcatttccagggctgagactataaatgctacagtttccgcttttgcttcttcctcattttctcttgccaccactaagtaagaagagccttttgcctcccaccatgattctgaggccttaccagccatgtggaactgttaaagaatttgacaccaattttacatatgtgcaacagtcagaattctacttggagccaaacattaagtacgtatttcaagtgagatgtcaagaaacaggcaaaaggtactggcagccttggagttcaccgttttttcataaaacacctgaaacagttccccaggtcacatcaaaagcattccaacatgacacatggaattctgggctaacagttgcttccatctctacagggcaccttacttctggattaaaagaaggatcttattgttaataccaaagtggctttatgaagatattcctaatatgaaaaacagcaatgttgtgaaaatgctacaggaaaatagtgaacttatgaataataattccagtgagcaggtcctatatgttgatcccatgattacagagataaaagaaatcttcatcccagaacacaagcctacagactacaagaaggagaatacaggacccctggagacaagagactacccgcaaaactcgctattcgacaatactacagttgtatatattcctgatctcaacactggatataaaccccaaatttcaaattttctgcctgagggaagccatctcagcaataataatgaaattacttccttaacacttaaaccaccagttgattccttagactcaggaaataatcccaggttacaaaagcatcctaattttgctttttctgtttcaagtgtgaattcactaagcaacacaatatttcttggagaattaagcctcatattaaatcaaggagaatgcagttctcctgacatacaaaactcagtagaggaggaaaccaccatgcttttggaaaatgattcacccagtgaaactattccagaacagaccctgcttcctgatgaatttgtctcctgtttggggatcgtgaatgaggagttgccatctattaatacttattttccacaaaatattttggaaagccacttcaataggatttcactcttggaaaagtagagctgtgtggtcaaaatcaatatgagaaagctgccttgcaatctgaacttgggttttccctgcaatagaaattgaattctgcctctttttgaaaaaaatgtattcacatacaaatcttcacatggacacatgttttcatttcccttggataaatacctaggtaggggattgctgggccatatgataagcatatgtttcagttctaccaatcttgtttccagagtagtgacatttctgtgctcctaccatcaccatgtaagaattcccgggagctccatgcctttttaattttagccattcttctgcctcatttcttaaaattagagaattaaggtcccgaaggtggaacatgcttcatggtc

SEQ ID NO: 462616 - DNA, 1442 bp, Homo sapiens
gaattatgtgcttcaaacaggttgaaagtgataccttctgcagccgtcatttccagggctgagactataaatgctacagtttccgcttttgcttcttcctcattttctcttgccaccactaagtaagaagagccttttgcctcccaccatgattctgaggccttaccagccatgtggaactgttaaagaatttgacaccaattttacatatgtgcaacagtcagaattctacttggagccaaacattaagtacgtatttcaagtgagatgtcaagaaacaggcaaaaggtactggcagccttggagttcaccgttttttcataaaacacctgaaacaggattaaaagaaggatcttattgttaataccaaagtggctttatgaagatattcctaatatgaaaaacagcaatgttgtgaaaatgctacaggaaaatagtgaacttatgaataataattccagtgagcaggtcctatatgttgatcccatgattacagagataaaagaaatcttcatcccagaacacaagcctacagactacaagaaggagaatacaggacccctggagacaagagactacccgcaaaactcgctattcgacaatactacagttgtatatattcctgatctcaacactggatataaaccccaaatttcaaattttctgcctgagggaagccatctcagcaataataatgaaattacttccttaacacttaaaccaccagttgattccttagactcaggaaataatcccaggttacaaaagcatcctaattttgctttttctgtttcaagtgtgaattcactaagcaacacaatatttcttggagaattaagcctcatattaaatcaaggagaatgcagttctcctgacatacaaaactcagtagaggaggaaaccaccatgcttttggaaaatgattcacccagtgaaactattccagaacagaccctgcttcctgatgaatttgtctcctgtttggggatcgtgaatgaggagttgccatctattaatacttattttccacaaaatattttggaaagccacttcaataggatttcactcttggaaaagtagagctgtgtggtcaaaatcaatatgagaaagctgccttgcaatctgaacttgggttttccctgcaatagaaattgaattctgcctctttttgaaaaaaatgtattcacatacaaatcttcacatggacacatgttttcatttcccttggataaatacctaggtaggggattgctgggccatatgataagcatatgtttcagttctaccaatcttgtttccagagtagtgacatttctgtgctcctaccatcaccatgtaagaattcccgggagctccatgcctttttaattttagccattcttctgcctcatttcttaaaattagagaattaaggtcccgaaggtggaacatgcttcatggtc

SEQ ID NO: 462617 - DNA, 1153 bp, Homo sapiens
ggctcagaagataaacgaggggctggaacacctcgccaaagcagagaaatagagatgcagaaactaccagaggccgttcagctaattgagaaggccagcatgatgtatctagaaaacggcaccccagacacagcagccatggctttggagcgagctggaaagcttatagaaaatgttgatccagagaaggctgtacagttatatcaacagacagctaatgtgtttgaaaatgaagaacgcttacgacaggcagttgaattactaggaaaagcctccagactactagtacgaggacgtaggtttgatgaggcggcactctctattcagaaagaaaaaaatatttataaggaaattgagaattatccaacttgttataagaaaacaattgctcaagtcttagttcatctacacagaaatgactatgtagctgcagaaagatgtgtccgggagagctatagcatccctgggttcaatggcagtgaagactgtgctgccctggaacagcttcttgaaggttatgaccagcaagaccaagatcaggtgtcagatgtctgcaactcaccgcttttcaagtacatggacaatgattatgctaagctgggcctgagtttggtggttccaggagggggaatcaagaagaaatcacctgcaacaccacaggccaagcctgatggtgtcactgccacggctgctgatgaagaggaagatgaatactcaggaggactatgctagtattttgcttgctgaaaagaaaagggaaacaaaggtaaaatcctgacatgccatttcaaggacttgggaatagattagggatatccgtacttcattacagtcatgattttggatcctaataaagactagtttttagttaccatcttcccaaatcactcattgtatccattacctgtgaagcatatctttttctttccataagagcttttctaagacaccagcaggaattaacagaaaatgtactgtcatgttttaatacattgattaaaaaatttgcaagccaaattatacataaattatgttctaaacaaaaggggtaataagcataggtattctctcttggacacttgtcacgatttagtggtcatattgataaattcataattcagtaggctttatattgataaatttaatggaccaa

SEQ ID NO: 462618 - DNA, 1679 bp, Homo sapiens
ggactcggcgcagtgctgcggggcgagggcttctctacttgggcgctctgctcctgaagattgtggtgggggctgtctgtgcatcggaggctcgttagcagcatccttggcctctacctgctgggtgccggtcgcatctcttccccatttgtggcaacccaaaatgtcatctggggaacaacatcgctctgttgagaaccaccgccctagaagagccccctgtgtggaggggaccataggtttaccccaaaaactcctcggtgaacctttgtcatctggcattttactgtccctgtgggcagggactgtgcttcgttcgtcctttgatgttttccttattgattctttggagaaaaaggtcaaaaggactaacagcctgaaaactggttttttaaaatggaagccagattatgacagtgccgcttctgaatatggaaaagcagctgttgcttttaaaaatgccaaacagtttgagcaagcaaaagatgcctgcctgagggaagctgttgcccatgaaaataatagggctctttttcatgctgccaaagcttatgagcaagctggaatgatgttgaaggagatgcagaaactaccagaggccgttcagctaattgagaaggccagcatgatgtatctagaaaacggcaccccagacacagcagccatggctttggagcgagctggaaagcttatagaaaatgttgatccagagaaggctgtacagttatatcaacagacagctaatgtgtttgaaaatgaagaacgcttacgacaggcagttgaattactaggaaaagcctccagactactagtacgaggacgtaggtttgatgaggcggcactctctattcagaaagaaaaaaatatttataaggaaattgagaattatccaacttgttataagaaaacaattgctcaagtcttagttcatctacacagaaatgactatgtagctgcagaaagatgtgtccgggagagctatagcatccctgggttcaatggcagtgaagactgtgctgccctggaacagcttcttgaaggttatgaccagcaagaccaagatcaggtgtcagatgtctgcaactcaccgcttttcaagtacatggacaatgattatgctaagctgggcctgagtttggtggttccaggagggggaatcaagaagaaatcacctgcaacaccacaggccaagcctgatggtgtcactgccacggctgctgatgaagaggaagatgaatactcaggaggactatgctagtattttgcttgctgaaaagaaaagggaaacaaaggtaaaatcctgacatgccatttcaaggacttgggaatagattagggatatccgtacttcattacagtcatgattttggatcctaataaagactagtttttagttaccatcttcccaaatcactcattgtatccattacctgtgaagcatatctttttctttccataagagcttttctaagacaccagcaggaattaacagaaaatgtactgtcatgttttaatacattgattaaaaaatttgcaagccaaattatacataaattatgttctaaacaaaaggggtaataagcataggtattctctcttggacacttgtcacgatttagtggtcatattgataaattcataattcagtaggctttatattgataaatttaatggaccaa

SEQ ID NO: 462619 - DNA, 927 bp, Homo sapiens
cgccgggtccgtctctcactggcgcggccttagcacccggggggggcgggagggagggctcagggctgaggggcctcggcgcgctggtgcccgcagggctgccggggctcggtgtcctctgggtcacacctcccggggtcggggtcagctctgcggcgcctcgggaagcgccgtgggtccaccccgccggaagtcaaaaaaaaagaacccgtgtgggcggggactcggcgcagtgctgcggggcgagggcttctctacttgggcgctctgctcctgaagattgtggtgggggctgtctgtgcatcggaggctcgttagcagcatccttggcctctacctgctgggtgccggtcgcatctcttccccatttgtggcaacccaaaatgtcatctggggaacaacatcgctctgttgagaaccaccgccctagaagagccccctgtgtggaggggaccataggtttaccccaaaaactcctcggtgaacctttgtcatctggcattttactgtccctgtgggcagggactgtgcttcgttcgtcctttgatgtgtatgtcctgccacctctggtacagtacgtagtaggcaccctgcaaatgtttgtgggactgaactgataatccttaattcatccttttggcagcctcttccccccgtttcattactccagtgcatttttatctggcagttacagttaatagaaagtcagcattgtgggccgggcgcggtggctcacgtctgcaatcccagcactttgggaggccgaggcgggcggatcacaaggtcagaagatccagaccatcctggctaacacggtgaaaaccgtctctactaaaaatacaaaaaattagccgggcgtggtggcgggcgcctgtagtcccagctactcgggagcctgaggcaggagaatggcctgaacccggaagg

SEQ ID NO: 462620 - DNA, 1481 bp, Homo sapiens
ttctagaggagtccctatcacaatgtcgtcaacttttagtgactgcacagtttatcattggtcagacagaaggtagctataaagctaccctgtaagtcatatcaaaaaagttcagaggaagattagtaaatatttatcaataaaaataaacattttgtttttctaatatcttaacatatcctcccctttaggaggaagaacgtgcaaaacgtatgacagtgccgcttctgaatatggaaaagcagctgttgcttttaaaaatgccaaacagtttgagcaagcaaaagatgcctgcctgagggaagctgttgcccatgaaaataatagggctctttttcatgctgccaaagcttatgagcaagctggaatgatgttgaaggagatgcagaaactaccagaggccgttcagctaattgagaaggccagcatgatgtatctagaaaacggcaccccagacacagcagccatggctttggagcgagctggaaagcttatagaaaatgttgatccagagaaggctgtacagttatatcaacagacagctaatgtgtttgaaaatgaagaacgcttacgacaggcagttgaattactaggaaaagcctccagactactagtacgaggacgtaggtttgatgaggcggcactctctattcagaaagaaaaaaatatttataaggaaattgagaattatccaacttgttataagaaaacaattgctcaagtcttagttcatctacacagaaatgactatgtagctgcagaaagatgtgtccgggagagctatagcatccctgggttcaatggcagtgaagactgtgctgccctggaacagcttcttgaaggttatgaccagcaagaccaagatcaggtgtcagatgtctgcaactcaccgcttttcaagtacatggacaatgattatgctaagctgggcctgagtttggtggttccaggagggggaatcaagaagaaatcacctgcaacaccacaggccaagcctgatggtgtcactgccacggctgctgatgaagaggaagatgaatactcaggaggactatgctagtattttgcttgctgaaaagaaaagggaaacaaaggtaaaatcctgacatgccatttcaaggacttgggaatagattagggatatccgtacttcattacagtcatgattttggatcctaataaagactagtttttagttaccatcttcccaaatcactcattgtatccattacctgtgaagcatatctttttctttccataagagcttttctaagacaccagcaggaattaacagaaaatgtactgtcatgttttaatacattgattaaaaaatttgcaagccaaattatacataaattatgttctaaacaaaaggggtaataagcataggtattctctcttggacacttgtcacgatttagtggtcatattgataaattcataattcagtaggctttatattgataaatttaatggaccaa

SEQ ID NO: 462621 - DNA, 1353 bp, Homo sapiens
ttttctaaggtggtaggtgtgaaataaagataatacaaatctaatttttccaggaactatagcactgcccgtccccatgaaattaaattataatttcactgttcaacataatataaaactgttttgagtaacagtgaaatagaagcatgaatttagatacacaccagccctatatgatggacttattcacacatagtatttttgataacaacctaattagatactgtctttcattgcttactataattctgagaaaccacttttaacagtatacatttacactaccacttaactaaatggggacatataaatatataaatttttaaagaaaaaaattccagttatttagaggagaaataaaacttcaattatttacttttttgaaactgcatttagataaaaaggtatatggtttatgatacttttcacaatgtaataaatttatattccaattttctcataaacgagaggttgtaaagcaaaatatttgttccttgaaaataacctctctcttctaaccctggtaagaacaatgagtgtgcccttaatttcaagactcttgttgtcatccatgtcaattgtctttttcatgaagtataatattttgagagagagagagagttgtaaaaattaaagagaaaacctgcttttggaatgcagcaattctaaatcatttcactaagaagcatcctttgatatgctggtctgaatttttaatataaaacctaagcagtacttatttctgaagtagaactttctccagttttaataacttcatacatagcaagactaaggacatcaacctgtgcttttgagattttggtaggtgttctaataatgtattattttagatatggctcattgtcaaattgggtggacagagatttcatgaattggttacagaaagctaactaaactcttaatgactgaataatggtttgcattttgcttgagccaaaaaagatgtttaagccatgtaccactacattccctgcttaacattcctaagtttctttattcttcatagttttctaatgaacatatattttcctgagtaagattataaaaaagttaacctttcttccaaaagtataaagacaaataaaatgtcgactcacaatacatattttttgcatagcattaaaggtgcggagatattgcctgctcctcttcattatgattggcccacctcttaaaaagactgcaacaggccgggcgcggtggctcacacctgtaatcccagccgttttatttatttatttttgagacggagttttgctctcattgcccaggctggagtgcaatggtgcgatcctggctcaccacaacctccatctcctgggttcaagcatt

SEQ ID NO: 462622 - DNA, 2113 bp, Homo sapiens
ggctggccaaggccagagccggctccctcagcttgcagggaggtatggagggagaggcgcgagtacgaaccggggctgcgcgcggcacttgcgggccagctagagttccaggtgggcgtaggcttggcaggccccgcactcggagcagccggccggccctgccagccccgggcaatgaggggcttagcacccgggccagcggctgctcgggaaggtgtactcggtcccccagcagtgccagcccaccggcgctgcgctcgatttctcgccgggccttagctgccttcccgcggggcagggcccaggacctgcagcccgccatgcctgagcccccggcctccgtaggttcctgtgcagcccgagcctccccgatgagcgccgccccctgctccagggcgcccagtcccatcgaccacccaagggctgaggagtgcgagcgcacggcgcgggactggcaggcagctccacctgcagccccggtgcgggatccactgggtgaagccagctgggcttctgagtctggtggggacgtggagaacctttgtgtctagctcaaggattgtgaacgcaccaatcagcgccctgtcaaaacagaccacttggctctaccaatcagcaggacataggtagggccagataagagaataaaagcaggctgcccgagccagcagtggcaacccgctcaggcccccttccacattgtggaagctttgttctttcactctttgcaataaatcttgctgctgctcactctttaggttcacactgcttttatgagctgtaacactcaccgcgaaagtctgcagcttcactcctgagccagcgagaccacgaacccaccagaaggaagaaactccgaacacatctgaacatcagaaagaacaaactccagacgcgccaccttaagagctgtaacactcaccgcgagggtccgcggcttcattcttgaagtcagtgagaccaagaacccaccaattccggacacaccattgtctgacattaaaggtgcggagatattgcctgctcctcttcattatgattggcccacctcttaaaaagactgcaacaggccgggcgcggtggctcacacctgtaatcccagcactttgggaggccgaggcgggcggatcacgaggtcaggagatcgagaccatcctgcgtaacacggtgaaaccccgtctctactgaaaaatacaaaaaattagccgggcgcggtggcaggcgcctgtagtcccagctactcgggaggctgaggcaggagaatggcctgaacccgggaggcagagcttgcagggagccgagatcgcgccactgcactccagcctgggcaacagagactccgtctcaaaaaaaaaaaaaaaatactgcaacagatgattcaattgtctaaaatacttcgaagtacagaaattaaatgctttagcccataaacatatcccttatctactgtgttgctaaggaacatatcagccatatctatcatgcacacttcagcagtctcttggcaaccagtgggaagatggtagacaactttttccagttgggaaagtacatttccatttaaatgttcctgtgacatgcttttccacccattgtcttgctctagattttcaactttcaatgaagtctgactgtgatacttttttgtatacattttcctgtgatgggcatacatcttggacaagcttttgcctactgaagcctctatttttccattcactgtggaagttaatacatgaaagttattattgcactctagtacttctgtgtctgacagttgtcctttggacaaaaacttttctgccaaatttctgtcattcagttttgtagtgattggctgagatgaaccttcctaaagaaacagtaatgaacttgcgtaaaagttaagctgcttctggttttcaaaccactgcagaattttctcagtcttctgaataatggcagcaacagcatcttttattaagcagtacccattatgaaaaaatccgaagactccatcctttatagcttcttttgttaagcttcttccataatgttggtttgtgtctcatagctatgggaatgaacaagataaaccctcatgccaagcaccaagaacccaatctcttccatt

SEQ ID NO: 462623 - DNA, 1178 bp, Homo sapiens
gtgattatgccactggttgatgggcagaaacgcccacctgctgctggctgcccaggggtcactccttgactatggtagcaagactgaaggatacccaacttacatttctacagtggaacacagaattatgtcattctccataggtgaagctgaccttagagaacactcaaaagtattgtgcaaatatgaaaaactaaggctgattcatcaaaagcaatccagtcaacatccaaaaactcctgattcatccgagggcactcttagcacacttccagttggctgcatggagtcacagatccacattccagctaccagggagcagacagagggactatccagctctctgtggcctcctcagaaagagatgagagactcaagaccccaggacatgaaatcacttacctggaatggcatggtcaataaaggcagattatggcagtggcaatgtattaagaggagtatcaatgggaattgaagatccaagcaagttaaatatgtgggtggagggatacaaaaacgttgaatgagattctaacattttaggctatttacaacagcacagtgagtcaggggagggtccagtggaaagcgactggagacacatccggcagacaggcagaaatgtcagtttcacctcaaagttgtggcagaagtagtctgagccaagaagcacaggcattcctggggtcagcagatcagggcagaaaggtaagctgggaacaaagtgacattgaccttgaacattaggcaagggcttatcttcgaggctgatgcttcccagtcagtgcttcccagccttcctcattaccatggcacatacagaaagcaaatatgtgtgcatctcactgggcagtgactgagtgggctacctcccaggcctgttcctgcagtgccccttggttcttcatgagactattcagggtgtttttctgggcaagtaactccaaaggcaagcatgagagcagctcgaagacttaagaacatgtcacagggagaacaagaatgccatatgagtaaaaaggcagaggcaggagtgatgcacctacaaagccaaggaacagaaaagagagccagaaaaccaccaggagccaggacagaggcatgaaacagattctccctcacagccctccaaaggaaccaagtctgccaataccttgatcttggacttctagtctccc

SEQ ID NO: 462624 - DNA, 5764 bp, Homo sapiens
gacctctgactcctagttccccgccgaagccacctctttgcagctttgtgcccggggtcctccttgcacacctgggttttcctcgggccgccctccggcttctgtcctctgagcctggcccaggattccttgcccctcccccaccggtccaccctggctgtttatggggtgggcagaggctgggaatgagaggcgccctctctggggggcctggcagcccccagggaccctcctactggggcctgccacggtggggggacaatgtttcccattttctgcggagccccccaactctcacctccaggcagagtccaacaccccctccccacccagaggtccacgaggcgagacagacccaaagagagaggcaaggacgtgggcgttggtcggtcttgcggggaggaggtgccgtgctctccccacttcctgacccagcagaaagcgcccgggcgtgtccagataaaccgcgccttaatcgaggcgccattccggcccggaacaggccaggcccagggtgcagagtggacactcccaggtgtccaagccggcgagctcgggtcccgcagaaccggcggccctggagacgccccgagggcagccccgctgcagccttgctcgggtcccctagcccggcgcctccgcaaaccaacccaccgcgggccgccgagccccgctccgggatccgccggctgcctccatcccagaagagtgcgcagagaattaaatctagatatttacatgtttaatggctaaaggagcctgtcttctggcagggcagggagggcgctcaggtggtttaactcagcgccgggatcccgctcagctgcgggggccgcgaaccccgccgctgggccgacgattgggcccctccggagcgcggcgcccaacgcgggtttcgttgcgtcggggaagtccgtggcctgcagcgtccagtccccaggctgtcagccgagccctggagtggggcgttctccaggcccccaacccctgatccaggccgttcccctcccgcgcaccctccggcgggggctgcagcccgcgcccctcgccgccaagccccattttcccacagtgcaaactgcagcaaacgaactggttttctcctgagcgcacgctgcggggagacgattccaacggcgtccagtgaggaggggcccaggcctgcgagacggggcgcgttcctgtccccagacccctccggctgcgcctcaacccccagcccggctctctgacctgcatcggtcgggccgggcacagaggaggcaaagcaggcggaggccgcgagaggagagcagcctgacctcccgcctgagcccggacccttcccctcgggcaccctcggacgcccccgccccagcgtgttactttctagatggggaaactgaggcgcggccagggcgatgcggcggaagtcccgcgcccggccgtctcccgcgcctgccagacagagccccgagaagagggcatagaattccctcctctaattgtgtcccagaactctgggacgacggaggccaagctgctgagggaggggacgaggacgcggggccccagggaccaacccctccgctccccggccagccgcggccgcccagcctcggtgccccggcgcaaacaagcgcggtgtttgccgagcgcgaggcgggcggcgcggcccgagagcgatgaggattcgatggagccgctcgccgcggcgggggcaacggagcccgggcgggcgcggggatcgatcgggcacagctgtcgcctaagagcccgcgggagcatccacccgcgggccagagctgcccgggcgccccgcaactgcgggcaggaaatccgggacgtcgggcccgccaggggcgaaaccccaaagtcgcgacacccggggtggggaggtcaggacgtccccacggccaacgtggaaccttcgggagccgcgcgctcagcctcgccgggacccccgccaggccgtaaaagcccagagtctccccccaaatctaaataaaatccccagaccccgcccgaacgaaggcggctggagtccagagggagaactcctgccacacactaggcaccggcggccgggatttggggcgcccgcaggtttcgggggccgggagtgggagcagagcggatctagggctgcggctgggcttgggtggggcgcgcattcattgccatcgtttagtaaaacctcgctttaataaaagcagggaggggtgcgcagagcccggacactttcatttcggtgggagacaaatcgaatcagaaagtcagttgggggcgcactgtgcagggttctgggggagccccaggaaaggaaaacttgaggtatctgactctgcctttgatatttttagctgcaatgggagagtcaataacaacagggaaggtggtgtgtccaaaaatgggggagagacgcgaaatcggagactctgggtcgaggcccccagccccacctgggcagagtctgtcctcggacccccgcccgctgtcccccgggtacggcctgccccagcgggcgcgggcgggcgcagtggccagggacgccgaagccccaagtctggccgacttcggcctgcttggtgctcgagtggggccggggcgggcggagagcgaggctgcgggaggcagcggtggcaggagcgggtgggcgggggcgctgacgtcagacccgggcccgggcgccggcggccgctcccctgccacatcctggtggccgcgctcgcagccgggccgggccgtgcgccgcgcagcctggcagcctcgcgcgcagccaccggggagcgggcgggacatggagctgagcctggagagcctggggggcctgcacagcgtggcccacgcgcaggcgggcgagctgctgagcccgggccacgcgcgctcggcggcggcgcagcaccgcggcctggtggcgcccgggcgcccgggcctggtggccggcatggcgagcctgctggacggcggcggcggcggcggcggtgggggcgccgggggcgcgggcggcgcgggcagcgcgggcggcggcgcggacttccgcggggaactggcgggcccgctgcacccggcaatgggcatggcctgcgaggcgccgggcctgggcggcacctacacgacgctcacgcccctgcagcacctgccgccgctcgcggccgtggccgacaagttccaccagcacgcggcggccgcggccgtggccggggcgcacggcggccatccccacgcgcacccgcacccggcggccgcgccgcccccgccacccccgccgcagcgtctggcggccagcgtgagcggcagcttcaccctcatgcgcgacgagcgggcggcgctcgcctccgtgggccacctctacggaccctacggcaaggagctgcccgccatggggtcgccgctgtcgccgctgcccaacgcgctgccgcccgcgctgcacggcgccccgcagcccccgccgccgccaccacccccgccgctggccgcctacggcccgccaggccacctggctggggacaagctgctgccgcccgccgccttcgagccgcacgccgcgctgctgggacgcgcggaggacgcactggcccgcgggctgcccggaggcggcggcggcacaggcagcggcggagcgggcagcgggagcgccgcggggctgctggcgccgctgggcgggctggcggcggccggggcgcacgggccgcacgggggaggcggcggccccggcgggagcggcggcggccccagcgcgggcgcagcggccgaggagatcaacaccaaggaggtggcgcagcgcatcacggcggagctgaagcgctacagcatcccgcaggcaatcttcgcgcagcggatcctgtgtcgctctcagggcacgctctccgacctgctgcgcaaccccaagccgtggagcaagctcaaatccggccgcgagaccttccgcaggatgtggaagtggctgcaggagccagagttccagcgcatgtcggcgctgcgcttggcagcggggcggcggccgatgcccggggccagcgccccaagccccgcccgtgcgccccggcagcccgggaccccctatcaggaagctagaccgcgatccgcgccgctgcccgtttgtaccgttgccaaaagggagaaagggattgtgccgcctccccgccccccggtcgccgcttctgcccctttcgggagcgccgcgcgcttctttgtagttcggccccgcgatcgataccccctccctctcccctccggccgctggcaaaggtcacccgagaatggcgggggaggggcggccccggggaccctcggcccgcgccgcccggaggccttcacaccccgacccggcgcccgccccgcgcagtttggtcgtggctcgggtgcgcgcgcccctgcccgcctggctttgggggacaatagccgcggcggctggcgcctgatcgatcgcttctccgagcacaagggcgagaaaggcgggggctctgggaggcgccccactagcaaagaggcagaggggcttgcggctgtgcccccaggcagcccgtccaggcaggggggctgggcgaagagaggacagcgggggaggtccgggaacctggacgatttcagtctgtcctgctcccctccccatgacacatacagcggcactcgtgcgctcaccatagaccggcggtcatatccgcacacagccacggccctcgaggtgcagtgcgaggcctcagatttgggggccacagaaaacatcagccagagcgtcacagaagggcaaaccgcaggcgagaagtcccatggggggggggtgggctccccgcagccgggtcagcagcacccagcacccgccctgagtggacaccgcctgcttcgcctgcacctgaccctgcacccaggggtgcgtgggggaaccggaggggtgagcgcagctcctggcaccccgagcctcccgcagggcgctggggcgttgaggatgataaacccggaccacgctgcccgcctgctctctgccgggtccgctgcccacgccgtggccccgccgcgcggccccgcggccgcggggttcacgccgtcaaccttgcgcacctgtcgcgtctcaggtgccctgggggccgcgtctacaccaccggactccgcctggggcgcctttagttccggtcgctgcgcaaatgaaaagcggttaagtggcggcaaatcgcggcggttagggggagacggccggatgcgtccccatctccacctaacacggcgacgccccaacgctggtgctcggaaagggaactctgcccccgccccgcccccgcaccatttcaaccccgcagcagaggactcgccgccctttctactccggcatccccattccccgctccgcgagcaccgcgggcctccccaggcctcctccaaggagaactttgcgccccgggtctcccgtcgcgcttgcccggctcggggcgggccacgcgtttccgcaggggtggtgaggcctgcgctgcgcttccccctgtgccccagctcctccaagtatgatgatgttgtgggcattttccatcacccagcaaacgccgtcccgcagcacccgggaagctgcggagtcgggctggggccgccgcgttgcgcacatcggtccttggcgggtgtgtggatcccagagcgcgcccggcccccaacagcctgacaggacctggacgcacgtgccccggcgccaggagacccgggacccgggaccacgcgcccgcggccttggagcctcagggtcactggtgcgggctccgcaggaaagcgcagcccccagcaggcacccaccatccca

SEQ ID NO: 462625 - DNA, 1126 bp, Homo sapiens
gccccttctgaccagggttatgtttacttcctcacagccacttttacttctagagttgtagccccaagaaggatgtcaaataagggaacgaaacaccctccagagagatacctccaaagctcacctatagaggtcaacctctgccagtcctttgggatgaggtcatgaatgcctttctgcagtggaaagctttgccttctgcagttcgtgagtcagttgtgacatggacagcatatagtccttcaacctcagcctgctcactggtgggatatggacctattcgagtctgctgcctcagatatatgggctatcattatcctaagtgcctgcacacctacccacccctgacctgcctgccctgctcaggattaactcagtctggaaagcttcgcttggcttttgctttgttttcttccattttcaacgagcatgtcgtcatttgctctcatatcatttctttcaatccccacggtcccacccactaccagatgggtagaatctcaagtcccgggctggtaacccatggttccctcctcaccactgaaagttacaacaaagacacaaggaacagttaaagaagctctacataatcacctccctcaaacccctaaagagtatgctaaattccaagtcatcactagccagcctagagaaggaggaaagccaactgttaactggagctaaatagctagatttccaaaaagtctttggccaattgtgtctgtctttcctctctcattttcccccatgggcaaaatgagaataatactttacctgcctagtccatataactaagatttgagaagcgctttgagatccacagatgggcaaaagctaacacttcagagccctcctatgggctaggtcttcactggcattcctcatacctaccttgtaaattagatgtcatctccagttttcaaatgaggaaatcccattcccaagaccccaagaatttgacccaagtcacacaattggtaaactgagctgggaatctaatctagaatcttgtaactccaaaggctaatagctgaaataatttaatttccccctaaaagtggcatatgtacttttataaatttatttattcaataaaataattcttaagcacctactatgtgccaaa

SEQ ID NO: 462626 - DNA, 783 bp, Homo sapiens
gggtgcattgaatcctttacgcttgggactctgagggaaaagtccattaggggtctctggaccgcgacgcatgccaggttccttccgtatcttcctccaggtcccccctctatcctccacggccccatccaagccagggatgaaatttaacggcaagaagggcgcagttgacgcggcgtcaatgaactgagactaagtcaaaagccgggtaaagctaggtcttcgacgtgaagccccgcccactgtgcccataggcccctcccctgggacggtgatgaaagacctgcccactccgctcgaaggcccccgccccctgggtctagtttcagaacaagactttttttgtacagccccgcccattccaggactgcagggtctggtggggaaggtcccgcccactctgcgcataggccccgccggctccgcgcttaagacggccgctgagttagttgtggagactccgcccactctgctgaaagactccaaccctgggtttagatagcgaagggactgcctctggcttgaatttgcatagccccgctcactgtgctcttaggctccgcctccccgctaagcctgcccccgccttagcatcccatacttgcagaccttgctcctaaacagtgtgatccctcattttaggccctccaaccctatccccatcagcctggtcatcaccggcgtcacccccgccccgcgccctgcccctaggttcctgtgccagcaagatgctggagcgaggcgcggagtccgcggccggggctaccgatcctagtcccactg

SEQ ID NO: 462627 - DNA, 1932 bp, Homo sapiens
agtgagaataggacatcccactctcatctggaggatctatgtcacttttcagccaccgtaggccccgccaccggcggtgcactttctgtcgatacggtagcttcgcgcttgctcacgaacttgcctgcctggctggcgcacccagcccctccttccattccttcttccccctctctgcagcctctgccagcccgcactgcgcatgctttctgacgccccctttggtccagcgtgggaggaggggatggaaatgaggttgggctaagcagcttgcgcgcgctcccttgcctgccctcccccgacgccggacgcgcgccgggcggggcagctccgctggtccgagggcagtgcagcagcggcgacagcggctgcggccgtggccgtggcgggaggagccggaagccccgcccccggggaggggccgtcctgcaggtcccccctctatcctccacggccccatccaagccagggatgaaatttaacggcaagaagggcgcagttgacgcggcgtcaatgaactgagactaagtcaaaagccgggccctccaaccctatccccatcagcctggtcatcaccggcgtcacccccgccccgcgccctgcccctaggttcctgtgccagcaagatgctggagcgaggcgcggagtccgcggccggggctaccgatcctagtcccactggcaaggaaccagtgaccaaagaagctccccaccagggcccaccgcagaagcccagccagtcagctccagggcccaccgcgtccgcgggctcgcctccccggcctcgccggcggcccccgccccagcgcccgcaccgctgccccgactgtgacaaggccttctcgtacccgtccaagctggccacgcaccgcttagcacacggaggcgcccgaccccacccatgcccagactgccccaaggccttctcctacccctccaagctggcagcccaccgcctcacgcacagcggcgcccgcccgcacccgtgcccacactgcccgaagtcctttggccaccgctccaagctggcggctcacctctggacccacgcacccacccgcccctacccgtgccccgactgccccaagtccttctgctacccttccaagctggcggcccaccgccacacgcaccacgccaccgacgcccgcccctatccttgcccgcattgccccaaggctttctcatttccctccaagctggccgcccatcgcctatgtcacgaccccccaaccgcgcccggcagccaggcgactgcctggcaccgatgctccagctgcggccaggcctttggccagagacgcttactgctccttcatcaacgcagccaccaccaggtggagcacaagggggagagagactgagccctcccttggctcactgtccccttctgccgccagccctagccagtaagaggtgggatttctaagaccgactgtatgagctcgcctcttccagatagctggcagagggcagggcaagggattggccatttatactgggctcgagctcagaagcccgaggaactctttgctcccctgctttggggagatctcaaaccatggacgtggagctgtggtttgacagcgctggctctgcttctccccacacacttacatggcaaaggtaaaaagtctgctactatcgtgggttgatgaggattgtgggcaaacaggctctcttgttaaaagtttaaactggtgtctccactttggccatatgacggtatctaagaaattgaaaatacatacatgcttgtctcaactcttccacttgtaggaatttattctataaactcatgaatgtgaaaaaaaagcatagtgttaagggtgttcactgcagtgcgactgttgtggccaaagactggaagcaactcaagtgcccaagaacaggggaccgactattgaattacagccatggaatggaataggt

SEQ ID NO: 462628 - DNA, 1382 bp, Homo sapiens
cgaagcagccaggaattctgattagtctgctgggtatgtagaaggtgcatggtctgggtgttaagagatgagcctggtcagtcagagttgagtttaaaccaggatctggaggttgctggctgtgaacctggagcatccttttggtgccagaaagtaaagaaatgctttaaaaaggggacagggggatatagaaaggacacaggagacagcctgaaagagctcctaatggccaagattgaagaatttgaacaaaaatatgaaatgaagcttctggatcctcacacagctctgctgaagaaagtggctgtatctgcagcctttcttttctcacaagcctcttccttccacttggcaatacaaacgcaaaccggccccatccccaaggcagacagtgcactgtcccaggacacaacacctctagtgggcagaaagaagaaactgtctaagagattggtgctgacttcgagaaaacaatttttttcaataattagaattacttcaatgactgattaacaaattgttagccactgaggcctccttttaccatcctctgtcacccctcaaatcaaataggttttatttctctgctgttgcctggcaacggagatgtggcaagagatgtcagaggttaaggagcagactaaagtcattatggaaagcaagctcttatcagcattttccatctaactttgtaatctttgaaataaaatagttttcattgtatcaaatgtctgtaatttttttcttatcaaatgccaagtatttagagacatttttttctttctgaatataagtccactacacatggagaattataattatgtgcattgctttgaaattttgaaatgggcttctctattacactagcatactttgaaggttaaagtgaaaaactggcattctgaagccatgtactatgccaaaagtagttgtgaacacatttgaaagcattccaagaagtatcagaaacaaatattggctctaaataatatcctcactttgaaccattagttaatgttgaattaaattctattttcaaatacattggcctgcctattagaaaattattctttagagaaaggaacccaaaatgttctataggttctcttgtctctattttgaaatggaaaggaatgtgaccaagatttaagcatcatctttagagtttatttttttcagcctattctgtaccaaatgcaaggctcctaaggatttgttgctcataggtgattaattgtactcagcgtgacacagtttaagacttctccagtggggatagcacaataggctttcatggcatttcatttctaggcagtgggttggtttcatgagtcctaacccaaattttaaacgtttacaaattactgctataaaggttaagc

SEQ ID NO: 462629 - DNA, 307 bp, Homo sapiens
cagagagcgagaggggctgcagggacaccgagatggccgatgagattgactggctggacctgcccggccggtgggcctacggagttgacggcggtgggagaatcttcttcatcaatgatgaggaaaagtcaaccagctgggtgcaccctggaacaaagtcacccatccagagtggacacacctcctgcccaggtttgcccaagggctgggaagtggattccacccaggaaggagctgtgtatttcatcaaccacaatgaaagacggaacacatttctacacccaaagactgcccaggtcccagagga

SEQ ID NO: 462630 - DNA, 647 bp, Homo sapiens
cagagagcgagaggggctgcagggacaccgagatggccgatgagattgactggctggacctgcccggccggtgggcctacggagttgacggcggtgggagaatcttcttcatcaatgatgaggaaaagtcaaccagctgggtgcaccctggaacaaagtcacccatccagagtggacacacctcctgcccaggtttgcccaagggctgggaagtggattccacccaggaaggagctgtgtatttcatcaaacacacaggcagaggttcagaggcaggagacgcagccgcggggcaggatgtggaggcagtgggaagggaaggtgtccgtggggtgtacgaaggaggacatcatactggtggtggcaaggccagctccggaggggttacgtttccaatcccccaccgccaagatctgccagcacttagatctgccaccatctaccacctacatcagcttagccgctaacctattttttcttttttttaagataggactgaatttttcctgtttggacccaaatgcttcttgcttcagttaagaattgtgaattgtttcttcttttctccctcttgcagataccatcttcatattccttttggtacatggctctagagattgttcactaaacactttcacatgtattac

SEQ ID NO: 462631 - DNA, 2341 bp, Homo sapiens
tatatgacaggtgacctgctctccactggggcagcctcaactttcttgtaatgtttcttctgccctttgcaggtcctcctgatgccacgtccacccatctacctgaaaacaaaacaggcacagagcacctcctgcttgcttgtgtggtcgcagggccccggcgagtcacccaatgctgcagaatctcagcctcacactataggtcgtggcagccccaaatgtggctccaccccaaagattgggctctcagcctccggtccagtcccagaggcaagccgagtgggtcttccctctccctccaaagacaaggcaactggtgtccgagtcatactctgaggataaacctatttcctaagcaaaagcctctccatcatggaaaagcatccaccagccacggtcctccccaggctacctgtggggcccaggaaggcctgcatgaagtcgggagcggagcttgttgggcgcctggtatttatcaactcctgtgctccagcctgggcgacagagtgagactctgtctcaaaaataaataagtaaaaaagtaaataacctgatcctctggagaagggaacacaaggggaatggagggtttgttgaaattaaagcgcacggcgagaaaggatgggtcactagcatcctccttttccctgcgcgggtgtccccggaagcaccccctccctcgccaagcccagcttctgcacaggctccaggagacgttgctccggggtcctgccggggacaccgggctgcgtccccgtcggccgccgcgcagatgcgcacttggagcagactcgggttccggggctgggggaaagagaaacccgggctccaaaccctcctggaagtctcttgagggcgcgagctccgcagaggcaggagcctccgcgcacgtgcacgcccgaaactgctaaagcccacgcgcgagcttgaccgccgcgtggaggcgccggctgcggggagagaagccgccccggccccggccccttcctgcggcgccctccggccctggccccggccccagccgtgcgcgggcggccgctcccccacaagctggcctggctgacccagcgccgccgctgggccttcaaagggcggccgcttcctgtcgccccgggacggctcggccgagccctcctcgtcacggggcgggcgtccccgccgtcacctcctttgcccttagtcgggaggacgcccccctactgcactccccggccgagctgggcagacccccgtcctcccacctgggggctcctccttctgctccctcgcctccctctgctctccggtcccctcccctcgccctcatctctgggaaagttgtttcagccctgaagtgtgcctgagcacgagcaccttctcctcctccctgttccccatacgagtcacaggaatgacccaaggcactggataaaaattcagattcctgcggactctgattccgaaggtctgagtggtggtgttggggtagggagcccgaccagcgctaaagagggcaggctggcagaaagtccagcgagcgtgaggggccaacacagcgctccccgcctcccccggaggccgctatggcatttggggtgcagagcccaaccgagtgcaagaattgtcgcattatgcttctaaatcaaaggtcatctggctttggtgtcctgcaggacaaggtgggaggcaatgtcagccactataaggtagctttgtccctccaactcttcatccgagagactggaacagaggaaggggtctcgtttctagggtacagcagccacctccctttccctggcctctcagctgagcactgcgtcgtcgtgggccctgggggtcccagagcctctccagagttctccaaggacttggccccagaagacccagacgtccccctcaaagtcaagcaggcttacaagaggctaatgggaggcgagctggtctctgtcctggagctgcccctgccctggccatgccctggccgcatttctggatcaatggccactgaccagaggcctgactgtgccactgacctacacatcggctattaaccccaaacttgttggcagaatttgtattaactatttatgacacttcatcacccggttccattgcagtattgtagcctgacttctgagccagtgtttcacactctaagcttatgaaatgcttctccaatcagctaagaaccaatggcccagaactttatcaacttctgataggagtttgcagcccacaaaacccagctcagcacactccctgcagagaaaacatctgcacctgggcttcttggcccagaaaaaggtgatgtagccacttcagagtaaagtgtagccattgttcctcctccccctctgtcatc

SEQ ID NO: 462632 - DNA, 471 bp, Homo sapiens
tatatgacaggtgacctgctctccactggggcagcctcaactttcttgtaatgtttcttctgccctttgcaggtcctcctgatgccacgtccacccatctacctgaaaacaaaacaggcacagagcacctcctgcttgcttgtgtggtcgcagggccccggcgagtcacccaatgctgcagaatctcagcctcacactataggtctgtgatccatccacttccacccacagacgggtttgctggaaagagtaaaagcaaaattaaacaaaagagcattatattctgttcctttcttttaaactcatctgctgggcaaatggagttttacaatctagagctgaatgagagatggcttcagccaaatccgagtttcttttcttttctttctttctttcttaaattctttctctctctctttccttccttccttcctttttttttagatgaagtcttgctctgcttgagatctg

SEQ ID NO: 462633 - DNA, 267 bp, Homo sapiens
tatatgacaggtgacctgctctccactggggcagcctcaactttcttgtaatgtttcttctgccctttgcaggtcctcctgatgccacgtccacccatctacctgaaaacaaaacaggcacagagcacctcctgcttgcttgtgtggtcgcagggccccggcgagtcacccaatgctgcagaatctcagcctcacactataggtctgtgatccatccacttccacccacagacgggtttgctggaaagagtaaaagcaaaattaaac

SEQ ID NO: 462634 - DNA, 1586 bp, Homo sapiens
tgaggcagacaaatccagtctgtagagaagagatgacagcctttgggcaggcagggctgggcagggacccatcctcttggctgcattgtgatgtcttaagaagactgaaggggcaccgtgacgtcatagattgcgggcccacccctccccctgtctgcctgccctccccactggccgggcctcaacctcttctccccacaaccccaaccccagaggaaaagccccctcacctggcgtcccgcaaccatggatgcaagtcgccccaagtcctcggaatcccagtcctccctggaggcccccaggcccggcccaaaccccagtcccaacgtggtgaacaagcccctgcagcgggactcccccggcatggtggccgacaggctgccaccaaagaccggcgcggtggttattgacatgggcacaggcacctgtaaggtaggttttgctgggcaggccagccccacctacaccgtggccaccatcctgggctgccagcccaagaaacccgccacctcggggcagtccgggctgcagacgttcatcggcgaggcagcccgcgtgctcccagagctgacgctggtgcaacccctgcgcagcggcatcgtcgtggactgggatgccgccgagctcatctggcgccacctgctggagcacgacctccgagtggccacccacgaccacccgctgctgttctccgacccacccttcagcccggccaccaaccgcgagaagctagtggaggtggccttcgagtcgctgcgctccccagccatgtacgtggcatcgcagtcggtgctgtctgtctacgcccacggtcgtgtcagcgggctggtggtggacacgggacacggggtcacctacacagtgcccgtcttccagggctacaacctgctccacgccacggagcgtctggacctggcgggcaacaacctgaccgccttcctggcggagatgctgctccaggccggcctgcccctgggacagcaggacctggacctagtggagaacattaagcaccactattgctacgtggcctccgacttccagaaggagcaggcccggccggagcaggagtacaagcggactctgaagctgcccgatgggcgcacggtcaccctgggcaaggagctgttccagtgtccggagctgctgttcaaccccccagaggtcccggggctgtcacccgtcggcctctccaccatggccaagcagagtctccgcaagttgtcactggagatgcgcgcggacttggcccaaaacgtgcttctctgcggtgggtcctcgctcttcaccggcttcgagggtcgcttccgggcagagctgctgcgcgctctgccagccgagacccacgtggtggtggctgcccagcccaccaggaatttctccgtatggatcgggggctccatcctggcctccctgcgcgccttccagtcctgctgggtcctgcgggagcagtacgaggaacagggtccctatatcgtgtaccgcaaatgctactgaccagggcagagctggggagggcgtgggggcagtaaagcctctgctacagccggctctgtcctgtccttcctccagggcctgccccatcc

SEQ ID NO: 462635 - DNA, 1171 bp, Homo sapiens
aggaatgaggccaaggcagggatgtcgcagctcctgccagggcacccacctggctggggaagcctcacaatcatggtggaaggcaaagaggagcaagtcacatcttacatggatggcagcaggcaaagagagagtgaggaagacataaaagtggaaacccctgataaaaccatcagatcttgtgagatgtattcactactaggagaaaagtatgggggaaactgtctccatgattcaattatctcccaccaggtccctcccacaacacgtgggaattatgggagtacaattcaagatgagatttgggtggagacacagagccaaaccatatcatgtttactttcggggacatccgtcatcaccattggaatccagacacacaccatgaaacataaacagactgaggccaacaaaggtgaagacagttgcctaaataacacagcttatttgcagaagagctaacaagcgttgagtcgatactattttagctatattgtgtgactttttgtaccagagaacttacaaaaatcatcagggccagatggcctgcaagatattggatcattaggacataaaaattaggtagaatcaagaacgtcggtgctcacccagtatgaggatcatacgaattggtggttggaaaagcattgaaatgtcactgactttgactgtcagatgtgtggggtcaggcaggcatgtgtttctcggatgctcattgtagctcttgcttatccatttttattaactgatccagtgactcacaaggaagttggcattattgtgtgtggaacagcagcagagcttactaacattctcagctacaaaacaaaaaataacgaaccagagacttcagctcagttcttgtgattggagttgtgtttcctccagagtgacgagcatggtataagacgcctcgccctgcaccccatcacggctctccccagacagccctgacagagggtcctggggactttttcttcttatgtctgtacctcatcagttaattctggctccatacagaatgcaaaaatatctactcgctgctctaggatcccctactgttaatcatagaaagccaattgccgggtatgaacttgcagaaagcacaatctttaggaactgagtgctccttaatgccttttcacagaaggaattatttccctccagttgt

SEQ ID NO: 462636 - DNA, 1153 bp, Homo sapiens
gcgccctcacccgccaccgccgccgcggccgccgccgcacccggacagcgagcggctgaggccgccagggcccaaaggacagcggcccagacaggggctggcggcccggccggccccggctcaccgactcgggcagcatccacctgccccagccaacacccttctctcgccccaggtcctttctcagcctccagctgggctgtccccaagctgagctgaggctcttctcctccgatccccacctctgcccggacatccaccatggggacagccaccaggaggaagccacacctgctgctggtagctgctgtggcccttgtctcctcttcagcttggagttcagccctgggatcccaaaccaccttcgggcctgtctttgaagaccagcccctcagtgtgctattcccagaggagtccacggaggagcaggtgttgctggcatgccgcgcccgggccagccctccagccacctatcggtggaagatgaatggtaccgagatgaagctggagccaggttcccgtcaccagctggtggggggcaacctggtcatcatgaaccccaccaaggcacaggatgccggggtctaccagtgcctggcctccaacccagtgggcaccgttgtcagcagggaggccatcctccgcttcggctttctgcaggaattctccaaggaggagcgagacccagtgaaagctcatgaaggctggggggtgatgttgccctgtaacccacctgcccactacccaggcttgtcctaccgctggctcctcaacgagttccccaacttcatcccgacggacgggcgtcacttcgtgtcccagaccacagggaacctgtacattgcccgaaccaatgcctcagacctgggcaactactcctgtttggccaccagccacatggacttctccaccaagagcgtcttcagcaagtttgctcagctcaacctggctgctgaagatacccggctctttgcacccagcatcaaggcccggttcccagcagagacctatgcactggtggggcagcaggtcaccctggagtgcttcgcctttgggaagtgagtgtgaagagggaggggaagcagagcacggtctctcgggggcacaggtgaccccaggggtctagcaaagtactgggcacacagtgggtatc

SEQ ID NO: 462637 - DNA, 460 bp, Homo sapiens
agcccctggtctctgcctccagttctgcaggaattctccaaggaggagcgagacccagtgaaagctcatgaaggctggggggtgatgttgccctgtaacccacctgcccactacccaggcttgtcctaccgctggctcctcaacgagttccccaacttcatcccgacggacgggcgtcacttcgtgtcccagaccacagggaacctgtacattgcccgaaccaatgcctcagacctgggcaactactcctgtttggccaccagccacatggacttctccaccaagagcgtcttcagcaagtttgctcagctcaacctggctgctgaagatacccggctctttgcacccagcatcaaggcccggttcccagcagagacctatgcactggtggggcagcaggtcaccctggagtgcttcgcctttgggaaccctgtcccccggatcaagtggcgcaaagtgg

SEQ ID NO: 462638 - DNA, 1181 bp, Homo sapiens
aaccagagccactcaacagcgctggaacccattcggtggggcctggggcccctcatcccaagccaggagggtttctggggaggggtgcagcccctggcagactgacagtgtggcctgggggtttgggggtgccagggaagcaggggccaacctcataggaggagacacgagtgcggttctctttcccccactggggggcctgctgtgtcagcagccaggcgggaggcctgggcggcagagccagtggtacaggggcctgggcagggcggtgtctggcagcagcggcaccatgtccaccatccagtcggagactgactgctacgacatcatcgaggtcttgggcaaggggaccttcggggaggtagccaagggctggcggcggagcacgggcgagatggtggccatcaagatcctcaagaatgacgcctaccgcaaccgcatcatcaagaacgagctgaagctgctgcactgcatgcgaggcctagaccctgaagaggcccacgtcatccgcttccttgagttcttccatgacgccctcaagttctacctggtctttgagctgctggagcaaaaccttttcgagttccagaaggagaacaacttcgcgcccctccccgcccgccacatccgtacagtcaccctgcaggtgctcacagccctggcccggctcaaggagctggctatcatccacgctgatctcaagcctgagaacatcatgctggtggaccagacccgctgccccttcagggtcaaggtgattgacttcggatccgccagcattttcagcgaggtgcgctacgtgaaggagccatacatccagtcgcgcttctaccgggcccctgagatcctgctggggctgcccttctgcgagaaggtggacgtgtggtccctgggctgcgtcatggctgagctgcacctgggctggcctctctaccccggcaacaacgagtacgaccaggtgcgctacatctgcgaaacccagggcctgcccaagccacacctgttgcacgccgcctgcaaggcccaccacttcttcaagcgcaacccccaccctgacgctgccaacccctggcagctcaagtcctcggctgactacctggccgagacgaaggtaagggaaaagttgggggtttgagaccagcctggggaacatagtgagacctcctctttataaaacatgg

SEQ ID NO: 462639 - DNA, 1191 bp, Homo sapiens
ggagggcagtgggtgtgggtgagaatccctgggcagagaagggcgccgccatgctgggcacggctgagtcacgctccagcgacgccttgccccagggtgctggagctggcgccaccctgggtgtggtcactgagctgatgtggggcctcggtgcctggggaactgacttcgaagatgccaagccccctggcctcccgcctggcctaggttctggggtcaccctccaggactgtggtggcccacaccctgagaatgccttggagagcctagaggccctgagccttgggcctgggaatcgtgccctgactttccctacccagtgccaccctctgagggctgcccatcggggcggttgttattgtcgctgcactgggattggggcagaggggcggggggctcctggtcaggcggcgcttggccgggcagcccaggttggcggctggctcgaggcccagcccacggagcttctgctgagagtctgggcccattaggcaaagcgtgccagcctctggccccgcccggtgcccccctcacccctgtgccacggccggctggggttcctggggatgggatttgcttcctgtcacaaatcacattgccagggatttccaaccgaccctgagctctgccaccgaggatgctgcccggggacggggtggcagagaggccccgaagcctgtgcctggcctgaggagcagggcttagctgcttgtgagcagggtccacaccaagtcgtgttcacagtggctaagttccgccccccaggccctcacctcctctggccttgccgcctgtcccctgctgccgcctgtctgcctgccatcctgctgcctggcctccctgggctctgcctcccgtgcctactgagctgaaacacagttggtttgtgtacactggctcagttcagcaggaacaggggtcaagcccccttggagcctgcagcccctgccttccctgggtgggctgatgcttggagcagagatgaggactcagaatcagacctgtgtctggaggagggatgtggtgggtggggttggctgggcccaaatgtgtgctgcaggccctgatccccaactctgcaactggggacccctgcatggccacagctcaggctgggctgtggtgccagcatagataggtgggtgagtgggtggcccttccattaaaagggaagccagctgtgtcctttcc

SEQ ID NO: 462640 - DNA, 588 bp, Homo sapiens
  misc_feature (33)..(33): n is a, c, g, or t
  misc_feature (66)..(66): n is a, c, g, or t
  misc_feature (75)..(75): n is a, c, g, or t
  misc_feature (79)..(79): n is a, c, g, or t
gtggcccttccattaaaagggaagccagctgtntcctttccgggcctggaggcttggcccctcctntcccaagcntggnaggggcactggcccggcccgcacctgcttgtgagcagggtccacaccaagtcgtgttcacagtggctaagttccgccccccaggccctcacctcctctggccttgccgcctgtcccctgctgccgcctgtctgcctgccatcctgctgcctggcctccctgggctctgcctcccgtgcctactgagctgaaacacagttggtttgtgtacactggctcagttcagcaggaacaggggtcaagcccccttggagcctgcagcccctgccttccctgggtgggctgatgcttggagcagagatgaggactcagaatcagacctgtgtctggaggagggatgtggtgggtggggttggctgggcccaaatgtgtgctgcaggccctgatccccaactctgcaactggggacccctgcatggccacagctcaggctgggctgtggtgccagcatagataggtgggtgagtgggtggcccttccattaaaagggaagccagctgtgtcctttcc

SEQ ID NO: 462641 - DNA, 1087 bp, Homo sapiens
  misc_feature (20)..(20): n is a, c, g, or t
gctctccaaggaagttaagnagccagacccttggataaccctaaggaatatcttggatgtcttcacggggcttatgacttattctgaggtttacaaaatagaggcccccagctgagcaaagagagggctgcagcgccgagggaacagctgccggactcaccggagaggcctcctggagcacgccgggaccccctccaccccctggctttggctgcatccatggctagtttgcctgaactatatctgagccactgagagtatttattaagcagagaataattttgagtttcacttttataacttttgtttcaaaagttgttttggataatttaatgaaatgactgtaaaccagaattccccttttcattatttctttgtgtcaatataaaaagagttgatgattttaaaagccagtgagatgtccctgtctgtggatgtcagcgggagggtggggtctgacgcctttctctggtggctgtccaggaagattgccccagcttgcactcccttttggcgggttccagagccttccatttgaaaggagcatctctcaccactctgccccacccagcaccagctcttctggaacccactgacttcctaaacactttcttcctccttcacctcattgaattcaagactttagaaaacagccaaaaactctagaggtgggggtgggttcgatctggaaatccctgctgtaatctttttaagggaatccactggaaattattaatttatgttttaaataaaaccattccttacttaacagaatattaagccactcatttttttaacagaactttcgagatataattaaaatgccataaatttcacccccacacagtgtacaattccaaggtttccaatatagtcacagaagtctctgcaacaattaccacaattttagacatgaagaccatttgttggcagccctacctgcctctatgtgtatgtatataattttaatattggattggatattatagtaatattgtactgttacctatttgtgtttttatattgctgttttattttattcagatgaataataattatctccatatagtcatacatttatataggg

SEQ ID NO: 462642 - DNA, 1164 bp, Homo sapiens
agcccacggttctggagtctgtgaaggtctccagagctccctggataaatcatgaacagaagcatctatgaccgacagttgctctgtgtccttctagcctcgcaggagtttccagctcatgagggcagaggagatgaagagaggccgatcgacgcaaaaattatgaccaaatgtctccatctgatgaagcagctgcattcctatgggggcggtgggctgtgcgcttgcctggtgtcttatgagtctgcatcttgtaaagaagacagcggcgatgtagctggacttgaagccagacaggaggaattagggaactctgtcactgaattacagcacgcagagttgaaaaccatttgtagacaatttcgtgttacagtagccaaagcagaaggcaatttcagtattaatctaactaaggttttgtgtagtttactatcatccaggcagcccgagggctccactggacccagaactctgagttctgatgctgcctatcatttgcttttcctcatgagctcctggaccacctcatatcaccagcaccctctacccaaggtcctggagccaacactggagtaaaagagcacaagagaactccttagaggtggaaggataccctctgaggtcaaatcactgggcttgtggccatgagaccacagactttgcctggcttccagtgactgtccgagatgacctgtggagtgcaccgcctgtacttggacatcactgtcttttcggatccatacccgtcatccttggaatttcccctgtatccaaacctgttcctgatacaggtataaccctaaggaatatcttggatgtcttcacggggcttatgacttattctgaggtttacaaaatagaggcccccagctgagcaaagagagggctgcagcgccgagggaacagctgccggactcaccggagaggcctcctggagcacgccgggaccccctccaccccctggctttggctgcatccatggctagtttgcctgaactatatctgagccactgagagtatttattaagcagagaataattttgagtttcacttttataacttttgtttcaaaagttgttttggataatttaatgaaatgactgtaaaccagaattccccttttcattatttctttgtgtcaatataaaaagagttgatgatttt

SEQ ID NO: 462643 - DNA, 1846 bp, Homo sapiens
agcccacggttctggagtctgtgaaggtctccagagctccctggataaatcatgaacagaagcatctatgaccgacagttgctctgtgtccttctagcctcgcaggagtttccagctcatgagggcagaggagatgaagagaggccgatcgacgcaaaaattatgaccaaatgtctccatctgatgaagcagctgcattcctatgggggcggtgggctgtgcgcttgcctggtgtcttatgagtctgcatcttgtaaagaagacagcggcgatgtagctggacttgaagccagacaggaggaattagggaactctgtcactgaattacagcacgcagagttgaaaaccatttgtagacaatttcgtgttacagtagccaaagcagaaggcaatttcagtattaatctaactaaggttttgtgtagtttactatcatccaggcagcccgagggctccactggacccagaactctgagttctgatgctgcctatcatttgcttttcctcatgagctcctggaccacctcatatcaccagcaccctctacccaaggtcctggagccaacactggagtaaaagagcacaagagaactccttagaggtggaaggataccctctgaggtcaaatcactgggcttgtggccatgagaccacagactttgcctggcttccagtgactgtccgagatgacctgtggagtgcaccgcctgtacttggacatcactgtcttttcggatccatacccgtcatccttggaatttcccctgtatccaaacctgttcctgatacaggtataaccctaaggaatatcttggatgtcttcacggggcttatgacttattctgaggtttacaaaatagaggcccccagctgagcaaagagagggctgcagcgccgagggaacagctgccggactcaccggagaggcctcctggagcacgccgggaccccctccaccccctggctttggctgcatccatggctagtttgcctgaactatatctgagccactgagagtatttattaagcagagaataattttgagtttcacttttataacttttgtttcaaaagttgttttggataatttaatgaaatgactgtaaaccagaattccccttttcattatttctttgtgtcaatataaaaagagttgatgattttaaaagccagtgagatgtccctgtctgtggatgtcagcgggagggtggggtctgacgcctttctctggtggctgtccaggaagattgccccagcttgcactcccttttggcgggttccagagccttccatttgaaaggagcatctctcaccactctgccccacccagcaccagctcttctggaacccactgacttcctaaacactttcttcctccttcacctcattgaattcaagactttagaaaacagccaaaaactctagaggtgggggtgggttcgatctggaaatccctgctgtaatctttttaagggaatccactggaaattattaatttatgttttaaataaaaccattccttacttaacagaatattaagccactcatttttttaacagaactttcgagatataattaaaatgccataaatttcacccccacacagtgtacaattccaaggtttccaatatagtcacagaagtctctgcaacaattaccacaattttagacatgaagaccatttgttggcagccctacctgcctctatgtgtatgtatataattttaatattggattggatattatagtaatattgtactgttacctatttgtgtttttatattgctgttttattttattcagatgaataataattatctccatatagtcatacatttatataggg

SEQ ID NO: 462644 - DNA, 1045 bp, Homo sapiens
  misc_feature (2)..(2): n is a, c, g, or t
  misc_feature (5)..(6): n is a, c, g, or t
  misc_feature (9)..(9): n is a, c, g, or t
  misc_feature (11)..(11): n is a, c, g, or t
  misc_feature (14)..(14): n is a, c, g, or t
cncanncantntcngatccacagtcagaatgagctaccaaagatgcaaatcagatccagttactctcctgctaaaaattctccagcatctcttgcctccaggtccaaaatctccccctctctattatacaaagctctccccagatgctatctgcaacctctgtacccagatcaagcctggacccttgttgtctctgcgcgaagctgagcagtcagaactcctgtttgggttcagtgtgggtacctttggtttcaaaaatgcattaggtggggaggatgaaggcagcaccttcggtctgagaactgcaggtctgcgagtgtctccatttggggtgactgccgtcttcattgaactgaccctcgccaccctcgccatagtccaccaggctgtcgtcactctcctgctgcttgatggtgccgtccagagatgtctgactgccctgcaggggcttgttgtcctcatcactggccaaagagagacagagaatctcagtgcccagtcaagggcattgcaccaagaaagttgccagtacggggtgaagactgatgaacacgtgtcctctgcactctggttgcccagggcgccccgggctgaaaagcagctcccgacaactcttctgtacccccagcaagctgacttcaagcccctctattcttagtgcttcagctgttaccactgagtgggcctctcccaagctgaccacctccttaactctcatcagcaccagtgaccctttattcatccccatcatccctccagccacctccacaaccgtaagcccagagcctcctcctacagctctccttggatgcatgcgcttgaaattcaacctgcatcttcctgccccctgccttgattctcccagctctcctgctgctgccacaggccacaccactgtgcccatctctaagagctgccacttcttccaaaacacttcccatattcctctcactgttccattctattccaggggtcccctcacctgtgcctgcctgccacttcctgtggatacaatgagacatcccgttaccaccttcctaggagg

SEQ ID NO: 462645 - DNA, 669 bp, Homo sapiens
cggccgcttagtcgcagggcccgccacccgagggtcgcgcagcccactgggcccgatggagccgccgcgtgccgggcgcgtgcgcgagctcgcccgggcgggggccgcggggcgctaacggtcgcagacgagttcgccgccctgggccgggaggcggctcaacaccgtgactgccgacctccgagaccgtttacctcactgcggcgtgtgctggcggcagcccgcgccgcctccgagcaataaccgcgccgccaccgctgctgccgccggccctgagggagccggccccggccctcccgcgccccgagtccccactgccctccgcatgtcaacggcgcccgccccgctgccgccccatccacgttgagacgcgaacaaaacccagacggccaggtccaagcttcccaagctttatttattgccaaatttgggcggcctcgcccgcacggcaccctccgagtccccgccgcgtctgcaccatcccgcgatggcgtttctcgtgtttttcttttctggatgatataaatattgaccgcacactcctgcttgctccgggttttctctggggtcccaagagcgcagtggccttgggggagaggtgagggtcctgccctccggccgggccgccaaagcggggtgacccgagagcgcaaaggcggccgcaacgtg

SEQ ID NO: 462646 - DNA, 403 bp, Homo sapiens
cggccgcttagtcgcagggcccgccacccgagggtcgcgcagcccactgggcccgatggagccgccgcgtgccgggcgcgtgcgcgagctcgcccgggcgggggccgcggggcgctaacggtcgcaggtccaagcttcccaagctttatttattgccaaatttgggcggcctcgcccgcacggcaccctccgagtccccgccgcgtctgcaccatcccgcgatggcgtttctcgtgtttttcttttctggatgatataaatattgaccgcacactcctgcttgctccgggttttctctggggtcccaagagcgcagtggccttgggggagaggtgagggtcctgccctccggccgggccgccaaagcggggtgacccgagagcgcaaaggcggccgcaacgtg

SEQ ID NO: 462647 - DNA, 1241 bp, Homo sapiens
tttcctgggggcttccaagggagggggccccgccgtctgcagtccagcatggaggcaccctgcttaataagcaggcgccacagctcagggtcaatgcaagacgcatcccctgcaaaacacactggctcattttaaagctctcaccttccaaggcccgcccgagtcccaagtcccacccgcgtccaccctccctgatccagaggcgggatggccggccgggtagggggcgcggggctcggcggggctctgacggcgcggcctggcttgcaggctagaggcggccgaggcagcgggaggagcgagccccgattcccccccggagcgcggcgcgggcagcgcggggcctgagcagcagcagccgccactggagccggacgccgagcgggacgcgggccccgagcaggcccagaccagctaccgcgacctgtggagcctgcgcgcctcgcttgagctgcatgcggccgcctcggaccacagcagcagcggcaacgaccgcgactcggtgcgcagcggcgacagctcgggctcaggctccgggggcgcggcgcccgccttcccgccgccctccccgcccgcgccgcggcccaaggacggcgaggcgcgccggctgctgcagatggacagtggctacgccagcatcgagggccgcggcgcaggcgacgacaccgagccacctgccgcgcccgcccggccccgcagcccgcgcgcctggccccgccgcccgcgccgcgactacagcatcgacgagaagacggacgcgctgttccacgagttcctgcgccacgacccgcacttcgacgacacgccggctgccgcgcgacaccgcgcccgcgcgcacccgcacgcccgcaaacagtggcagcgtggccggcagcacagcgaccccggcgcccgcgcggccccggccctggccggaaccccggcaccgcctgccggcgcggcccgacccgcgcgtgcgcccttgcggcgcggcgacagcgtggacggcccgcccgacggtcgcaccctgggcggcgccggcgacgaccccgccatccccgtcatcgaggaggagccgggcggcggggggtgccccggctcgggcctgtgcgtcctaccatccgggtcggtgctggacaagctggcggctggcctcgacgagagactctttccgccgcgcctcgccgagcccgtcgtggcgactcccgcgttggtcgccgccgcccccacgtcccccgaccacagcccggcctaagtcccgc

SEQ ID NO: 462648 - DNA, 2792 bp, Homo sapiens
tgggccgggggcggggctcggccgccgcggcgggtgcggggggcggctccgcgtgcggagtgggcgcccgggagcgcaggctccgccccccgccccgccggaagggaaggggaggcggtggccggcgcggagccagccagacccagcggcgagcgcagcgggggcggcgggccggggaccgggcagcaccgggcgcgcggagcgggcgcgccgccaacgcggtcacgtgcgcggcccctcctctcgcgccggcctcccccgcgccgcgctctccattcataaattctccgcctgctccgcggccaccgggcgccggagccagccgcgagcgccacgcagccgcccgccgccagcccgccgcccatgggccgctcgtcccggcgctgaggtaggcgcggcgggctcggggctgcggggggcggacgggggacaggccggggatcgcagccggctgtgggctaagcggccggagggagggcgcggaggagtccggcgggcgtggggaccgagatccgggccttgcgccccccacccggctgcctccagagggacccccgctcaggccccgccccagcctcagtttctccctgtgaggtcgggcgaggacgatggcgtctcggctcagccctggccgtaaggcggccggggatgctccgggcgcccgggctgggcacggcggggaggcggccgcggccatcttgcggcttcgcgcccgcccccccgaggccgccgcccccccccaggccgccgcccccgcgccccctccccgccgctccctggcaacccgcccccccagccgcggcctgctccgcacactcagcaccggggagacctccacctcccggagtcgtgacccgggagcacgcgcccagcccctgcaccctccctggcgcgcaggcagcgggaggtctccctctacccaaccatggccgggtgggccctgccagggtgtagctgaacttcttggggtgggggtagccccccacccccgtgatggggcggacagggcgtctggagtccttctcgagccggctgcaccgccttggcgtccccattcctccgagtgcttgccctgcccagcgctgagctccagggcctggcgctaccttgcaggacaggccgcaccggctgtgtgcagttgtgatgggtacaggcgcaccctcagagggccaggcctcctcccccgccatggggatgggagatggaggtccagagagagcccccggggcccgctgggcagagccaagccgggtggaggctgcctccggctctgctacctctccatgagtcactgccccctgtgtgggctcctgctcctgcagggaagacccagcttgtctgcagtggctcctgcaggagaagtaggtctagctggagctgaccaggcttcctccccacagggccctcctccccagttcagaatgcagcccacagccaccatggccacagccgccaccaccaccaccaccaccactgccacagtagccctgacgacgtcgtgggacaatgccactggacgccccacggcagagccagaccccatcctggacaactacgtgctgctggtggtggtgatgtcgctgttcgtggggggcacgctggtggtgttgtctggcgtcctgctcctctgcaagcgctgctgggacgtccaccagcgcctcaacagggccatggaggaagcggagaagaccaccaccacctacctggacaacggcacccacccagcccaagaccccgacttccggggagaggaccccgagtgccaggatgcggagaccgaacgcttcctgtccaccagctccacgggccgccgggtctccttcaatgaggcggcgctgtttgagcagagccgcaagacgcaggacaagggtcgccggtacacactgacggagggggacttccaccacctgaagaatgcccggctcacgcacctgcacctgccgcccctcaagattgtcaccatccacgagtgtgactcaggcgaggccagctcagccaccacgccccacccggccacctctcccaaggccactctggccatcttccagcccccggggaaggccctcaccggccgctctgtgggccccagctccgccctgccaggtgacccctacaactcagccgcgggcgccactgacttcgcagagatcagcccctcggcatctagcgactctggggaaggcacctcgttggatgccggtaccaggagcaccaaggctggagggcccggggctgcagcagggcctggggaggcgggcccgggatccggggcaggtaccgttctgcagttcctcacccgcctgcgccgccatgccagcctggatggggccagcccctatttcaaggtcaagaagtggaagctggagcccagccagcgggcagccagtctggacacgagaggttcccccaagcggcaccacttccagcggcagcgggcagccagtgagagcacggagcaggaggagggggatgcccccccatccacgttgagacgcgaacaaaacccagacggccaggtccaagcttcccaagctttatttattgccaaatttgggcggcctcgcccgcacggcaccctccgagtccccgccgcgtctgcaccatcccgcgatggcgtttctcgtgtttttcttttctggatgatataaatattgaccgcacactcctgcttgctccgggttttctctggggtcccaagagcgcagtggccttgggggagaggtgagggtcctgccctccggccgggccgccaaagcggggtgacccgagagcgcaaaggcggccgcaacgtg

SEQ ID NO: 462649 - DNA, 3546 bp, Homo sapiens
tgggccgggggcggggctcggccgccgcggcgggtgcggggggcggctccgcgtgcggagtgggcgcccgggagcgcaggctccgccccccgccccgccggaagggaaggggaggcggtggccggcgcggagccagccagacccagcggcgagcgcagcgggggcggcgggccggggaccgggcagcaccgggcgcgcggagcgggcgcgccgccaacgcggtcacgtgcgcggcccctcctctcgcgccggcctcccccgcgccgcgctctccattcataaattctccgcctgctccgcggccaccgggcgccggagccagccgcgagcgccacgcagccgcccgccgccagcccgccgcccatgggccgctcgtcccggcgctgaggtaggcgcggcgggctcggggctgcggggggcggacgggggacaggccggggatcgcagccggctgtgggctaagcggccggagggagggcgcggaggagtccggcgggcgtggggaccgagatccgggccttgcgccccccacccggctgcctccagagggacccccgctcaggccccgccccagcctcagtttctccctgtgaggtcgggcgaggacgatggcgtctcggctcagccctggccgtaaggcggccggggatgctccgggcgcccgggctgggcacggcggggaggcggccgcggccatcttgcggcttcgcgcccgcccccccgaggccgccgcccccccccaggccgccgcccccgcgccccctccccgccgctccctggcaacccgcccccccagccgcggcctgctccgcacactcagcaccggggagacctccacctcccggagtcgtgacccgggagcacgcgcccagcccctgcaccctccctggcgcgcaggcagcgggaggtctccctctacccaaccatggccgggtgggccctgccagggtgtagctgaacttcttggggtgggggtagccccccacccccgtgatggggcggacagggcgtctggagtccttctcgagccggctgcaccgccttggcgtccccattcctccgagtgcttgccctgcccagcgctgagctccagggcctggcgctaccttgcaggacaggccgcaccggctgtgtgcagttgtgatgggtacaggcgcaccctcagagggccaggcctcctcccccgccatggggatgggagatggaggtccagagagagcccccggggcccgctgggcagagccaagccgggtggaggctgcctccggctctgctacctctccatgagtcactgccccctgtgtgggctcctgctcctgcagggaagacccagcttgtctgcagtggctcctgcaggagaagtaggtctagctggagctgaccaggcttcctccccacagggccctcctccccagttcagaatgcagcccacagccaccatggccacagccgccaccaccaccaccaccaccactgccacagtagccctgacgacgtcgtgggacaatgccactggacgccccacggcagagccagaccccatcctggacaactacgtgctgctggtggtggtgatgtcgctgttcgtggggggcacgctggtggtgttgtctggcgtcctgctcctctgcaagcgctgctgggacgtccaccagcgcctcaacagggccatggaggaagcggagaagaccaccaccacctacctggacaacggcacccacccagcccaagaccccgacttccggggagaggaccccgagtgccaggatgcggagaccgaacgcttcctgtccaccagctccacgggccgccgggtctccttcaatgaggcggcgctgtttgagcagagccgcaagacgcaggacaagggtcgccggtacacactgacggagggggacttccaccacctgaagaatgcccggctcacgcacctgcacctgccgcccctcaagattgtcaccatccacgagtgtgactcaggcgaggccagctcagccaccacgccccacccggccacctctcccaaggccactctggccatcttccagcccccggggaaggccctcaccggccgctctgtgggccccagctccgccctgccaggtgacccctacaactcagccgcgggcgccactgacttcgcagagatcagcccctcggcatctagcgactctggggaaggcacctcgttggatgccggtaccaggagcaccaaggctggagggcccggggctgcagcagggcctggggaggcgggcccgggatccggggcaggtaccgttctgcagttcctcacccgcctgcgccgccatgccagcctggatggggccagcccctatttcaaggtcaagaagtggaagctggagcccagccagcgggcagccagtctggacacgagaggttcccccaagcggcaccacttccagcggcagcgggcagccagtgagagcacggagcaggaggagggggatgccccccaggaggacttcatccagtacattgcccgggcgggcgacgccgtggccttcccgcacccccgcccctttctggccagcccgccccctgctctcggcaggctagaggcggccgaggcagcgggaggagcgagccccgattcccccccggagcgcggcgcgggcagcgcggggcctgagcagcagcagccgccactggagccggacgccgagcgggacgcgggccccgagcaggcccagaccagctaccgcgacctgtggagcctgcgcgcctcgcttgagctgcatgcggccgcctcggaccacagcagcagcggcaacgaccgcgactcggtgcgcagcggcgacagctcgggctcaggctccgggggcgcggcgcccgccttcccgccgccctccccgcccgcgccgcggcccaaggacggcgaggcgcgccggctgctgcagatggacagtggctacgccagcatcgagggccgcggcgcaggcgacgacaccgagccacctgccgcgcccgcccggccccgcagcccgcgcgcctggccccgccgcccgcgccgcgactacagcatcgacgagaagacggacgcgctgttccacgagttcctgcgccacgacccgcacttcgacgacacgccggctgccgcgcgacaccgcgcccgcgcgcacccgcacgcccgcaaacagtggcagcgtggccggcagcacagcgaccccggcgcccgcgcggccccggccctggccggaaccccggcaccgcctgccggcgcggcccgacccgcgcgtgcgcccttgcggcgcggcgacagcgtggacggcccgcccgacggtcgcaccctgggcggcgccggcgacgaccccgccatccccgtcatcgaggaggagccgggcggcggggggtgccccggctcgggcctgtgcgtcctaccatccgggtcggtgctggacaagctggcggctggcctcgacgagagactctttccgccgcgcctcgccgagcccgtcgtggcgactcccgcgttggtcgccgccgcccccacgtcccccgaccacagcccggcctaagtcccgc

SEQ ID NO: 462650 - DNA, 901 bp, Homo sapiens
  misc_feature (22)..(22): n is a, c, g, or t
ccttggagtagcaaaccaactnggtggatgggggtgaaaacaagagagagagagagagagagagatgaggggcccgcacatgccctgctcatctcaaaacttctcgagaagcaaatctaacttgcaggaactttgagaaaggcaggagaagcaaaaaagcaaaatgagattgttttcataacttaaagaggctgaaaatgatgaaactgggctgagatgtgttacaggagcctacacagctagaaggatagattcgaggtcatgctttgagcaaaagccattaaaatacataaataacattgtatcacacttttgcctctcaagttgagactgcctctaaattgactagcgttacaaatatcctaacagaaaactatccctaaaacctagaaagccatattatgctttggcaatcatctgaccatgtacaacaaatgtaatgaaaacggtaaacctgaaccaaggcaaacccaacagtttaatttaaaaacttgaagatactaagtattcccttcaactggacattcagaaacttcacgtggctacattgtatttccccccacgagttgcttcagggttgtgaaattcactggactgtggagggagccttaaacctttgtgggtgattgacgtctaaagtacctgagcttttctggttctgctgaccctcagtctcctggaccctagaagaagaatcagacccatccttcagtctcatctctagaagcccagaataaaatgaaaaaggtatgaacgagaagagagaaatcactgttgacaacacattttacctagcagtccaacattgtttatcagcataataaaatgtgccaatactcaccagcactctaaagtatgcactaataataaatagagatatagggcataatatgaccaatga

SEQ ID NO: 462651 - DNA, 1315 bp, Homo sapiens
ctggaaaagtgaaggtgacctaagaaagatgagcttctcaccatggctgtgtgctctggggaaacctctctccgctctgcttgtggcccggctccctcgaaggctggaggagagaagctgccccctgcctttctctgaacatccagtgtcgccagcagtctttgctgctccttggctttcaggatgtaactccaatccctgcctccatctccacatggctgtctccttcctgtgtgtgtctgtacccaaatgttcctcttctactgaggacatgggctacattgtgttagagtccactcgaacgaccgaccgcatcttcgctttattacatctacaaagactctatttccaaataaggtcacatgcacaggtacaggggttaggacatcaacttctctcttggaagaacagaattcaactgatacaacactggaggggtgaaaacaagacagagagagagagagagagagagagagagatgaggggcccgcacatgccctgctcatctcaaaacttctcgagaagcaaatctaacttgcaggaactttgagaaaggcaggagaagcaaaaaagcaaaatgagattgttttcataacttaaagaggctgaaaatgatgaaactgggctgagatgtgttacaggagcctacacagctagaaggatagattcgaggtcatgctttgagcaaaagccattaaaatacataaataacattgtatcacacttttgcctctcaagttgagactgcctctaaattgactagcgttacaaatatcctaacagaaaactatccctaaaacctagaaagccatattatgctttggcaatcatctgaccatgtacaacaaatgtaatgaaaacggtaaacctgaaccaaggcaaacccaacagtttaatttaaaaacttgaagatactaagtattcccttcaactggacattcagaaacttcacgtggctacattgtatttccccccacgagttgcttcagggttgtgaaattcactggactgtggagggagccttaaacctttgtgggtgattgacgtctaaagtacctgagcttttctggttctgctgaccctcagtctcctggaccctagaagaagaatcagacccatccttcagtctcatctctagaagcccagaataaaatgaaaaaggtatgaacgagaagagagaaatcactgttgacaacacattttacctagcagtccaacattgtttatcagcataataaaatgtgccaatactcaccagcactctaaagtatgcactaataataaatagagatatagggcataatatgaccaatga

SEQ ID NO: 462652 - DNA, 1139 bp, Homo sapiens
gacatctacactaataactctcgtccagttctctgccatgtatatggatttatatactagacctttaaatgtgttatttcaaacttaacagtcaaaacggagctcctgatcttccctcccaagggaggaactgtctccagtctcaattcctaacagctgctcaggccaaagccttggaattatccttaattcctgtttctctcatatctcacatccagtctatcggcaaatcttcccagctgttccacaaatatgcggcatctgaccacttctcaacccccactgccaccaccctgcccaagccccatcttctctctcctgaattagcacaacagtctcattactgggcctattgctttcaccctttctgtaacactcgccactgcggcccacggcttcattcctggaagcccgtgagaccaggaacccttcgatcgagaaaagaccttccattgggagaagacttctcgtcttatttccacctataatctcttcaaaacatagcagtcagagttacctgctgaactcataagtcactcatctgctcaaagcctcccagtggcttctcatctcacagaatccaagtcgaccttcctggagcctctatccactacttgttttgctcaacaagaacacacatcgtgttgactccatcttttatatgatgcctcaccacaatgttccattggccagtgcaagagaaaccaggatgcttcctcatactgcacatctttatctgagaaccaaaggacaaatatgggtgtcacatgccagctccttctacctccttctgaaaccagaggactggattggaaccaacagagatcatgctgtttacttcacagatttcaagaaaagtgaattctgagtaatcatttttttttagatcttcctatgtgtaaaaatctttggtgagatttaccatctcatttaaagttctttcacaatttttgtgaaaattgagtgatgtgtaataaataagttattttttttctttatagctgatgcttgaccttttttcccttggtaatatagcttacgaagcagatatatatgccaatacacccttgattttaagtctttcaaatagaagaacatagggataaactgacacatgagagatggataaatgtacggac

SEQ ID NO: 462653 - DNA, 1224 bp, Homo sapiens
gtgcagtgcacattcttatctaccaacatatacagcagtccttctgggaaggaaatttgggcaggaaagggaactcacagtgtcggaatgcctggagcatttcttctagtctggtggacagaatatgaaagtatctgcctggcagtgcagtaaatgaaaagagaagataaatgaataaaaaaaaaagttataaataacagtaggaaagagagagtgcaggtggaacgagcctatcctgtggtgaaatgacaacacattctgcagttttaaaatctaagaggctcattgacttttcttcattcatttaaattgatctccaagaaaactatgtattttaaagattccataaactgaatatatgaatgagaattaagaagagaggggctgcttcctaatctgtttatataaggtatagtatagtataatctgtttatataaggttagtagagaggagacaccaggtgctggccataaacctaagaagacattgaatcccattcactccttaacattccttaatatacattcatgagctacataacattttaatcatcaatgatggaccatataccatatacgatatggtggccccataagattataatggacctgaaaaattcctattgctagtgatgtggtcattgtaaagctgtagcacaacacattacccacgtttgtggtgacagtcatataaaagtatggtacatataattatgtacagtgcatacataatacttgataatatgttactggtttgtgtctttgctatgctttttatcattattttagggtatactacttaaaatgttaactgtaaaacagcttctgacaggtccttcaggaagtactccagaagaaggcattgttatcatagaaggtgacagcttcatgtgtgttattgcccctgaagaccttccagtggtacaagatgtggaggaggaagacagtgatactgaggattctgaccctgtgtaggcttaggctaatgtgtgtgtttatatcttagtttttcacaaaaaggtttttccaatgttaaaaaaaatatataaaaaagcttatagaataaggatataaagaaatattttgtacagctgtacaataagctaagcattattaccaaagagtcaaaaagttttaagaaattaaagtttataaaccaaatgttcattgtgagccaaggttaatttattgaagaaataaaacatttttaatgaaaaaaatgta

SEQ ID NO: 462654 - DNA, 3429 bp, Homo sapiens
ggtttgcgggtcaaattggtcccaatggcttaggatgcatttcaagggtgaacctgttgatgcatgttcagatgtgtctggagtttcttccttcttgtgggttcatggtcttgctgacttccggagtgaagccacagaccttcgcagagtgaaactgcagacattcacagtgagtgttacagctcttaaaggtggcgcgtccagagttgtttgttcctcctggtgggttcgtggtctcactgactttaggagtgaagccacaggccttcgcagtgtgttacagctcttaaaggtggcccatctggagttgtttgttcctcccggtgggcgagtggtctcactgactaaaggaatgaagcctcagacctccgcagtgagtgttacagctcataagggtagtgtgggcccaaagaaaggaatggaaatcaagaatgtgattcatatgttaagtgtgaaatgtctgttaagacacctgtttttgtctgctagcgttgacataacaatataacacagactgggtagtataaacaacagaaatttatttttctcacagttaggaggctgaaagtccaggatgaagggttatatatgtttctgtagtttgtggagccaaacagatgatctggttacccacagtatcaaaatgtaacaagttttattttcttacacattccatggcaatagattctggtttcaggaactctggcataacggtgggaaagagaggaaaaactatgttggctgtccggagtacacatggcttagaagttccattaagccataagggaaaactgatggtgacagaggaatatattgacttcctgttaaatgtggcaaatcaaaaaatggaggaaaacaagaaaagaattgagaggctgtgtggaacatgagaaggataccagtcattgacatcacctaagatggtgacaagacctagaaagaaagatcaagtcaagcatagaagttttcatcaatgttttacaactgcctacagcatgctttggaaagggaaacgatgactaacttacatcccaagatcaaagagaaaaataactcatcatatattcataagaaaaaaagaaacccagaaaaaacacgtgcccagtgtattactaaagaaagtgatgaagaacttgaaaatgatgatgatgatgatctaggaatcaatgttaccatcttccctgaagattactaagctttggttctgatgtgtcttggccgtaatgtttctagtaggttttataaagctgctcttcataagagtattttagtttgttgagtgtatcagccattcataagccagtaatgacaagtgcagagcttcaaactataactttgttgcccagaggatgtgcagttgtcatctaagctctcagcagtacccggcttatcctacgacttcacctgaaatgctatagttatccctacttttttaccagtttctcccagaagcacctgcttaataaatcaaagatgtttgaatggtgtcttattctgaaataacctgacctaagacaggtatttagattattttggatacattttgaaaagggatagcataaatattttaagtaaaaagacctttattttaaataatagtggatattttaatgctggaaattagcattatagttgatatgccagaaattatatctttggttgtgatttaaacttatgctataaactaaattaatgatgtaaatacatagttttaaacattcttttagggacatgtaacttttaagtatcacttcaataatacgtattattataggaacaaagatttgggaataattgattacaggtgaggaagtactggaattccagttcaaggagataccatttcatttaggactaaaaggacaagatacaagttcacatgatgggaaaaatcagaaaacctctcgcagacaaagggtatataatggatatgaggcatcaaaaagcatggtatagtcagtgatggggaatagtccagaaaggctgaaacacagcatgtgatgcgagtcaaggtagttgatgcccaactgtgaagggccgttctaatctagcatggaggtagacagtgtttccttaatatggctgcatatcagaattacctaggtcaggacgaggcatggagatgctactttaataggccctgccgcagatcttccaaaccagaatcttaatcctggagtctaggaatctttatttttcacacaactcatccaagtggttctgataaaatcagtccagcacttttagaacccactgataacagacttattcctggagacagcatttgaggaggaattgaagatttttctaatgaaaagaaaaagggtcacatgaacagatgttgcagtgtacctgtgccagggatttcatgtgtacactttataggagaataagcaagagcttagttttcttgagttataatttgccaaccataaaattcattcatttaatgtatgatttaataaacttttgtagagttctagaattgcacaactatgatcacaacctaattctagatcatttctatcatactaaaaagaaatcttacacccatttacaatcactctccattctcacccccagccctatgcaaccatgattctattttctatttctatatgtttgcctttctgggatatttcatataaatggaataatatgatatgtgttcttttctgtcaggccctttcattgagatatttttaaagtttggaggttcctccacactgtagcatgtacagtcctatttttcctttttagtgatgaatagtattccattgtatgaatgcatcacattttatctattcatccagtgacagacatttggatgtgaattgtttgtgcttttgggatgtttgtattattactgttacagacattcctgtatagatctgtgtgtggacatatattttcatgggtagatacataggaacagaactgctgagtcataagataaacctgtttaactttttaaaaactgctagcctgttttgcagatgtttgcattattatacattcccaacacaatgtataaagttcctattttaccacaaccttatcaacacttgttattgtctgtcttattagttatagccattttagtgtgtgaaaatttgatctagtgattttgatttgtatttccctaatgactaatgatgacaacctttccatgtgcttataagccatttgtatatttctttggaagaatgtctattcaagtcctctgcccattttttagttttttaaaattattattaatgagttttaaggattctttatatattctggacataagtcccttattgaatatatgatttgcaaatattttatcacagtctgtgggttgactcttcactttcttgatggtgtctctaaagcacaaaagtttttaactttgagcaaatctcttttgaactcttaatggagaac

SEQ ID NO: 462655 - DNA, 650 bp, Homo sapiens
cggccaccgctcgcttcaatatggctgcccccagggagagacgaggctaccatgaaggagccgagcgcagaccctgagtccgtcacccatggatcgcagcgcggagttcaggaaatggaaggcgcaatgtttgagcaaagcggacctcagccggaagggcagtgttgacgaggatgtggtagagcttgtgcagtttctgaacatgcgagatcagtttttcaccaccagctcctgcgctggccgcatcctactccttgaccgggtgaggcccctttgcgcctgtccatcgcctgccttctagtgcgaaactttaggagccctgttcccatccagtgacgaccggatccagcatgtctgtgtttgctcctctgaggggtggtctctgtttctttatatgtgaaatttaggggattagatcagtgcttctaaaagtttaacgtggctattaatcagctgagcatcttttaaaatacagatcccgattctttaagtgtagggtagggcctgatactgtgcatttctaacaagtgcccaaatgatgttgaaactgctgacctgggaactatcttgtgtggcaaagtttagaaaatttgattttattatatgaatactaagggaatctaaagactttgtagcttgctaaggtattg

SEQ ID NO: 462656 - DNA, 3080 bp, Homo sapiens
tcggagagaaaaaccttacggctaggtacgaggctgggtgttgcgcagaccctgagtccgtcacccatggatcgcagcgcggagttcaggaaatggaaggcgcaatgtttgagcaaagcggacctcagccggaagggcagtgttgacgaggatgtggtagagcttgtgcagtttctgaacatgcgagatcagtttttcaccaccagctcctgcgctggccgcatcctactccttgaccggggtataaatggttttgaggttcagaaacaaaactgttgctggctactggttacacacaaactttgtgtaaaagatgatgtgattgtagctctgaagaaagcaaatggtgatgccactttgaaatttgaaccatttgttcttcatgtgcagtgtcgacaattgcaggatgcacagattctgcattccatggcaatagattctggtttcaggaactctggcataacggtgggaaagagaggaaaaactatgttggctgtccggagtacacatggcttagaagttccattaagccataagggaaaactgatggtgacagaggaatatattgacttcctgttaaatgtggcaaatcaaaaaatggaggaaaacaagaaaagaattgagaggttttacaactgcctacagcatgctttggaaagggaaacgatgactaacttacatcccaagatcaaagagaaaaataactcatcatatattcataagaaaaaaagaaacccagaaaaaacacgtgcccagtgtattactaaagaaagtgatgaagaacttgaaaatgatgatgatgatgatctaggaatcaatgttaccatcttccctgaagattactaagctttggttctgatgtgtcttggccgtaatgtttctagtaggttttataaagctgctcttcataagagtattttagtttgttgagtgtatcagccattcataagccagtaatgacaagtgcagagcttcaaactataactttgttgcccagaggatgtgcagttgtcatctaagctctcagcagtacccggcttatcctacgacttcacctgaaatgctatagttatccctacttttttaccagtttctcccagaagcacctgcttaataaatcaaagatgtttgaatggtgtcttattctgaaataacctgacctaagacaggtatttagattattttggatacattttgaaaagggatagcataaatattttaagtaaaaagacctttattttaaataatagtggatattttaatgctggaaattagcattatagttgatatgccagaaattatatctttggttgtgatttaaacttatgctataaactaaattaatgatgtaaatacatagttttaaacattcttttagggacatgtaacttttaagtatcacttcaataatacgtattattataggaacaaagatttgggaataattgattacaggtgaggaagtactggaattccagttcaaggagataccatttcatttaggactaaaaggacaagatacaagttcacatgatgggaaaaatcagaaaacctctcgcagacaaagggtatataatggatatgaggcatcaaaaagcatggtatagtcagtgatggggaatagtccagaaaggctgaaacacagcatgtgatgcgagtcaaggtagttgatgcccaactgtgaagggccgttctaatctagcatggaggtagacagtgtttccttaatatggctgcatatcagaattacctaggtcaggacgaggcatggagatgctactttaataggccctgccgcagatcttccaaaccagaatcttaatcctggagtctaggaatctttatttttcacacaactcatccaagtggttctgataaaatcagtccagcacttttagaacccactgataacagacttattcctggagacagcatttgaggaggaattgaagatttttctaatgaaaagaaaaagggtcacatgaacagatgttgcagtgtacctgtgccagggatttcatgtgtacactttataggagaataagcaagagcttagttttcttgagttataatttgccaaccataaaattcattcatttaatgtatgatttaataaacttttgtagagttctagaattgcacaactatgatcacaacctaattctagatcatttctatcatactaaaaagaaatcttacacccatttacaatcactctccattctcacccccagccctatgcaaccatgattctattttctatttctatatgtttgcctttctgggatatttcatataaatggaataatatgatatgtgttcttttctgtcaggccctttcattgagatatttttaaagtttggaggttcctccacactgtagcatgtacagtcctatttttcctttttagtgatgaatagtattccattgtatgaatgcatcacattttatctattcatccagtgacagacatttggatgtgaattgtttgtgcttttgggatgtttgtattattactgttacagacattcctgtatagatctgtgtgtggacatatattttcatgggtagatacataggaacagaactgctgagtcataagataaacctgtttaactttttaaaaactgctagcctgttttgcagatgtttgcattattatacattcccaacacaatgtataaagttcctattttaccacaaccttatcaacacttgttattgtctgtcttattagttatagccattttagtgtgtgaaaatttgatctagtgattttgatttgtatttccctaatgactaatgatgacaacctttccatgtgcttataagccatttgtatatttctttggaagaatgtctattcaagtcctctgcccattttttagttttttaaaattattattaatgagttttaaggattctttatatattctggacataagtcccttattgaatatatgatttgcaaatattttatcacagtctgtgggttgactcttcactttcttgatggtgtctctaaagcacaaaagtttttaactttgagcaaatctcttttgaactcttaatggagaac

SEQ ID NO: 462657 - DNA, 1203 bp, Homo sapiens
  misc_feature (1179)..(1179): n is a, c, g, or t
  misc_feature (1182)..(1182): n is a, c, g, or t
cggccaccgctcgcttcaatatggctgcccccagggagagacgaggctaccatgaaggagccgagcgcagaccctgagtccgtcacccatggatcgcagcgcggagttcaggaaatggaaggcgcaatgtttgagcaaagcggacctcagccggaagggcagtgttgacgaggatgtggtagagcttgtgcagtttctgaacatgcgagatcagtttttcaccaccagctcctgcgctggccgcatcctactccttgaccggggtataaatggttttgaggttcagaaacaaaactgttgctggctactggttacacacaaactttgtgtaaaagatgatgtgattgtagctctgaagaaagcaaatggtgatgccactttgaaatttgaaccatttgttcttcatgtgcagtgtcgacaattgcaggatgcacagattctgcattccatggcaatagattctggtttcaggaactctggcataacggtgggaaagagaggaaaaactatgttggctgtccggagtacacatggcttagaagttccattaagccataagggaaaactgatggtgacagaggaatatattgacttcctgttaaatgtggcaaatcaaaaaatggaggaaaacaagaaaagaattgagaggttttacaactgcctacagcatgctttggaaagggaaacgatgactaacttacatcccaagatcaaagagaaaaataactcatcatatattcataagaaaaaaagaaacccagaaaaaacacgtgcccagtgtattactaaagaaagtgatgaagaacttgaaaatgatgatgatgatgatctaggaatcaatgttaccatcttccctgaagattactaagctttggttctgatgtgtcttggccgtaatgtttctagtaggttttataaagctgctcttcataagagtattttagtttgttgagtgtatcagccattcataagccagtaatgacaagtgcagagcttcaaactataactttgttgcccagaggatgtgcagttgtcatctaagctctcagcagtacccggcttatcctacgacttcacctgaaatgctatagttatccctacttttttaccagtttctcccagaagcacctgcttaataagtaagtttcctggcaagattggccaatgttatttgacaantcntttgaaactcgtatcgcgtac

SEQ ID NO: 462658 - DNA, 1307 bp, Homo sapiens
cggccaccgctcgcttcaatatggctgcccccagggagagacgaggctaccatgaaggagccgagcgcagaccctgagtccgtcacccatggatcgcagcgcggagttcaggaaatggaaggcgcaatgtttgagcaaagcggacctcagccggaagggcagtgttgacgaggatgtggtagagcttgtgcagtttctgaacatgcgagatcagtttttcaccaccagctcctgcgctggccgcatcctactccttgaccggggtataaatggttttgaggttcagaaacaaaactgttgctggctactggttacacacaaactttgtgtaaaagatgatgtgattgtagctctgaagaaagcaaatggtgatgccactttgaaatttgaaccatttgttcttcatgtgcagtgtcgacaattgcaggatgcacagattctgcattccatggcaatagattctggtttcaggaactctggcataacggtgggaaagagaggaaaaactatgttggctgtccggagtacacatggcttagaagttccattaagccataagggaaaactgatggtgacagaggaatatattgacttcctgttaaatgtggcaaatcaaaaaatggaggaaaacaagaaaagaattgagaggttttacaactgcctacagcatgctttggaaagggaaacgatgactaacttacatcccaagatcaaagagaaaaataactcatcatatattcataagaaaaaaagaaacccagaaaaaacacgtgcccagtgtattactaaagaaagtgatgaagaacttgaaaatgatgatgatgatgatctaggaatcaatgttaccatcttccctgaagattactaagctttggttctgatgtgtcttggccgtaatgtttctacttctgacaggtccttcaggaagtactccagaagaaggcattgttatcatagaaggtgacagcttcatgtgtgttattgcccctgaagaccttccagtggtacaagatgtggaggaggaagacagtgatactgaggattctgaccctgtgtaggcttaggctaatgtgtgtgtttatatcttagtttttcacaaaaaggtttttccaatgttaaaaaaaatatataaaaaagcttatagaataaggatataaagaaatattttgtacagctgtacaataagctaagcattattaccaaagagtcaaaaagttttaagaaattaaagtttataaaccaaatgttcattgtgagccaaggttaatttattgaagaaataaaacatttttaatgaaaaaaatgta

SEQ ID NO: 462659 - DNA, 3215 bp, Homo sapiens
cggccaccgctcgcttcaatatggctgcccccagggagagacgaggctaccatgaaggagccgagcgcagaccctgagtccgtcacccatggatcgcagcgcggagttcaggaaatggaaggcgcaatgtttgagcaaagcggacctcagccggaagggcagtgttgacgaggatgtggtagagcttgtgcagtttctgaacatgcgagatcagtttttcaccaccagctcctgcgctggccgcatcctactccttgaccgggtgaggcccctttgcgcctgtccatcgcctgccttctagtgcgaaactttaggagccctgttcccatccagtgacgaccggatccagcatgtctgtgtttgctcctctgagggggtataaatggttttgaggttcagaaacaaaactgttgctggctactggttacacacaaactttgtgtaaaagatgatgtgattgtagctctgaagaaagcaaatggtgatgccactttgaaatttgaaccatttgttcttcatgtgcagtgtcgacaattgcaggatgcacagattctgcattccatggcaatagattctggtttcaggaactctggcataacggtgggaaagagaggaaaaactatgttggctgtccggagtacacatggcttagaagttccattaagccataagggaaaactgatggtgacagaggaatatattgacttcctgttaaatgtggcaaatcaaaaaatggaggaaaacaagaaaagaattgagaggttttacaactgcctacagcatgctttggaaagggaaacgatgactaacttacatcccaagatcaaagagaaaaataactcatcatatattcataagaaaaaaagaaacccagaaaaaacacgtgcccagtgtattactaaagaaagtgatgaagaacttgaaaatgatgatgatgatgatctaggaatcaatgttaccatcttccctgaagattactaagctttggttctgatgtgtcttggccgtaatgtttctagtaggttttataaagctgctcttcataagagtattttagtttgttgagtgtatcagccattcataagccagtaatgacaagtgcagagcttcaaactataactttgttgcccagaggatgtgcagttgtcatctaagctctcagcagtacccggcttatcctacgacttcacctgaaatgctatagttatccctacttttttaccagtttctcccagaagcacctgcttaataaatcaaagatgtttgaatggtgtcttattctgaaataacctgacctaagacaggtatttagattattttggatacattttgaaaagggatagcataaatattttaagtaaaaagacctttattttaaataatagtggatattttaatgctggaaattagcattatagttgatatgccagaaattatatctttggttgtgatttaaacttatgctataaactaaattaatgatgtaaatacatagttttaaacattcttttagggacatgtaacttttaagtatcacttcaataatacgtattattataggaacaaagatttgggaataattgattacaggtgaggaagtactggaattccagttcaaggagataccatttcatttaggactaaaaggacaagatacaagttcacatgatgggaaaaatcagaaaacctctcgcagacaaagggtatataatggatatgaggcatcaaaaagcatggtatagtcagtgatggggaatagtccagaaaggctgaaacacagcatgtgatgcgagtcaaggtagttgatgcccaactgtgaagggccgttctaatctagcatggaggtagacagtgtttccttaatatggctgcatatcagaattacctaggtcaggacgaggcatggagatgctactttaataggccctgccgcagatcttccaaaccagaatcttaatcctggagtctaggaatctttatttttcacacaactcatccaagtggttctgataaaatcagtccagcacttttagaacccactgataacagacttattcctggagacagcatttgaggaggaattgaagatttttctaatgaaaagaaaaagggtcacatgaacagatgttgcagtgtacctgtgccagggatttcatgtgtacactttataggagaataagcaagagcttagttttcttgagttataatttgccaaccataaaattcattcatttaatgtatgatttaataaacttttgtagagttctagaattgcacaactatgatcacaacctaattctagatcatttctatcatactaaaaagaaatcttacacccatttacaatcactctccattctcacccccagccctatgcaaccatgattctattttctatttctatatgtttgcctttctgggatatttcatataaatggaataatatgatatgtgttcttttctgtcaggccctttcattgagatatttttaaagtttggaggttcctccacactgtagcatgtacagtcctatttttcctttttagtgatgaatagtattccattgtatgaatgcatcacattttatctattcatccagtgacagacatttggatgtgaattgtttgtgcttttgggatgtttgtattattactgttacagacattcctgtatagatctgtgtgtggacatatattttcatgggtagatacataggaacagaactgctgagtcataagataaacctgtttaactttttaaaaactgctagcctgttttgcagatgtttgcattattatacattcccaacacaatgtataaagttcctattttaccacaaccttatcaacacttgttattgtctgtcttattagttatagccattttagtgtgtgaaaatttgatctagtgattttgatttgtatttccctaatgactaatgatgacaacctttccatgtgcttataagccatttgtatatttctttggaagaatgtctattcaagtcctctgcccattttttagttttttaaaattattattaatgagttttaaggattctttatatattctggacataagtcccttattgaatatatgatttgcaaatattttatcacagtctgtgggttgactcttcactttcttgatggtgtctctaaagcacaaaagtttttaactttgagcaaatctcttttgaactcttaatggagaac

SEQ ID NO: 462660 - DNA, 3193 bp, Homo sapiens
atttttttttcatttttaaatactgtgctagccaaatagctagagtacaactcaggtgctgctagtattatcccttatactaatccctttttttcttgcaaaatcatgaccatatttcagaagatgtttatcaagtagttttacctttcacataattttctacctcaagttatttgggctcattcttattctgggttaacattacccaaaaacataccgaattgtttttattaatacttaaaatcctgacttgggattattaatttaagaaagcctacaatatactatgcattatgcttattatttttgtaaaatattatatgaaacttaaattatgttattttttattttagggtataaatggttttgaggttcagaaacaaaactgttgctggctactggttacacacaaactttgtgtaaaagatgatgtgattgtagctctgaagaaagcaaatggtgatgccactttgaaatttgaaccatttgttcttcatgtgcagtgtcgacaattgcaggatgcacagattctgcattccatggcaatagattctggtttcaggaactctggcataacggtgggaaagagaggaaaaactatgttggctgtccggagtacacatggcttagaagttccattaagccataagggaaaactgatggtgacagaggaatatattgacttcctgttaaatgtggcaaatcaaaaaatggaggaaaacaagaaaagaattgagaggttttacaactgcctacagcatgctttggaaagggaaacgatgactaacttacatcccaagatcaaagagaaaaataactcatcatatattcataagaaaaaaagaaacccagaaaaaacacgtgcccagtgtattactaaagaaagtgatgaagaacttgaaaatgatgatgatgatgatctaggaatcaatgttaccatcttccctgaagattactaagctttggttctgatgtgtcttggccgtaatgtttctagtaggttttataaagctgctcttcataagagtattttagtttgttgagtgtatcagccattcataagccagtaatgacaagtgcagagcttcaaactataactttgttgcccagaggatgtgcagttgtcatctaagctctcagcagtacccggcttatcctacgacttcacctgaaatgctatagttatccctacttttttaccagtttctcccagaagcacctgcttaataaatcaaagatgtttgaatggtgtcttattctgaaataacctgacctaagacaggtatttagattattttggatacattttgaaaagggatagcataaatattttaagtaaaaagacctttattttaaataatagtggatattttaatgctggaaattagcattatagttgatatgccagaaattatatctttggttgtgatttaaacttatgctataaactaaattaatgatgtaaatacatagttttaaacattcttttagggacatgtaacttttaagtatcacttcaataatacgtattattataggaacaaagatttgggaataattgattacaggtgaggaagtactggaattccagttcaaggagataccatttcatttaggactaaaaggacaagatacaagttcacatgatgggaaaaatcagaaaacctctcgcagacaaagggtatataatggatatgaggcatcaaaaagcatggtatagtcagtgatggggaatagtccagaaaggctgaaacacagcatgtgatgcgagtcaaggtagttgatgcccaactgtgaagggccgttctaatctagcatggaggtagacagtgtttccttaatatggctgcatatcagaattacctaggtcaggacgaggcatggagatgctactttaataggccctgccgcagatcttccaaaccagaatcttaatcctggagtctaggaatctttatttttcacacaactcatccaagtggttctgataaaatcagtccagcacttttagaacccactgataacagacttattcctggagacagcatttgaggaggaattgaagatttttctaatgaaaagaaaaagggtcacatgaacagatgttgcagtgtacctgtgccagggatttcatgtgtacactttataggagaataagcaagagcttagttttcttgagttataatttgccaaccataaaattcattcatttaatgtatgatttaataaacttttgtagagttctagaattgcacaactatgatcacaacctaattctagatcatttctatcatactaaaaagaaatcttacacccatttacaatcactctccattctcacccccagccctatgcaaccatgattctattttctatttctatatgtttgcctttctgggatatttcatataaatggaataatatgatatgtgttcttttctgtcaggccctttcattgagatatttttaaagtttggaggttcctccacactgtagcatgtacagtcctatttttcctttttagtgatgaatagtattccattgtatgaatgcatcacattttatctattcatccagtgacagacatttggatgtgaattgtttgtgcttttgggatgtttgtattattactgttacagacattcctgtatagatctgtgtgtggacatatattttcatgggtagatacataggaacagaactgctgagtcataagataaacctgtttaactttttaaaaactgctagcctgttttgcagatgtttgcattattatacattcccaacacaatgtataaagttcctattttaccacaaccttatcaacacttgttattgtctgtcttattagttatagccattttagtgtgtgaaaatttgatctagtgattttgatttgtatttccctaatgactaatgatgacaacctttccatgtgcttataagccatttgtatatttctttggaagaatgtctattcaagtcctctgcccattttttagttttttaaaattattattaatgagttttaaggattctttatatattctggacataagtcccttattgaatatatgatttgcaaatattttatcacagtctgtgggttgactcttcactttcttgatggtgtctctaaagcacaaaagtttttaactttgagcaaatctcttttgaactcttaatggagaac

SEQ ID NO: 462661 - DNA, 895 bp, Homo sapiens
agcggccgctcgcgatctagaaccccactcgtccgcccacgcgtccggagaggggctgcttcctaatctgtttatataaggtatagtatagtataatctgtttatataaggttagtagagaggagacaccaggtgctggccataaacctaagaagacattgaatcccattcactccttaacattccttaatatacattcatgagctacataacattttaatcatcaatgatggaccatataccatatacgatatggtggccccataagattataatggacctgaaaaattcctattgctagtgatgtggtcattgtaaagctgtagcacaacacattacccacgtttgtggtgacagtcatataaaagtatggtacatataattatgtacagtgcatacataatacttgataatatgttactggtttgtgtctttgctatgctttttatcattattttagggtatactacttaaaatgttaactgtaaaacagcttctgacaggtccttcaggaagtactccagaagaaggcattgttatcatagaaggtgacagcttcatgtgtgttattgcccctgaagaccttccagtggtacaagatgtggaggaggaagacagtgatactgaggattctgaccctgtgtaggcttaggctaatgtgtgtgtttatatcttagtttttcacaaaaaggtttttccaatgttaaaaaaaatatataaaaaagcttatagaataaggatataaagaaatattttgtacagctgtacaataagctaagcattattaccaaagagtcaaaaagttttaagaaattaaagtttataaaccaaatgttcattgtgagccaaggttaatttattgaagaaataaaacatttttaatgaaaaaaatgta

SEQ ID NO: 462662 - DNA, 2780 bp, Homo sapiens
ttcttaaagatggtatgtccggagtttgttccttcagatgttcagatgtgtccggagtttcttccttccagtgggttcgtggtcttgctgacttcaggagtgaagctgcagaccttcgcacattccatggcaatagattctggtttcaggaactctggcataacggtgggaaagagaggaaaaactatgttggctgtccggagtacacatggcttagaagttccattaagccataagggaaaactgatggtgacagaggaatatattgacttcctgttaaatgtggcaaatcaaaaaatggaggaaaacaagaaaagaattgagaggttttacaactgcctacagcatgctttggaaagggaaacgatgactaacttacatcccaagatcaaagagaaaaataactcatcatatattcataagaaaaaaagaaacccagaaaaaacacgtgcccagtgtattactaaagaaagtgatgaagaacttgaaaatgatgatgatgatgatctaggaatcaatgttaccatcttccctgaagattactaagctttggttctgatgtgtcttggccgtaatgtttctagtaggttttataaagctgctcttcataagagtattttagtttgttgagtgtatcagccattcataagccagtaatgacaagtgcagagcttcaaactataactttgttgcccagaggatgtgcagttgtcatctaagctctcagcagtacccggcttatcctacgacttcacctgaaatgctatagttatccctacttttttaccagtttctcccagaagcacctgcttaataaatcaaagatgtttgaatggtgtcttattctgaaataacctgacctaagacaggtatttagattattttggatacattttgaaaagggatagcataaatattttaagtaaaaagacctttattttaaataatagtggatattttaatgctggaaattagcattatagttgatatgccagaaattatatctttggttgtgatttaaacttatgctataaactaaattaatgatgtaaatacatagttttaaacattcttttagggacatgtaacttttaagtatcacttcaataatacgtattattataggaacaaagatttgggaataattgattacaggtgaggaagtactggaattccagttcaaggagataccatttcatttaggactaaaaggacaagatacaagttcacatgatgggaaaaatcagaaaacctctcgcagacaaagggtatataatggatatgaggcatcaaaaagcatggtatagtcagtgatggggaatagtccagaaaggctgaaacacagcatgtgatgcgagtcaaggtagttgatgcccaactgtgaagggccgttctaatctagcatggaggtagacagtgtttccttaatatggctgcatatcagaattacctaggtcaggacgaggcatggagatgctactttaataggccctgccgcagatcttccaaaccagaatcttaatcctggagtctaggaatctttatttttcacacaactcatccaagtggttctgataaaatcagtccagcacttttagaacccactgataacagacttattcctggagacagcatttgaggaggaattgaagatttttctaatgaaaagaaaaagggtcacatgaacagatgttgcagtgtacctgtgccagggatttcatgtgtacactttataggagaataagcaagagcttagttttcttgagttataatttgccaaccataaaattcattcatttaatgtatgatttaataaacttttgtagagttctagaattgcacaactatgatcacaacctaattctagatcatttctatcatactaaaaagaaatcttacacccatttacaatcactctccattctcacccccagccctatgcaaccatgattctattttctatttctatatgtttgcctttctgggatatttcatataaatggaataatatgatatgtgttcttttctgtcaggccctttcattgagatatttttaaagtttggaggttcctccacactgtagcatgtacagtcctatttttcctttttagtgatgaatagtattccattgtatgaatgcatcacattttatctattcatccagtgacagacatttggatgtgaattgtttgtgcttttgggatgtttgtattattactgttacagacattcctgtatagatctgtgtgtggacatatattttcatgggtagatacataggaacagaactgctgagtcataagataaacctgtttaactttttaaaaactgctagcctgttttgcagatgtttgcattattatacattcccaacacaatgtataaagttcctattttaccacaaccttatcaacacttgttattgtctgtcttattagttatagccattttagtgtgtgaaaatttgatctagtgattttgatttgtatttccctaatgactaatgatgacaacctttccatgtgcttataagccatttgtatatttctttggaagaatgtctattcaagtcctctgcccattttttagttttttaaaattattattaatgagttttaaggattctttatatattctggacataagtcccttattgaatatatgatttgcaaatattttatcacagtctgtgggttgactcttcactttcttgatggtgtctctaaagcacaaaagtttttaactttgagcaaatctcttttgaactcttaatggagaac

SEQ ID NO: 462663 - DNA, 1701 bp, Homo sapiens
tcttctcttttcatttactgcactgccaggcagatactttcatattctgtccaccagactagaagaaatgctccaggcattccgatactggaattccagttcaaggagataccatttcatttaggactaaaaggacaagatacaagttcacatgatgggaaaaatcagaaaacctctcgcagacaaagggtatataatggatatgaggcatcaaaaagcatggtatagtcagtgatggggaatagtccagaaaggctgaaacacagcatgtgatgcgagtcaaggtagttgatgcccaactgtgaagggccgttctaatctagcatggaggtagacagtgtttccttaatatggctgcatatcagaattacctaggtcaggacgaggcatggagatgctactttaataggccctgccgcagatcttccaaaccagaatcttaatcctggagtctaggaatctttatttttcacacaactcatccaagtggttctgataaaatcagtccagcacttttagaacccactgataacagacttattcctggagacagcatttgaggaggaattgaagatttttctaatgaaaagaaaaagggtcacatgaacagatgttgcagtgtacctgtgccagggatttcatgtgtacactttataggagaataagcaagagcttagttttcttgagttataatttgccaaccataaaattcattcatttaatgtatgatttaataaacttttgtagagttctagaattgcacaactatgatcacaacctaattctagatcatttctatcatactaaaaagaaatcttacacccatttacaatcactctccattctcacccccagccctatgcaaccatgattctattttctatttctatatgtttgcctttctgggatatttcatataaatggaataatatgatatgtgttcttttctgtcaggccctttcattgagatatttttaaagtttggaggttcctccacactgtagcatgtacagtcctatttttcctttttagtgatgaatagtattccattgtatgaatgcatcacattttatctattcatccagtgacagacatttggatgtgaattgtttgtgcttttgggatgtttgtattattactgttacagacattcctgtatagatctgtgtgtggacatatattttcatgggtagatacataggaacagaactgctgagtcataagataaacctgtttaactttttaaaaactgctagcctgttttgcagatgtttgcattattatacattcccaacacaatgtataaagttcctattttaccacaaccttatcaacacttgttattgtctgtcttattagttatagccattttagtgtgtgaaaatttgatctagtgattttgatttgtatttccctaatgactaatgatgacaacctttccatgtgcttataagccatttgtatatttctttggaagaatgtctattcaagtcctctgcccattttttagttttttaaaattattattaatgagttttaaggattctttatatattctggacataagtcccttattgaatatatgatttgcaaatattttatcacagtctgtgggttgactcttcactttcttgatggtgtctctaaagcacaaaagtttttaactttgagcaaatctcttttgaactcttaatggagaac

SEQ ID NO: 462664 - DNA, 3102 bp, Homo sapiens
cggccaccgctcgcttcaatatggctgcccccagggagagacgaggctaccatgaaggagccgagcgcagaccctgagtccgtcacccatggatcgcagcgcggagttcaggaaatggaaggcgcaatgtttgagcaaagcggacctcagccggaagggcagtgttgacgaggatgtggtagagcttgtgcagtttctgaacatgcgagatcagtttttcaccaccagctcctgcgctggccgcatcctactccttgaccggggtataaatggttttgaggttcagaaacaaaactgttgctggctactggttacacacaaactttgtgtaaaagatgatgtgattgtagctctgaagaaagcaaatggtgatgccactttgaaatttgaaccatttgttcttcatgtgcagtgtcgacaattgcaggatgcacagattctgcattccatggcaatagattctggtttcaggaactctggcataacggtgggaaagagaggaaaaactatgttggctgtccggagtacacatggcttagaagttccattaagccataagggaaaactgatggtgacagaggaatatattgacttcctgttaaatgtggcaaatcaaaaaatggaggaaaacaagaaaagaattgagaggttttacaactgcctacagcatgctttggaaagggaaacgatgactaacttacatcccaagatcaaagagaaaaataactcatcatatattcataagaaaaaaagaaacccagaaaaaacacgtgcccagtgtattactaaagaaagtgatgaagaacttgaaaatgatgatgatgatgatctaggaatcaatgttaccatcttccctgaagattactaagctttggttctgatgtgtcttggccgtaatgtttctagtaggttttataaagctgctcttcataagagtattttagtttgttgagtgtatcagccattcataagccagtaatgacaagtgcagagcttcaaactataactttgttgcccagaggatgtgcagttgtcatctaagctctcagcagtacccggcttatcctacgacttcacctgaaatgctatagttatccctacttttttaccagtttctcccagaagcacctgcttaataaatcaaagatgtttgaatggtgtcttattctgaaataacctgacctaagacaggtatttagattattttggatacattttgaaaagggatagcataaatattttaagtaaaaagacctttattttaaataatagtggatattttaatgctggaaattagcattatagttgatatgccagaaattatatctttggttgtgatttaaacttatgctataaactaaattaatgatgtaaatacatagttttaaacattcttttagggacatgtaacttttaagtatcacttcaataatacgtattattataggaacaaagatttgggaataattgattacaggtgaggaagtactggaattccagttcaaggagataccatttcatttaggactaaaaggacaagatacaagttcacatgatgggaaaaatcagaaaacctctcgcagacaaagggtatataatggatatgaggcatcaaaaagcatggtatagtcagtgatggggaatagtccagaaaggctgaaacacagcatgtgatgcgagtcaaggtagttgatgcccaactgtgaagggccgttctaatctagcatggaggtagacagtgtttccttaatatggctgcatatcagaattacctaggtcaggacgaggcatggagatgctactttaataggccctgccgcagatcttccaaaccagaatcttaatcctggagtctaggaatctttatttttcacacaactcatccaagtggttctgataaaatcagtccagcacttttagaacccactgataacagacttattcctggagacagcatttgaggaggaattgaagatttttctaatgaaaagaaaaagggtcacatgaacagatgttgcagtgtacctgtgccagggatttcatgtgtacactttataggagaataagcaagagcttagttttcttgagttataatttgccaaccataaaattcattcatttaatgtatgatttaataaacttttgtagagttctagaattgcacaactatgatcacaacctaattctagatcatttctatcatactaaaaagaaatcttacacccatttacaatcactctccattctcacccccagccctatgcaaccatgattctattttctatttctatatgtttgcctttctgggatatttcatataaatggaataatatgatatgtgttcttttctgtcaggccctttcattgagatatttttaaagtttggaggttcctccacactgtagcatgtacagtcctatttttcctttttagtgatgaatagtattccattgtatgaatgcatcacattttatctattcatccagtgacagacatttggatgtgaattgtttgtgcttttgggatgtttgtattattactgttacagacattcctgtatagatctgtgtgtggacatatattttcatgggtagatacataggaacagaactgctgagtcataagataaacctgtttaactttttaaaaactgctagcctgttttgcagatgtttgcattattatacattcccaacacaatgtataaagttcctattttaccacaaccttatcaacacttgttattgtctgtcttattagttatagccattttagtgtgtgaaaatttgatctagtgattttgatttgtatttccctaatgactaatgatgacaacctttccatgtgcttataagccatttgtatatttctttggaagaatgtctattcaagtcctctgcccattttttagttttttaaaattattattaatgagttttaaggattctttatatattctggacataagtcccttattgaatatatgatttgcaaatattttatcacagtctgtgggttgactcttcactttcttgatggtgtctctaaagcacaaaagtttttaactttgagcaaatctcttttgaactcttaatggagaac

SEQ ID NO: 462665 - DNA, 1194 bp, Homo sapiens
cggccaccgctcgcttcaatatggctgcccccagggagagacgaggctaccatgaaggagccgagcgcagaccctgagtccgtcacccatggatcgcagcgcggagttcaggaaatggaaggcgcaatgtttgagcaaagcggacctcagccggaagggcagtgttgacgaggatgtggtagagcttgtgcagtttctgaacatgcgagatcagtttttcaccaccagctcctgcgctggccgcatcctactccttgaccggggtataaatggttttgaggttcagaaacaaaactgttgctggctactggttacacacaaactttgtgtaaaagatgatgtgattgtagctctgaagaaagcaaatggtgatgccactttgaaatttgaaccatttgttcttcatgtgcagtgtcgacaattgcaggatgcacagattctgcattccatggcaatagattctggtttcaggaactctggcataacggtgggaaagagaggaaaaactatgttggctgtccggagtacacatggcttagaagttccattaagccataagggaaaactgatggtgacagaggaatatattgacttcctgttaaatgtggcaaatcaaaaaatggaggaaaacaagaaaagaattgagaggttttacaactgcctacagcatgctttggaaagggaaacgatgactaacttacatcccaagatcaaagagaaaaataactcatcatatattcataagaaaaaaagaaacccagaaaaaacacgtgcccagtgtattactaaagaaagtgatgaagaacttgaaaatgatgatgatgatgatctaggaatcaatgttaccatcttccctgaagattactaagctttggttctgatgtgtcttggccgtaatgtttctagtaggttttataaagctgctcttcataagagtattttagtttgttgagtgtatcagccattcataagccagtaatgacaagtgcagagcttcaaactataactttgttgcccagaggatgtgcagttgtcatctaagctctcagcagtacccggcttatcctacgacttcacctgaaatgctatagttatccctacttttttaccagtttctcccagaagcacctgcttaataatgcctgatgcgaccaacccgcgtgtttcctgcgtgcccatgacccgcgtctccaa

SEQ ID NO: 462666 - DNA, 1192 bp, Homo sapiens
cggccaccgctcgcttcaatatggctgcccccagggagagacgaggctaccatgaaggagccgagcgcagaccctgagtccgtcacccatggatcgcagcgcggagttcaggaaatggaaggcgcaatgtttgagcaaagcggacctcagccggaagggcagtgttgacgaggatgtggtagagcttgtgcagtttctgaacatgcgagatcagtttttcaccaccagctcctgcgctggccgcatcctactccttgaccggggtataaatggttttgaggttcagaaacaaaactgttgctggctactggttacacacaaactttgtgtaaaagatgatgtgattgtagctctgaagaaagcaaatggtgatgccactttgaaatttgaaccatttgttcttcatgtgcagtgtcgacaattgcaggatgcacagattctgcattccatggcaatagattctggtttcaggaactctggcataacggtgggaaagagaggaaaaactatgttggctgtccggagtacacatggcttagaagttccattaagccataagggaaaactgatggtgacagaggaatatattgacttcctgttaaatgtggcaaatcaaaaaatggaggaaaacaagaaaagaattgagaggttttacaactgcctacagcatgctttggaaagggaaacgatgactaacttacatcccaagatcaaagagaaaaataactcatcatatattcataagaaaaaaagaaacccagaaaaaacacgtgcccagtgtattactaaagaaagtgatgaagaacttgaaaatgatgatgatgatgatctaggaatcaatgttaccatcttccctgaagattactaagctttggttctgatgtgtcttggccgtaatgtttctagtaggttttataaagctgctcttcataagagtattttagtttgttgagtgtatcagccattcataagccagtaatgacaagtgcagagcttcaaactataactttgttgcccagaggatgtgcagttgtcatctaagctctcagcagtacccggcttatcctacgacttcacctgaaatgctatagttatccctacttttttaccagataacgccgagaccgtatatactgcttgtttttttgttggtcttttctttttttttttcttttttttgtccttctttctt

SEQ ID NO: 462667 - DNA, 2697 bp, Homo sapiens
gccttgctggaacgactctcttaatttccaccgctaccattccatggcaatagattctggtttcaggaactctggcataacggtgggaaagagaggaaaaactatgttggctgtccggagtacacatggcttagaagttccattaagccataagggaaaactgatggtgacagaggaatatattgacttcctgttaaatgtggcaaatcaaaaaatggaggaaaacaagaaaagaattgagaggttttacaactgcctacagcatgctttggaaagggaaacgatgactaacttacatcccaagatcaaagagaaaaataactcatcatatattcataagaaaaaaagaaacccagaaaaaacacgtgcccagtgtattactaaagaaagtgatgaagaacttgaaaatgatgatgatgatgatctaggaatcaatgttaccatcttccctgaagattactaagctttggttctgatgtgtcttggccgtaatgtttctagtaggttttataaagctgctcttcataagagtattttagtttgttgagtgtatcagccattcataagccagtaatgacaagtgcagagcttcaaactataactttgttgcccagaggatgtgcagttgtcatctaagctctcagcagtacccggcttatcctacgacttcacctgaaatgctatagttatccctacttttttaccagtttctcccagaagcacctgcttaataaatcaaagatgtttgaatggtgtcttattctgaaataacctgacctaagacaggtatttagattattttggatacattttgaaaagggatagcataaatattttaagtaaaaagacctttattttaaataatagtggatattttaatgctggaaattagcattatagttgatatgccagaaattatatctttggttgtgatttaaacttatgctataaactaaattaatgatgtaaatacatagttttaaacattcttttagggacatgtaacttttaagtatcacttcaataatacgtattattataggaacaaagatttgggaataattgattacaggtgaggaagtactggaattccagttcaaggagataccatttcatttaggactaaaaggacaagatacaagttcacatgatgggaaaaatcagaaaacctctcgcagacaaagggtatataatggatatgaggcatcaaaaagcatggtatagtcagtgatggggaatagtccagaaaggctgaaacacagcatgtgatgcgagtcaaggtagttgatgcccaactgtgaagggccgttctaatctagcatggaggtagacagtgtttccttaatatggctgcatatcagaattacctaggtcaggacgaggcatggagatgctactttaataggccctgccgcagatcttccaaaccagaatcttaatcctggagtctaggaatctttatttttcacacaactcatccaagtggttctgataaaatcagtccagcacttttagaacccactgataacagacttattcctggagacagcatttgaggaggaattgaagatttttctaatgaaaagaaaaagggtcacatgaacagatgttgcagtgtacctgtgccagggatttcatgtgtacactttataggagaataagcaagagcttagttttcttgagttataatttgccaaccataaaattcattcatttaatgtatgatttaataaacttttgtagagttctagaattgcacaactatgatcacaacctaattctagatcatttctatcatactaaaaagaaatcttacacccatttacaatcactctccattctcacccccagccctatgcaaccatgattctattttctatttctatatgtttgcctttctgggatatttcatataaatggaataatatgatatgtgttcttttctgtcaggccctttcattgagatatttttaaagtttggaggttcctccacactgtagcatgtacagtcctatttttcctttttagtgatgaatagtattccattgtatgaatgcatcacattttatctattcatccagtgacagacatttggatgtgaattgtttgtgcttttgggatgtttgtattattactgttacagacattcctgtatagatctgtgtgtggacatatattttcatgggtagatacataggaacagaactgctgagtcataagataaacctgtttaactttttaaaaactgctagcctgttttgcagatgtttgcattattatacattcccaacacaatgtataaagttcctattttaccacaaccttatcaacacttgttattgtctgtcttattagttatagccattttagtgtgtgaaaatttgatctagtgattttgatttgtatttccctaatgactaatgatgacaacctttccatgtgcttataagccatttgtatatttctttggaagaatgtctattcaagtcctctgcccattttttagttttttaaaattattattaatgagttttaaggattctttatatattctggacataagtcccttattgaatatatgatttgcaaatattttatcacagtctgtgggttgactcttcactttcttgatggtgtctctaaagcacaaaagtttttaactttgagcaaatctcttttgaactcttaatggagaac

SEQ ID NO: 462668 - DNA, 3273 bp, Homo sapiens
ggtttgcgggtcaaattggtcccaatggcttaggatgcatttcaagggtgaacctgttgatgcatgttcagatgtgtctggagtttcttccttcttgtgggttcatggtcttgctgacttccggagtgaagccacagaccttcgcagagtgaaactgcagacattcacagtgagtgttacagctcttaaaggtggcgcgtccagagttgtttgttcctcctggtgggttcgtggtctcactgactttaggagtgaagccacaggccttcgcagtgtgttacagctcttaaaggtggcccatctggagttgtttgttcctcccggtgggcgagtggtctcactgactaaaggaatgaagcctcagacctccgcagtgagtgttacagctcataagggtagtgtgggcccaaagaaaggaatggaaatcaagaatgtgattcatatgttaagtgtgaaatgtctgttaagacacctgtttttgtctgctagcgttgacataacaatataacacagactgggtagtataaacaacagaaatttatttttctcacagttaggaggctgaaagtccaggatgaagggttatatatgtttctgtagtttgtggagccaaacagatgatctggttacccacagtatcaaaatgtaacaagttttattttcttacacattccatggcaatagattctggtttcaggaactctggcataacggtgggaaagagaggaaaaactatgttggctgtccggagtacacatggcttagaagttccattaagccataagggaaaactgatggtgacagaggaatatattgacttcctgttaaatgtggcaaatcaaaaaatggaggaaaacaagaaaagaattgagaggttttacaactgcctacagcatgctttggaaagggaaacgatgactaacttacatcccaagatcaaagagaaaaataactcatcatatattcataagaaaaaaagaaacccagaaaaaacacgtgcccagtgtattactaaagaaagtgatgaagaaattactaagctttggttctgatgtgtcttggccgtaatgtttctagtaggttttataaagctgctcttcataagagtattttagtttgttgagtgtatcagccattcataagccagtaatgacaagtgcagagcttcaaactataactttgttgcccagaggatgtgcagttgtcatctaagctctcagcagtacccggcttatcctacgacttcacctgaaatgctatagttatccctacttttttaccagtttctcccagaagcacctgcttaataaatcaaagatgtttgaatggtgtcttattctgaaataacctgacctaagacaggtatttagattattttggatacattttgaaaagggatagcataaatattttaagtaaaaagacctttattttaaataatagtggatattttaatgctggaaattagcattatagttgatatgccagaaattatatctttggttgtgatttaaacttatgctataaactaaattaatgatgtaaatacatagttttaaacattcttttagggacatgtaacttttaagtatcacttcaataatacgtattattataggaacaaagatttgggaataattgattacaggtgaggaagtactggaattccagttcaaggagataccatttcatttaggactaaaaggacaagatacaagttcacatgatgggaaaaatcagaaaacctctcgcagacaaagggtatataatggatatgaggcatcaaaaagcatggtatagtcagtgatggggaatagtccagaaaggctgaaacacagcatgtgatgcgagtcaaggtagttgatgcccaactgtgaagggccgttctaatctagcatggaggtagacagtgtttccttaatatggctgcatatcagaattacctaggtcaggacgaggcatggagatgctactttaataggccctgccgcagatcttccaaaccagaatcttaatcctggagtctaggaatctttatttttcacacaactcatccaagtggttctgataaaatcagtccagcacttttagaacccactgataacagacttattcctggagacagcatttgaggaggaattgaagatttttctaatgaaaagaaaaagggtcacatgaacagatgttgcagtgtacctgtgccagggatttcatgtgtacactttataggagaataagcaagagcttagttttcttgagttataatttgccaaccataaaattcattcatttaatgtatgatttaataaacttttgtagagttctagaattgcacaactatgatcacaacctaattctagatcatttctatcatactaaaaagaaatcttacacccatttacaatcactctccattctcacccccagccctatgcaaccatgattctattttctatttctatatgtttgcctttctgggatatttcatataaatggaataatatgatatgtgttcttttctgtcaggccctttcattgagatatttttaaagtttggaggttcctccacactgtagcatgtacagtcctatttttcctttttagtgatgaatagtattccattgtatgaatgcatcacattttatctattcatccagtgacagacatttggatgtgaattgtttgtgcttttgggatgtttgtattattactgttacagacattcctgtatagatctgtgtgtggacatatattttcatgggtagatacataggaacagaactgctgagtcataagataaacctgtttaactttttaaaaactgctagcctgttttgcagatgtttgcattattatacattcccaacacaatgtataaagttcctattttaccacaaccttatcaacacttgttattgtctgtcttattagttatagccattttagtgtgtgaaaatttgatctagtgattttgatttgtatttccctaatgactaatgatgacaacctttccatgtgcttataagccatttgtatatttctttggaagaatgtctattcaagtcctctgcccattttttagttttttaaaattattattaatgagttttaaggattctttatatattctggacataagtcccttattgaatatatgatttgcaaatattttatcacagtctgtgggttgactcttcactttcttgatggtgtctctaaagcacaaaagtttttaactttgagcaaatctcttttgaactcttaatggagaac

SEQ ID NO: 462669 - DNA, 339 bp, Homo sapiens
tcgggagccttcagggatgcgctgccagctgcgcccgggcgtttctccggacctgttgtgccagatcggaaagcgggttggctgtgcgcgggaccaagggggtggccttcggggagaacccccgagccgcaggcacctgctcccagtcccccttcttcccggtggctccacctcccggtgtaaggctttgggttctgtgccctgacaggttcacaggcgcctttcttctgagaacgaccctggccttgaacgtcagagccggggacgaaggcccccggaggctgctgcgagctccgcgcgttccttcgcgcccttccgcgccgctcgcgccggcgccgg

SEQ ID NO: 462670 - DNA, 2711 bp, Homo sapiens
caacttcgcggacagcggagctcgcccagcatggatgttccaggttcacaggcgcctttcttctgagaacgaccctggccttgaacgtcagagccggggacgaaggcccccggaggctgctgcgagctccgcgcgttccttcgcgcccttccgcgccgctcgcgccggcgccggcctccacccccgcgcgccgcctcccaccagtcccgatgcaggcgcccggccgggggccactcgggctgcggctgatgatgcccgggcgccggggggcgctgcgcgagccgggcggctgcggatcctgcctgggggtggcgctggccctgctgttgctgctactgcccgcctgctgccccgtgcgggcgcagaacgacacggagcccatcgtgctggagggcaagtgcctggtggtgtgcgactccagcccgtcggcggacggcgccgtcacctcctccctaggcatctccgtgcgctccggcagcgccaaggtggccttctccgccacgcggagcaccaaccacgagccgtccgagatgagcaaccgcaccatgaccatctatttcgaccaggtcagccgtcggcctgcccaccccgcccccagcccggggagaggggcggggacctgcgcgcgcgggctggggttcaggcttcttggacgtggagttcccaggctctgtcctccccctctgccctgctagtctctttcctcccgtttcatagaacgcactcctactctttcccttttccacattttggctttttaaaaacttttaaatgatcagctaacttggcacttggatgactgagagtcccttaaggctgtctaagctttctaagagttccaatgctgaggatgctgaatttgtgttcccagccgctgatgaaggaggcagtgttgctggttatccaaggatgatgaaaacatacaccgaggaggggcttgccattgtgtgctgtgttccctcttctttttcagcaccgagaaaagggatttatagcttcagcttccacgtggtcaaagtgtataacagacaaaccatccaggtcagtttaatgcagaatggctacccagtgatctcggcctttgcaggagaccaggatgtcaccagagaagctgctagcaatggcgtgctgctgctcatggaaagggaagacaaagtgcatctcaaacttgagagaggcaacctcatggggggctggaaatactccacattctcgggcttcttggtgtttcctctataaacacagagccccctagatggtgggggaatggcaaactggacccaggactccgccctttaaaacaccctgaacttactggaattggacaccttgtttccaacctccgtcagactgttgcagtagaagaatgatttcctttgaaacctccagtacttttgtttttgttttttggaatactgacaattcctcgggaacctggcctctaattagttttagatgacaaggtcttaaggagaaatgaaattatcgatttgagcaatttgtacctgtgattgtaaagtcaatatcggattttattgttgggaccatggacctcttttgtttgtatgttgtattgtcgtcccaacggaaggagagctcctgactccaggatgggctgcaggttgcagtcagggcttgaagtaggagcccagcaaagaaccacctgctggacagtccttgacatgtgttctgtgtgtgtctgtatagccttaagaaaaagaatggcttcactttcattctgtattcttccccccaccatgtggctgggaggacttgggagggggatggggacattggggaacctgtcaagaagtgctttatccagagaagcaaattttgcacgattgggactgcaatttttgttttgtattgtttgtgttttttcttgaaaagctttacttttctttccacactcagctctccctcctcaaccccacttttatttttcttgctggggttgaggagagaaaatatagaattcctggataagaccaaacaaaacaaaacattaaaatacctgtatgttttgttttagacgagaccaaactaaacaaaaagtatctgtttatcaaagtaaaagtaacacaatggacaattctgcttattctctcaaagagattctaagatgcacctttagaactattaatagcaacctgcatttttttttaatttatacttcagaatcctttaagaacctggtgttcctgagtggtcctgaatcatataagttggtaatggaagctgtaatgaccaagtcccctaaacatactatgtctttgccacgtgtgctgtgacttctctgtgggtgatttaatttatttggatccacctctgatcttagcaagaggcaaccaatataaataatgataattttccatgaaaaacacaacaataaagatggggttttagattgtcatatttggtgttttcccatgtctgcatgcatgagtttgtgtgtttgttcctactatttttttccctccttgtgttttacttctggacaatatttattaaaatatttttaaatccctggttcttattttgactatgttgaattaactgatgagtctatgaaaggcatttttcatctgtttctatttttcattttaatatttttatttgaggctttattataagttttctgtgatgaaattacccctatgatctattacagatatatccatagactccaaccagacactgaatctgcc

SEQ ID NO: 462671 - DNA, 1324 bp, Homo sapiens
cgtcccttctctgcagatcagacgggcaggtcagacagctggcgtctgcagaatctcagggagtcgcacgcacctccccttggcggcccacagatggcgctggctccacgcgctgcagcggcgggaagccggaggtgggaaaacccaagctttagccccctcccctgtctggctgctgggatggggaaactgaggctcaggaaggcgatgcggctcacccaggttcatagagccagaaaatggcaaggctgggatcggagacaccaggcctgctgctgttgcccaacctcaaaaaacgaaaacgggaagtttttgtcaacaggagcgtgggaaccggaaatccttgcttccgataccggaagtcagagaccacacatttgcagggagcgaaattgaggtcccagtgcgggggcctgcagaaatccaggaataggactcagggatctagggctgggatgttggtggttctgagcgcccaggaaataggagagacaggatcatctggtttagctgctcattataattatcctgtgaaagaagatgtacaaatactactgtataaagaagtacaaggcttgtacattgaaaattatgaaacattgttggaagaagttaaagatctaaagaaatggaaagacatcccatgttcatgaattgggaggcttagtattcataagatagaagtactccccaacatgatgaatttaacatagtccctaccacaagcccagttaacttttttgcgtaaattgacaggatgaccctaaaatttatgtggaatggtagaggattcacaatagtcaaagaatcttggaaaagaagaaccaacttgaagactcacatttcctgattttaaaacttactacaaagctacagtaatcaagacagtgtggtatgggcataaggattagacatatagcccgatgaaatagaatcaagagtacagaaataaactcttacatttatggtctatagattttcaacaaggatgtgaagacaattcactggggagaaagaatggtctatttaagaaatgtttctgggacaactgtatttcagcatgcaaaagaatgaagttaagcttctgcttggggcctggaagggtgatgtggctgtggcatcgccggcctcgctatgtctgccattttcaatattcagagtctattgactgtaatcttgctgcttatatgtacctgtgcttatattcgatccttggcacccagcctcctggacagaaataaaactggattgttgggtatattttggaagtgtgccagaattggtgaacggaagagtccttatgttgaagtatgctgtatagtaa

SEQ ID NO: 462672 - DNA, 1192 bp, Homo sapiens
ccttaccacattgtttacactcataaggtttctctccagtgtgagtcctttcatgtattcgaatggaactggaacaactaaacgccttaccacactgtttacattcatagggtttctccccagtgtgagtcctttcatgcattcgaaaggaactggaacaactgaaggctttaccacattgtttacattcatagggtttctctccagtgtgagtcctttcatgcatccgaaaggaactagaaaaactaaaggctttaccacactgtttacattcatagggtttctctccagtgtgaattctttcatgcattcgaaaggaactggaacaactgaaggctttaccacactgtttacattcatagggtttctctccagtgtgagtcctttcatgtattcgaacagaactggaacaactgaaggctttaccacattgtttacattcatggggtttctctccagtgtgagttctttcatgcattcgaaaggaactggaacaactgaaggctttaccacactgtttacattcatagggtttctctccagtgtgagttcgttcatggatttgaaaagaactaggacaatcaaaggctttcccacattccttgcatttataaggtccatttccagtgtgcattatcatatgtcttcgatagcttggaagagaaatgaatgctttcccacattccttacaatcatagggtttctctcctgtatgaattctttcatgttttctaaaggaactaggaaaactgaaggctttcccacattttttacatttatagggtttttctccagtgtgaatcctttcatgacttcgaaaggatgtgggacaactaagagctttaccacattgcttacactgatagggtttttccccagtgtgagtcctttcatgtatttgaaaagtttggtaatatctgaaagcttttccacattgtttacattcatagggtttctctccagagtgagttctttcatgatttcgaaaagaactgggatgactgaacgttttcccgcattctttacatttatagggtttctctccagtatgagttctttcatgtatttgaaaggaactgggccaactgaaagccttaccacactgtttacatttatagggtttctctccagtgtgagttctttcatgtattcgaaatgaacttcgaaagctgaatcttttcccacattcctt

SEQ ID NO: 462673 - DNA, 2665 bp, Homo sapiens
atggtagccctccgtaatccttgaagcatacgttccaagactcacagtggatgcctgaagctgctgatagcgcggaccccagccccctcctcggcgcggacttcaacctcagtccgggcttctaccccgacccggacaccgactccactccggaccccgactccggtccggactcggacccccatccggaccctgactccagtcctgactccgtctccagccgggacttcccctctggtcctgactcctgctccagcccagattcccactctggtccccactcccgctctggcccggatcccccgtctggttccgcctcctgctccggcctggatccctactccggtgccgactcccgttcccgtccggaacccaactccggtcccgactccggctcggaccctgactcctccaggattcgggccgcgctccccgtcttggactcctacctggccccggccctacctttggatccgcccccggaacctgctccggagctgcctttgttgcccgaggaggaccctgagccggcgccgagcctgaagctcatcccgtcggtctccagcgaggccgggcccgccccggggccccttcccacgcgcaccccgctggccgcgaactcacccgggcccaccctggacttcaccttcagggcagacccgtcggccatcgggctggcggatccccccattcccagtcctgtcccctcgcccatcctggggaccatcccgtcggccatctccttacagaattgtacggaaaccttcccctcctccagcgagaacttcgcgctggacaagagggtcctgattcgagtgacctactgtacattctactgaaaaagagcctggagcagcaatttccgaatcacctactctttaggggtgatggctttgtgaacgagtccaggctgcagaaaattgtgagcgttatcgatgaggaaatcaagaaaaggtagccggcaaggggtggagctggaggagtctcagctggatgatgagaagggctgaaatgttgccaagtcaggtccttttctgatggtggctggggctggggtgagctcagggaggggaagaggagaatacatgcagagtcagcacccctgtgtccagtctgactgtgtctgctgtcgccacactcacctctgaggtctgtggaagtcacctgatattctggccccaggggtgggagggaggggagcttggaaggctagtcctgtagctccagtcctctgtctggcctccactcctcttgctcctgagggcagtttgtttcttttgtggattcgtcatttcccatgccctggttccagatacattttgaaaaccttccatcttattggcattttctggggttgtgagggaaacggggatggcagtcagactcaaacccgtgacactccaaactcgattatgctccagggcccactttctaaacctgtaagatctatgttccagcctgcgcaacatagtgagaccccaactctacaaaaaataaaaaattagccaggtgtggtggtgtgtgcctgtggtcccagctatttgggaggctgaggcaggaggatggcttgagcccaggaggctgcagtgagccatgattatgccactgtattgcagcctggacaacagagtgagatcctgtttcaagaaaaaaaaaaaaaaggaaaaaaacccataggttttagaatgccagtgttgtagggagcgtctctgtgacctggggctggaggagaggcattttcacattcattggacatttatgggctccgtactctgcacctggcatggtggggtcagtggtcacatgccaggaggtcaagggcaaaggcagggggggctcagactttaccacttagttgctgtgtgaccaccaccaagggacgccacctctctgagcctccatttcctcctccataaaatagacgtcatagcactatttaacttgtggaatttttgtgataattacatactaaattatgcttgggaaaggattagcagaaggcttatcacagaattagtaagtttcagttagtagtagatttcagttaagagtgcttttgcctactagtaacagcagacttgactgccaatggctcacacagcagacttgactgccaatggctcacacagtagaaaacacaaattctgttttgtttgttttttgagatggagtctggctctgtcacccaggctggagtgcaatagcacaatcttggcttactgtaacctctgcctccctgggtttaagcaattctcctgcctcagcttcccgaatagctgggattacaggcatgcaccaccacacccacctaatttttgtatttttagtagagatggggttttgccatgttggacaggctgatctcgaacgcctgacctcaagtgatccgcccacctcagcctcactgctgggattagaggcgtgagccacctcaggcctgatgttttcaacacctgacaggataatgtgctggccctgtacatacaaatgatatgctggtgtgagtaggaaataagttatctatcatgcctgctaagacagagtgctggagggtaggggaaagtcccaaaacatatatggggtttgtctcagtgaaatctgtatgtgtcaagcagtataaaacatgagaggatatttcctatgtgaaagatactttccaccccct

SEQ ID NO: 462674 - DNA, 1258 bp, Homo sapiens
cctaaataaatgacagtaccattaataaaagaagcagcatttaggattgcggcctccgaaggccaggaactattcaaggctgagacccagcatccagttaaaaggaagcttccctgtttcttccagctgtccttccatcattttgttcttttccgtcattcccaagcccctgctgctgtggggcccatcactgcttctccacctctattgcgagctccaagaattactgggcacacacagttttgcccctttacaaacgcctcctgtggattatttgaggacttgcgtttcagatcagatgatgcttttcatgtatgtccagcagcaagagagtccttcactggtgaaaaatcacgggcctcagagcagattttagttcatctttcatttcaaagcactccttagatatctgcaaattaaatcccctaatttgcttttcagttaggaagtcagagagaaggaaagagaactatttccaattcaatcacgagcatgtctacgcaccactgaagacagacctttgtcctgttgctttccaaactttaaatgtgaatttttcttcttatgatgactggtgtactctgttattctgaaaaaagaaaaagccataagcaccctgaagtgaggctttcacctgatactaattttcttcttcgttataaggctattgtttgtttgaacaaagaaataggagccattggtggctgtttacattataggaatgagggcagcgatgggggaggaggaggggaccttttcattaatgagctggggacattgattatggggacacactaaagactaaaagggacacctatatttctacattctttccatgcaagtaatatatgatctttatcatctgttaaacaccactcacatatttcaggtggctgtaggttgattgctaacatttagattaaacaagcagttagagtctgatgtttaaaataaaataagacaagcccttgaactctgggaccaggtatgccccgttatctggtcgtacctgaacgagcctgtgttgagcacccaaggccgctgggcacgtctgtggatgtggggtttcaggctcaacccactcgaggagcagggggcttttgggaggtggcagcctcctatacaaaacgagctgccagtaaatatttatagaacaaagaaatgcatgaatttctcctgaattaaacatgatacatttgtacagagcatagttcactttcatttcagtgacccaaaatcctgctgaaagtgttcttcc

SEQ ID NO: 462675 - DNA, 1129 bp, Homo sapiens
acgtgggagcatcccgtaggggacttgcgtttcagatcagatgatgcttttcatgtatgtccagcagcaagagagtccttcactggtgaaaaatcacgggcctcagagcagattttagttcatctttcatttcaaagcactccttagatatctgcaaattaaatcccctaatttggtgaggacgcccagcttcccaaataacaaggcttttcctttgattctaaccaagtgagccggccctgcaaaagccggggtgcgtgttctggctccaggcttctgagcagcctttctccccacgctgcagcttttcagttaggaagtcagagagaaggaaagagaactatttccaattcaatcacgagcatgtctacgcaccactgaagacagacctttgtcctgttgctttccaaactttaaatgtgaatttttcttcttatgatgactggtgtactctgttattctgaaaaaagaaaaagccataagcaccctgaagtgaggctttcacctgatactaattttcttcttcgttataaggctattgtttgtttgaacaaagaaataggagccattggtggctgtttacattataggaatgagggcagcgatgggggaggaggaggggaccttttcattaatgagctggggacattgattatggggacacactaaagactaaaagggacacctatatttctacattctttccatgcaagtaatatatgatctttatcatctgttaaacaccactcacatatttcaggtggctgtaggttgattgctaacatttagattaaacaagcagttagagtctgatgtttaaaataaaataagacaagcccttgaactctgggaccaggtatgccccgttatctggtcgtacctgaacgagcctgtgttgagcacccaaggccgctgggcacgtctgtggatgtggggtttcaggctcaacccactcgaggagcagggggcttttgggaggtggcagcctcctatacaaaacgagctgccagtaaatatttatagaacaaagaaatgcatgaatttctcctgaattaaacatgatacatttgtacagagcatagttcactttcatttcagtgacccaaaatcctgctgaaagtgttcttcc

SEQ ID NO: 462676 - DNA, 653 bp, Homo sapiens
gaagtattcctatccatccactatgcttcacagtgggaatctctcactgttcatcaccgctgccctagcagctcgcagggattcttcacccatggttgcttaggtttataagcaaggaagctgaatgaagtccctttcctctctggatgagcccctgggtttctggaagagtcttaaaatcacccctaaatggcttccaagcactgaagcccgagatgttagctggcctgtgtgaggccttgagacagaatgccacagccacaccccaaggatgctgaaggggatttccctcctctgtggtttttctcctttcttcccgcagcactcctcctacgtgctaacatcttctagtcaaacaactctccttttcaaagggaccaggcacagtttctgcttatccctgagtagcagtgttcagtttcctgccagcctgtggagtttttcaaacaagccaatcacctcctcctgtgggaactgagaagcaccccaccctctcgatactacaaagcccctgcttgttccctagtgcaactcccatgtggtcctgtggagcatatggtatcttcctcttctgggcagtgagcatatgtgactaataaactatctatctcatctgttcagtgccaggtgtcatttgttctgccatcccatga

SEQ ID NO: 462677 - DNA, 995 bp, Homo sapiens
cagagctgcttcacatgaatgtaatggttcccattcagaaccctgtgacctctgctttagtaacccaggactcaccagtgttcctcaaagctcactatgacttttcattaagtcaagcttctgcatgtgctattttctctgccttgcaaaccctttcccttgctaggcaaattcacacttgttcccacataaaagatgatctcctctgtgaagcctttgccaatgccagtgctttgtaccacatgccctgctttggtgtacaatttgaaatgccgaaagcactcactgaaaacttaagccaatccacaaaatatggctctgagaatccttcccataatggattcagttatagtttcatcattctaggacttataaaccccagtgactatattgctgggaggactgagctgactttcgaaaggattcttcacccatggttgcttaggtttataagcaaggaagctgaatgaagtccctttcctctctggatgagcccctgggtttctggaagagtcttaaaatcacccctaaatggcttccaagcactgaagcccgagatgttagctggcctgtgtgaggccttgagacagaatgccacagccacaccccaaggatgctgaaggggatttccctcctctgtggtttttctcctttcttcccgcagcactcctcctacgtgctaacatcttctagtcaaacaactctccttttcaaagggaccaggcacagtttctgcttatccctgagtagcagtgttcagtttcctgccagcctgtggagtttttcaaacaagccaatcacctcctcctgtgggaactgagaagcaccccaccctctcgatactacaaagcccctgcttgttccctagtgcaactcccatgtggtcctgtggagcatatggtatcttcctcttctgggcagtgagcatatgtgactaataaactatctatctcatctgttcagtgccaggtgtcatttgttctgccatcccatga

SEQ ID NO: 462678 - DNA, 1231 bp, Homo sapiens
tgccatgattctgaggcttccccagccatgtgaaactccatttgcaccagacctggattcctagcgtctccatctggagtgcggctggtggggggcctccaccgctgtgaagggcgggtggaggtggaacagaaaggccagtggggcaccgtgtgtgatgacggctgggacattaaggacgtggctgtgttgtgccgggagctgggctgtggagctgccagcggaacccctagtggtattttgtatgagccaccagcagaaaaagagcaaaaggtcctcatccaatcagtcagttgcacaggaacagaagatacattggctcagtgtgagcaagaagaagtttatgattgttcacatgatgaagatgctggggcatcgtgtgagaacccagagagctctttctccccagtcccagagggtgtcaggctggctgacggccctgggcattgcaagggacgcgtggaagtgaagcaccagaaccagtggtataccgtgtgccagacaggctggagcctccgggccgcaaaggtggtgtgccggcagctgggatgtgggagggctgtactgactcaaaaacgctgcaacaagcatgcctatggccgaaaacccatctggctgagccagatgtcatgctcaggacgagaagcaacccttcaggattgcccttctgggccttgggggaagaacacctgcaaccatgatgaagacacgtgggtcgaatgtgaagatccctttgacttgagactagtaggaggagacaacctctgctctgggcgactggaggtgctgcacaagggcgtatggggctctgtctgtgatgacaactggggagaaaaggaggaccaggtggtatgcaagcaactgggctgtgggaagtccctctctccctccttcagagaccggaaatgctatggccctggggttggccgcatctggctggataatgttcgttgctcaggggaggagcagtccctggagcagtgccagcacagattttgggggtttcacgactgcacccaccaggaagatgtggctgtcatctgctcaggatagtatcctggtgttgcttgacctggcccccctggccccgcctgccctctgcttgttctcctgagccctgattatcctcatactcattctggggctcaggcttgagccactactccctcatcccctcaggagtctgaacactgggcttatgccttactctcagggacaagcagcccccatt

SEQ ID NO: 462679 - DNA, 1315 bp, Homo sapiens
ggaatcactccacccaactctgtggacacaatgggctgtcagatggcggggaggggcgggggcagttctacactctccttggagccaaaccttctgctccctgaacagaacagaggcacattgagactaacaacccgtctctttgcagcgtctccatctggagtgcggctggtggggggcctccaccgctgtgaagggcgggtggaggtggaacagaaaggccagtggggcaccgtgtgtgatgacggctgggacattaaggacgtggctgtgttgtgccgggagctgggctgtggagctgccagcggaacccctagtggtattttgtatgagccaccagcagaaaaagagcaaaaggtcctcatccaatcagtcagttgcacaggaacagaagatacattggctcagtgtgagcaagaagaagtttatgattgttcacatgatgaagatgctggggcatcgtgtgagaacccagagagctctttctccccagtcccagagggtgtcaggctggctgacggccctgggcattgcaagggacgcgtggaagtgaagcaccagaaccagtggtataccgtgtgccagacaggctggagcctccgggccgcaaaggtggtgtgccggcagctgggatgtgggagggctgtactgactcaaaaacgctgcaacaagcatgcctatggccgaaaacccatctggctgagccagatgtcatgctcaggacgagaagcaacccttcaggattgcccttctgggccttgggggaagaacacctgcaaccatgatgaagacacgtgggtcgaatgtgaagatccctttgacttgagactagtaggaggagacaacctctgctctgggcgactggaggtgctgcacaagggcgtatggggctctgtctgtgatgacaactggggagaaaaggaggaccaggtggtatgcaagcaactgggctgtgggaagtccctctctccctccttcagagaccggaaatgctatggccctggggttggccgcatctggctggataatgttcgttgctcaggggaggagcagtccctggagcagtgccagcacagattttgggggtttcacgactgcacccaccaggaagatgtggctgtcatctgctcaggatagtatcctggtgttgcttgacctggcccccctggccccgcctgccctctgcttgttctcctgagccctgattatcctcatactcattctggggctcaggcttgagccactactccctcatcccctcaggagtctgaacactgggcttatgccttactctcagggacaagcagcccccatt

SEQ ID NO: 462680 - DNA, 984 bp, Homo sapiens
ttctctctgtgacgtcacaaaggccccgccatgcctctggctttgacccttctgctgctctcgggcttgggcgcccccggaggctggggctgcctgcagtgcgaccccttggtgctggaggccctgggtcacctgcgctccgccctcatccccagtcgcttccagttggagcagctgcaggcgcgcgccggggccgtgctgatgggcatggaggggcctttcttccgggactacgcgctgaacgtgtttgtggggaaagtggagacaaatcaactggaccttgtggcgtcctttgtcaagaaccaaacgcagcacttaatgggtaactctctgaaagatgagcctctgctggaagagctggtgaccctcagggcgaatgtgatcaaggaattcaagaaagttttaatttcatatgaattaaaagcctgcaaccccaaactttgccgcttgctaaaagaagaggtgttggactgtttacattgccagaggatcactcccaagtgtatccacaaaaagtactgctttgtcgaccggcaaccccgcgtggccctgcagtaccagatggacagcaaatacccgaggaaccaggcgctgttgggcatcctcatttctgtgtctctggctgtctttgtcttcgtggtcatcgtggtctcggcttgtacatacagacaaaaccgaaaactcctgctgcagtaggacggtggtttgggggtaaggagaaaggaaaataaatttaataaaattggtgacaaatccatcaatgtctctgtccatttcctggggaccctccccctagttggtgtccaactctgtttctctacctgactgggtgctcctcaaaggctgggaccagatcccactcatctgtagacacccattatcctaattcaaggtagaagtgacttggaccttcaaaaaggatggacagcatattgtaagggtttgaagtgacaaccacttatcctctgggaaggaaatgcatcc

SEQ ID NO: 462681 - DNA, 488 bp, Homo sapiens
atgaaatttaggagaagccaagggaccccatctcctctttctccttcttcctttccacccttgccggtcctctgatatctgcccttgtcttacttctccctttccccttgcctaggcttgctaaaagaagaggtgttggactgtttacattgccagaggatcactcccaagtgtatccacaaaaagtactgctttggtaagcttctgggggtgggggaagacatgggacaggcgtgcaagagatgaagacagccatgacccactagatatgggtttcgaggctcccacatgcagcctcgaatcctgccctaaccatttgcttagagtgtggcccagaagttgctcctgtattctgaaattcactttcctccatctgttaaatggaaagactccctggaactttagaatgcccctagctccagaatggcaggtgctagaaaaagattttattcttagccattgctatacctggggaatttggaaggatg

SEQ ID NO: 462682 - DNA, 572 bp, Homo sapiens
cagggaacaagcaggaagagaagaagagagagcgccccacccccacccctgccccaggctgctgaatgaacaggtggggtgggtatggggctaaggaggggtggtgacgtggaggtcggggctgtttccccacccgccccagtcgaccggcaaccccgcgtggccctgcagtaccagatggacagcaaatacccgaggaaccaggcgctgttgggcatcctcatttctgtgtctctggctgtctttgtcttcgtggtcatcgtggtctcgtgagtcatccttgccccctcctcagtcccccgtggaacccactgggcccctcaaaaatggcgactcccctggatgggtcactgtgtactttgggagtctcctcttcagtcactttagtctctgtctctctttttctctctgtctctctcctccctcttctccctcccgccccctgccccgtacctttctctcatcttatttctgtctttcttcctcattttcctttttctccacctctgggccacattacaactttcccgggtcctcagcacttttgcctttgtgggcctcttcttacatta

SEQ ID NO: 462683 - DNA, 763 bp, Homo sapiens
gcgggatccgggctccggctcgacgccggctctctttttgacgccccgccgccggggttgccatggttcatttcttgcacccgggccacacgccccggaacatcgtccctcctgacgctcagaaggatgccctgggctgctgcgtggtacaggaagaggcatctccctacactttggtcaacatctgcctgaatgtcctgattgctaacctggagaaattgtgttctgaaagacctgatggaacactgtgccttccggagcattggagtttccctcaggaagtagccgagcgatttctcagggtgatgacttggcaaggttgctggaggagccagtatgagtcagatttcagaagcactgagccgatacaggaacagatcatgttttgtgaaggaagccctccacaggctgttcacagagacattttcaatggaggtaaccatgcctgctattttaaagcttgtggctataggaatgaggaatcacccattggatttgcgagtgcagttcacagccagtgcttgcgctctcaacctaacacgccagggcctggccaaggggatgcctgttcgcctgttgtcagaggtcacctgtctacttttcaaggctctgaaaaatttcccccattaccagcaggcagaggaccctgcggccttccgcagtgtttgtgtccctgggtacttgagattagggagtggtgatgactcttaacgagcctgctgccttcaagcttctgtttagcaaagcacatcttgcaccgccc

SEQ ID NO: 462684 - DNA, 907 bp, Homo sapiens
ggcaacccccaagatggatccagtaagcggtgccaaactcccgcaaggaacaggcactaggacagaggccacggagacagggccactcaagcacacccacagcaaagagctggctctgcttgacaagtggcagtttccaaagctatcgtgctcagatgtaatccaaagacatgcaggagataaaagcacagcaggcagtgcctacagtctatgtggaaatctgggcttcgcagcccaggcttgccagccaggacccaaaaaccaggcgcgtcttccccttcacaagcactgcaatgcagcaaccattgacctaactatgcttccttctccaggtcatctcaagcagacccctcactctgaagcccccggatccaagcaggatgagctgccaactcagcttgctctgacttgacttggctcatgatccgtggaagacatccctacctgacccgtcgatcagcccgaaacttcaacatctttttggcagctccgtccccagtttggcagcctcagaggacccgccggccaccctgatcctaccatgcctctgagaaagatccttcagatcctgtgggcataagggttaaatgaagctcccgattcatctgctgttattgctgccgctgctgagaagctgagattgattgagcagttctcccttctcttcggtcagcctgcccagccttcttctgtgtggacaggagcataatgaatgaaggtcctctgcccctgtccctccgacttgctcccctcagacagcacggggttgctttccctccctgtgtggcagtcctaccgatgagaagcaagtcgaccagatgggcgtggatgctgtggaaccagagctggtggctaggatggggctgctcaggcaatattaaaggagagcttcctctcaaggcttgca

SEQ ID NO: 462685 - DNA, 898 bp, Homo sapiens
ggcaacccccaagatggatccagtaagcggtgccaaactcccgcaaggaacaggcactaggacagaggccacggagacagggccactcaagcacacccacagcaaagagctggctctgcttgacaagtggcagtttccaaagctatcgtgctcagatgtaatccaaagacatgcaggagataaaagcacagcaggcagtgcctacagtctatgtggaaatctgggcttcgcagcccaggcttgccagccaggacccaaaaaccaggcgcgtcttccccttcacaagcactgcaatgcagcaaccattgacctaactatgcttccttctccaggtcatctcaagcagacccctcactctgaagcccccggatccaagcaggatgagctgccaactcagcttgctctgacttgacttggctcatgatccgtggaagacatccctacctgacccgtcgatcagcccgaaacttcaacatctttttggcagctccgtccccagtttggcagcctcagaggacccgccggccaccctgatcctaccatgcctctgagaagtaagtcctctggtccaactcgtaaggctgtggcagagatgcagagtgattggtggcagagtctctagcagttctccctcctcctggctctggctctggagaaccaggagggcactctccttgggtggtggtaggggtcgcctaggtgccctagtaggcctgtggcttcctggtattcggccagaatgctactggtcagaggactggaggcagaataaacaaggaggggatgatatcctccccattcagcaccccaaggagaaaatgctgaaatggagagacaggcatacacggagcaggtgtagcactcccaggtagtccgacctcagtgagctaaggacgca

SEQ ID NO: 462686 - DNA, 4149 bp, Homo sapiens
aaaggtgtcattggctctaggccctggtgcctactctgctcgacagggtgtttgaagaaaccacagaaatgaaacggcgctgatgcccttgcctcttctggtggccacctgcactgcctggctggtggtcctgtcttctgtcttccaagcatattactctgatttctgcttccgtcgtcacatcacctttcctcttacaaagactctggtgaagaaccaggcctgcctgggtacacaggatcatctccccacctcgagctccttcacacagtcccatctgcaaagtcccttttgccacctaagaaatggtgtttggcacctagcaaatcagccggggaaagtacaaaaggccctgcatctcataaaagatgcatttagcacaggtttctatttcagagctaatggcattagctgttttgtagaaagtaagaaagcacaattaccctgttttaataacatggttgacagcacagctctaatcctgggggattctgggtttacattttgaggtttctgtagcaagcgagttcttagtaccaagctagcgtgtagccttatgtgccagtttgcctaaaacactcctggcttatacctcatgtttattaatagcaccctctttcaccttctagtgtcccagtttgggcaataaatgacacaatcaccttagtgacacaaaactgagaacgctaagcccatgcttgatggagcagctccccaccagctccttagagaaatccatccctagcaaaaaaagaattcaccaaatctcagactgtgccccttcacccattaatgtttgaggccatggacagtggttggggaatagaaaaccttccggtgaaagcgaatatattgctccaattcagtgtttaattgtttaaaaaattacaactgtacaagtttgttttggacaattcaaaggaataatggcaatgctctcagttgtcctactgctttaggttaaattctagaatcatcttgtcaatgtttacagaaaatctgcttaaattttgatctgattaaatgtgtagattaatttgggagaattgaagtttttacaacattgagtcatcaaactatgactcagtggtgcatgtcttcatttgtttaggttcctttcctttctgcccgtctcatagatttctgtagagtggtcttaagggctttttgttagatttattccttgttatttgatatattttgatgttaatgttatagtttcttaaagtttattttgttccacatccagtaatataatttacattttaacgtgtaccttatgcttatgtagcaacattgctaagtttattctaataatttatctgtatacttttcttttgggattttctaccacaatcatgccaactgcaaatagtgacaattctatttttctatttcaaacctcaaatcttgtctcttttacttccagtataatgttgtatagaaatgatgatagtggccattcttgtctcattcctcatcttaagaggaagctttcaatatttcatgaatgttgtgaaggatgttttctgtaggctttttaatacaaattatttatcagattaaaaaaattctctttattcttatgacactttttgagatgtgaattaaggtttggcaaagggacaatttttgtaatgttctctgtgttttttttttttttctgaagagaatgtatacgctgtacttgtcaggcacaactgatccattatatatgtctgttagtcaatatgttaattgtgttcaatttttctgtattgcttgctttttgtttagtttttcacttctgggtttagttttttgcagtttgtcaattttttgctcatgtttggaggcttgttaaattgatcattttgttattatgaaggatgtttttgattgctagaactgggtttttttttttttaatttttaagtctactttgtctgatagcaacatagtatactagctttctttacaattcttttttctctcctttcctgatatcttttggattgattatttttatactcattttcccttcctattagtatggtgattttgtacgcttttataaactttcagtggttatacaagagattgtagtatgtatcctcgacttattaatgtctaatataaattaatccttctatttttccctggacaatgcaaggaccttagaacattttaattccattgttcttctttcaacttctaagctatttttgctctgtattttatttctatatatactttaaatcctacagtgtatcactgacctgttaatataagataaattaatgttaaccattagtaattatgaattcatagtcaacattaagttatatttaatttagacttagccacaattaaccttttcacagctctttgttcgtttccatggctctgagcttccacttggcttcatttttctcctccttgaagaaactccctttagtgtcttcttgatgtgtctgctggtattaaattttcctagatttctttggtctgaaaatttctttatttcacctacattattgaaggatattttcaatgcatatagagttccacatggcaattattctctttgagcactttgaaggtctcattcactgacttctggtttccctagttggcgttgaagtcagatgtgggtctctgttgttgtactgaaagttctttgttttctcctcatcctgacttctacagctgcttttaagactttctctgttattggttttcagcttattactatgataagcctaggtatgattttctttttatttatcctatttagggttcattgagctttttaagtgttaatttacacagttgcaaagctgtattgatcaaggttcttcagaaaaacagcgccaatcggatatatatagacatagaagaggagattgattatgggtcttggtttgcatgattacagaagccgagtagccccatgatctgctgtctgcaagctgaagacccaggaaagctggcggtgtcattccgtctgagtccaaaggcctgaggacaaggggagctaatgttatatcccagtccaaggttgaaggcctgagaactgcggtgggggctgctagtgtaagtcctggagtctgaaggcccaagaaccaggagccccagtctccaagagaaggcaaagatgaatgccccagctcctcaagaagacacagagagagggagtttactttcctctctcttttttttgttctattcaggcctcaacatattggatgatgttcacccaacataggtgagggtggaccttctttactcagttgctgatgcagacactgacctcttccagaaccaccctcaccaacacacccagaagtaaccagctatctgagtatcctttaaccccttcaaaagcttcttgcaagaggagatttgatctgactcctgaaaggggttgagttttgggtcctttcttttttgaagggcacggatactgcctagagtctgtcccattgccccttcatccttgcagatgctctggatggagcatgttttaagggtcagctgagtttgcagaagcatcatatcctgtcacccatgtgccaggttcacaatgcgtgttcactcctgacgtccctgccaaccctgccagaaagggacctgctgaattgtatagtcttaaccctgtcatgttgacacatacaattcaccatccgaggtattaacagtttctcctgatattgcttctactccttttctcctacttcttttcttcatcctctctttcttatttgtcctccctttctgggatgacagttaaacccatgtcagaccttttaactgaatccctatgtctcgtcctttcctctatctttcctatcctgttgtctgtgcttcactctgactttcttctgactgatctaccatttcactaattctttccacctgtgtctaatatcgatttggtaaatttttatagttttttcccccaaatcctgtaccttgctccatttccctaaccatgttaagcaaacttattgtggactgtgtctgatatctggattgctagtggtccttccttcctgccttccctccctttcttccttctccttccttccttccttcattccatcctttcttccttccttctttccttcctccctccctccctccctgcctccctccctcccttccttc

SEQ ID NO: 462687 - DNA, 1533 bp, Homo sapiens
  misc_feature (1)..(3): n is a, c, g, or t
  misc_feature (5)..(6): n is a, c, g, or t
  misc_feature (8)..(10): n is a, c, g, or t
nnncnntnnnagatacatcagctacatggaagcaggaaaccaaacaggatttttagagtttatccttctcggactctctgaggatccagaactacagccgttcatatttgggctgttcctgtccatgtacctggtgacggtgctgggaaacctgctcatcatcctggccatcagctctgactcccacctccacacccccatgtacttcttcctctccaacctgtcctgggttgacatctgtttcagcacttgcatcgtccccaagatgctggtgaacatccagaccgagaacaaagccatctcctacatggactgcctcacacaggtctatttctccatgttttttcctattctggacacgctactcctgaccgtgatggcctatgaccggtttgtggctgtctgccaccctctgcactatatgatcatcatgaacccccacctctgtggcctcctggtttttgtcacctggctcattggtgtcatgacatccctcctccatatttctctgatgatgcatctaatcttctgtaaagattttgaaattccacattttttctgcgaactgacgtacatcctccagctggcctgctctgataccttcctgaacagcacgttgatatactttatgacgggtgtgctgggcgtttttcccctccttgggatcattttctcttattcacgaattgcttcatccataaggaagatgtcctcatctgggggaaaacaaaaagcactttccacctgtgggtctcacctctccgtcgtttctttattttatgggacaggcattggggtccacttcacttctgcggtgactcactcttcccagaaaatctccgtggcctcggtgatgtacactgtggtcacccccatgttgaaccccttcatctacagcctgaggaacaaggatgtgaagggagccctggggagtctcctcagcagggcagcctcttgtttgtgatggatcccttggccccaggactaagaagttttgtgagcaccaatggcaaaaatgttttattttgaaattcttactctttaaaattaaaaacatttttttatactttgagagtacaaatgcagatttcttaacatgcatttgcataagggtgaagtctgagcttttggctcaccaaagttcattatattgttcatatccctttgtgtcctcatagcttagctcccacttataactgagaacatacgatatgttcatatggatcttatgtatgttggttgaacatacaaacaagtccaggtttttcattcctgagttacttcacctagagtaatgacctccagttccatccaagttgctacaaaagacattatttggttcctttttatggataagtagtattccatgctgtacatataccacaatctttatcactcattggttgatgggcacttagaatatcagtcctattagatcagggcctgacccttatgatttcagtaaactttaattacctccctgaggaccctgtatctaaagacagtcatcatattgggggtgaggacttcact

SEQ ID NO: 462688 - DNA, 4620 bp, Homo sapiens
ccccaggagctggggaccccgagttgggggcggggcggctggggctacgcccgtgaagctgccccgccggctttcccggaccgcgagggggacagtgaggccgggaccccctccgcgcctttgcaccagccgtgaccccttgcaacgggggtacccagcggagctgcgcgctctcggcgcccccggagcctgcgccccgggccccttgcgcattttgcacgggggagactgaggctaggagtgcgaccctcagcccggggtcacacctcgtctggggcacggccaggtgggtggtagcctcagcctgcgagaccccctacccccgccccgtggtttcccgcaccgtggggccctgctctgaccacagactccgatggcagcggcggcgctgcgggaccccgcgcagggctgcgtgacctttgaggacgtgaccatttacttctcccaggaggagtgggtgctcctcgatgaggctcagagactcctgtactgcgatgtgatgctggaaaactttgcacttatagcctcgctgggacttatatctttcaggtcccacatcgtttcccagttggagatggggaaagagccctgggtgcctgacagtgtggatatgacatcagccatggccagaggggcttatggcaggcctggctctgatttttgccatggaacagagggcaaggacttaccttctgagcataacgtttctgtagaaggagtggcacaggacaggagtcccgaggcaactctgtgcccccagaagacctgcccctgtgacatatgtggcctacgtttgaaagacattttgcatttggctgaacaccagacaacacatcccaggcagaaaccatttgtgtgtgaggcatatgtgaaaggctctgagttcagtgcaaaccttccccggaaacaggtgcagcagaacgtacacaaccctatcagaacggaggagggccaggcttcccctgtaaagacctgcagagaccacacatcagatcagctttccacctgcagggagggtgggaaggactttgtggccacagcagggtttctgcagtgtgaggtcactcccagcgatggggagccgcacgaggccaccgaaggtgtggtggattttcacattgcactaaggcataacaagtgctgtgaatctggggatgccttcaataacaaatccactcttgttcagcaccagagaatccacagcagagaaaggccttatgaatgcagcaaatgtggaatcttcttcacttacgccgctgacctcactcaacaccagaaagttcacaatagaggaaaaccgtatgagtgctgtgaatgtggaaaattcttcagccagcactccagccttgttaaacatcgcagggttcacaccggtgaaagccctcacgtgtgtggtgactgtgggaaattcttcagccgaagctccaacctcattcagcataagagggttcacactggtgaaaagccatatgagtgcagcgactgtgggaagttcttcagccagcgttccaacctcattcatcataagagggttcatacgggcagaagtgcccatgagtgcagtgaatgtgggaaatctttcaactgcaactccagcctaattaaacattggagagttcacactggagaaagaccttacaagtgtaacgaatgtgggaaattcttcagccacattgccagcctcattcaacatcagatagttcacactggcgagcggcctcacgggtgtggtgagtgtgggaaagccttcagccgaagctctgacctcatgaaacatcagcgagttcacactggtgagcggccttatgaatgcaatgaatgtgggaagttatttagccagagctccagcctcaatagccatcggagacttcacactggtgaacggccttaccagtgcagtgaatgtgggaaattctttaaccaaagctccagcctcaataaccaccggagacttcacaccggcgagcggccttatgagtgcagcgaatgtgggaaaaccttcaggcagaggtccaatctgaggcagcacctgaaagttcacaaaccagacaggccttacgaatgcagcgaatgtgggaaagccttcaaccaaaggcctaccctcattcggcatcagaagattcacatcagagaaaggagcatggagaatgtgctccttccctgttcacagcacacaccagagataagctctgagaacagaccttatcagggcgctgtcaactacaagttgaaacttgttcatccaagtacccaccctggggaggttccctaggaatgctagctgtgttggaagctttctggagacaagttacattctcttactgtagagtttatcagcgttttttcactgctggggttgtgatagaagccatgtcagcaccacacactgcagctctccaaagagtgtgtccaccactccactgtgctcagggaaggcagacctctcctctctctttccaatccctaaagggaattaggagtagtctgaagccttgggaagatgtcattcccgccctgtatggctggtttagccatggacatgaccagcttttggctgtgaagacctgagcagggttttgccaacagcttgttctagagaaggtttccctttttctgggacattgttggtctcatgttatgcctgtgaaggatttgtccagccttcatgttactctacacaacaacttatctcctgtgtattgccctggttcatgtgatgataatggccttatgataaagccgcctttagtcttccatgttctgatcactgtgtggggtggttcaagagcagagttaagatctaccaaactgaaggggtctccagattatcttggaggggacaggaggatggcagagaaacaactgtcaatccagatttgacctcatttgcattgccaccaaggcctcctaggaaaaattgtaggaatttatgggtataatattgtggtctgaatggcgtgaatttttatcccgaggagggggcagttgtgacaacctccagtgcatgtgggaacagcatgaattgggtcccttattcccagggggtgccccatattccccaatactgtaaagcagatgctgtttagcacctgccaaggagccatatgccctgaagttcagcattaggcaggtatctcttaactgtaagacataccaggcccagctgggaccataatttgtacagaaacactggatgtgattaatagggagtaggcgagattatagcaaaccagcagaaatggaactctgctaaatgtgcatccgtgaatgctcccttgaatgtggctgtgcaggattcagggtttgcagaaattctcaggacctcagacctctgtcctatgactaatgttactggcagagcaaataatctaaaggttttggttttgtggattaccatctccgtgctgtgcatctgaaggccagtgctgtgctggcaggaaaatagggactgagaaaaagcagatcctatactatagggactgtagtatctatgacgtagccagccattctttgctcccaaggcaagaagaaagagatgacagagtcaatatagggttgccaaatcggattttctaaaatgagtaggaagttggatttttatgtgcaacagtttcttttaatgctttgttgatatgtgattgtcatgcaataattattcatatttggtaagttttgtacatatattatgtacactcagggaaccaataccataatcatgataatgaacgtatccatcacctgcaaagctacctcatgcccctttacattccctccttgccttccctaggaaaccgttgatttacattttttactttagatttgtttgccttttctagaattaacacaattggaatcataaagtatttatactctcttttggtctggtttctttcatgcagcataattatcttgagaatcatccatgctgtgtgtatatatagttcattccttttactactgagtagtgctatactgggtgagtgcaccatagttttttatggtttatttaaaaatgttaaaaaaatctgatgaaatatacttaacatgaaatttactatcctaaccatttttagtgtatacttcaatggtattaagtagattcgtattgttatgtaaccatcaccaccattcgtctccagaactcttcaatcttgcaaaactgaaattctgtacctgtcaagcaataacttcccattttcccttccccagcccctcaaaaccaccattctacttcctgtctgtatgaatttgaccactctaggtacctcatataagtagaataataagtatttgtctttttgtagctagcttatttcacacttagcataatattctcaaggttcatcaatgttggagcatatgtcagaatttcctttttagggctgattagtatttccttgtatgtgctgcattttgcttctctatcatgtgtcaatggatacttggggtgcctccaccttttgcctatttcgaataatgctgctctgaacctgagtgcacaacaaatatctattcaagaccctactttcaactcttttgggtatatgctcagaagtagaattactagatgatatagtaaatctatttttagttttttgaggacctgacatacactgtttt

SEQ ID NO: 462689 - DNA, 2553 bp, Homo sapiens
ttcctgcttggttcttcctgaggtctgagcaccttctagactacatccagatctgttttccctgcagattcatgaagatgagcatccggattccacccagactcctggagcttgcgggcggagcctgctgagggaccaagccttggccgtctccaccctggaggagctgcccacggaacttttccccccactgttcatggaggccttcagcaggagacgctgtgaggccctgaagctgatggtgcaggcctggcccttccgccgcctccctctgaggcctctgataaagatgccttgtctggaggccttccaagctgtgctcgatgggcttgatgcactgcttacccaaggggttcgtcccaggagatggaaacttcaagtgctggatttacaggatgtctgtgagaacttctggatggtttggtctgaagctatggcccatgggtgcttcctcaatgccaagaggaacaaaacaccagtgcaggactgtccaaggatgagagaacggcagcccttgactgtgtttgtagaactttggctcaagaacaggactctggatgaatacctcacctgcctccttctatgggtcaagcagaggagagatttactacacctgtgctgtaagaagctgaaaattttgggaatgcccttccgcaatatcagaagcatcctgaaaatggtgaacctagactgtatccaggaggtggaagtgaattgcaagtggatactgcccatcctgacacagtttaccccatacctgggccacttgaggaatcttcagaagctcgttctctcccacatggatgtctctcgctacgtttccccagagcagaagaaggagattgttacccagttcaccactcagttcctcaagctgcgctgcctccaaaagctttatatgaactctgtttctttcctcgaaggccacctggaccagctgctcagctgtctgaagacctcgttaaaggtcctcacaataactaactgtgtgcttttggaatcagacttgaagcatctctcccagtgcccgagtatcagtcaactaaagaccctggacctgagtggcatcagactgaccaattacagtcttgtgcctctccaaattctcctagaaaaagttgcagccacccttgagtacctggatttagatgactgtggcatcatagactcccaagtcaacgccatcctgcctgccctgagccgctgctttgagctcaacaccttcagcttctgtggaaatcccatctgcatggccaccctggagaacctgctgagccacacaatcatactcaaaaacttatgcctggagctgtatcctgccccgcaggaaagttatggtgctgatggtactctctgctggagcagatttgctcaaattagggctgagctgatgaagaaagtgaggcacttaaggcaccccaagaggatcttgttctgtactgacaactgccctgaccatggcgacaggtcattttatgacctggaggcagatcaatactgctgttgaatgcctgcctatttggatggcgtctttcaccgctagccagatgctgagaccctgcccactccctgtgagtctccacatgcttccagaagccttagttggtggatgtcagcttcactgcacaaggagccagtctcttcccgctgccctggaaggggatgtccatattgtatattagctggagactctgggcagcaccaacccttgcttgttcccctgatgaccagcagcccttcttgaattaaacttgttgtagccagtaaagacagccacattccctttaagtaaaatactaaaactatacaggcatgtaacactttttaaatatttccatctgacattttaaaagttacatctttttggggagctaggtcagattgatgagagattttctcataacaccttccctctctccctatgaaggaagtgactagtgcagcatgttctggaatctgacatcatcaaagggtggataacgatcaagtgcctgtgggtgatgagtgaccttccctgtggtgaggaagcctgcatagtgggcacccaagtgaaggatcctgctgtgtactcaggggctggtgttgctgtcagggatgttagcctagagcctcagcttcctgtaaaatgaggatgatgatatccaacagcttatgggaccttgaagtcccagcatttttcatctttcaatctcacctccttttcctgataatagagaggcaacaagaactcagggcatgcaatggggctcaacttctactctctgccacaatttcatcatgattcccccaaagagcagagccccaggagccagcagggggcagggtgggcatttctggactggattcattcataataagatcaaaatttccaatccgtatgtctcgggtgccatctgctgatagatcggaccagatggatcagcacccacaccagcacagagcattcgtcacaatcaatgagccacagggacacatcattatcacccaatgtccatagttcacatgggggatcattgctggttttgtacattctatggattttaacaaagggat

SEQ ID NO: 462690 - DNA, 1069 bp, Homo sapiens
gggaaggagaaaggccgggaggaaggctggcaaatggcacagccgctgtgccgggacgcagagcgcgatgacgtagggatcctgcacgtgggcccactcgaaggtgaccacctggaagcccccgctctcgccgtgcgcgccgccgggctccacctcgacgcccccggcccgcgccagcccgcccagcgccagcgccagcagcagcccccggtcggggccccgggccccgagtccccacattgccgcctgctcagcgcagggctgggacgcgcatgtcgcggggggtcccggctgggctgggccgacgcgcggggctgggacccggcgaggacccggcgcgctccggtgccggtaccggctacagtccgatccccgcccgccggggtggcctttaatcccgcggccccctcccgccccggggcggagcctgcccgcccccgccgcgcactcgcgagcgcagacaccgccgcagctcccggcacgcccgccccgcccgcgcacgcccaccccgcgctccctggtgcccaccctcccccggagcccgcggcctggaggtccgggaggtcgcggcaagagcgagcccgggactgcgcggccgccttcctggggcgtggggagcacagcgcggggcagcgggacaggcggttccgcgcagctcctgggatgcccgggcagctgtgggtgcgctcgccccaaccctccttcataaacgcagggcctggggctgcgcagaccccacagggcggcccaagggtgcacaggggccccaggtgtgtcttcacacagcccctcgctattgtcttcagcaggaacctgcattccacagccggaccggccacttaccagaactcgggggcgcccaggccttgcgtggtgcgctggaaggccaaatttccaccagaccagtgtgttccatgatgcccactggacctccggccaccccaccccccaaccagcctgtcctaagagccgacaacctttctccacaaagctgttcaaagggcagaagagcagtgtcactgcctggaaggacaaatccagaacagacaccagtgccaggcgctggcca

SEQ ID NO: 462691 - DNA, 3577 bp, Homo sapiens
ttggacacatggacacacccaaggagctctggcggatgatcactgggaacatggccctcatccaggtgcaggccacggtggtgggcttcctggcgtccatcgcagccgtcgtctttggctggatccctgatggccacttcagtattccgcacgccttcctgctctgtgctagcagcgtggccacagccttcattgcctccctggtactgggtatgatcatgattggagtcatcattggctctcgcaagattgggatcaacccagacaatgtggccacacccattgctgccagcctgggcgacctcatcaccttggcgctgctctcaggcatcagctggggactctacctggaactgaatcactggcgatacatctacccactggtgtgtgctttctttgtggccctgctgcctgtctgggtggtgctggcccgacgaagtccagccacaagggaggtgttgtactcgggctgggagcctgttatcattgccatggccatcagcagtgtgggaggcctcatcttggacaagactgtctcagaccccaactttgctgggatggctgtcttcacgcctgtgattaatggtgttgggggcaatctggtggcagtgcaggccagccgcatctccaccttcctgcacatgaatggaatgcccggagagaactctgagcaagctcctcgccgctgtcccagtccttgtaccaccttcttcagccctgatgtgaattctcgctcagcccgggtcctcttcctcctcgtggtcccaggacacctggtgttcctctacaccatcagctgtatgcagggcgggcacaccaccctcacactcatcttcatcatcttctatatgacagctgcactgctccaggtgctgattctcctgtacatcgcagactggatggtgcactggatgtggggccggggcctggacccggacaacttctccatcccatacttgactgctctgggggacctgcttggcactgggctcctagcactcagcttccatgttctctggctcataggggaccgagacacggatgtcggggactagcttggtcactcaacattttccccatccctctgcactttctatttgaaatttttcttttgttcccctgtccctcctccaccccacactcccacctctttctaggacttcactttgataccaaattctcattattttcaatgggaatttttatacattgagccaagtttgtatagcaagaatttgggaaacacagatggcctgagataagcagtacaagtaggtttttgagacaatcaccaagtgcagtttcatggtgggtgcctccaggtgatgtggactggagcaggggagttttgtctggaatctggggacatggggtttggctttagcaacctgtcttggccctaatgagaaaccctttgtaagtgggctctggatttttggttttgttttctttttatctgttttgttttatttttggttttggttgaacagagggacagaagaataagtaacactcccaaacacagacatacttttgtagaagtggaccaacttcaaagctctggacaggagacacctgctccaggcccctgtgatcccagttctgttctcttgccctctggacctaagcgttcccactcgcagaaagagtaaggtggactgacttttcaatttgtgcacatgcctcttgttcaatggcctggtcaacatcaacaacccctccctctgatcatttccagttgattgtcatatccaggaaaaaatggaacagtgcactcttctccctgttgacccatgtccacctattggttccccaaaatccacattctccctgggcccagatgactttgtctccctgggcccagattctttgtctctcttcaaccttcatctcaaattgtctctaagcactaccttccccagagcttgccaggttgggttttgagattagggtcaggtcatgggtatgtggagaatggtttggaggttgaggacaaccacaggtgtctcattgctgccatttctcctgaggacataatcacttggtcaccttggaccctgtcacttcctaaaattactcgttctgtcatgccatagaggtcagttttcctctttcttggcttctacccacaaacattcaccaatcatttattcgttcatttagcaaatatgcagcctccgcaagatgagctctcctgcagacaagcatggtctgaaacattctttgagcaatatttattgagtgcctactatgtgttaggtactgtgccaggcactgataagccagtggtaagggaaacacagctctaacctcacctcattctccaggttacaaaggccatgtgcccctttgaatctggcagagaaagtttcctcgttgtaagtatttgcatctacttcaagccagattcttctgcctctttctcctttccagacccctactctgtgcagtgctgaccacagctagagccaccgccccattgctcaaccagtatttatttccctaaacgacccttcctcatattcccttccctccacctctccttaccaagcacccaaaagaggatttagaactagcagggtggacatcatctggttgtttctacttttctctgcctagcacaaaattgggagaaaactggagcctccatccgcagtcacacgtgtacagatctggggatttggatgtaggctttttctaacttctctctcagaagcttctacagaaacccttccatctgtagcctcaagggcccacctccaagggaaggcttaggcaatgatcctgtttctaccaacactgcaccttatcccaggaacctgccctagacctccagagaccatattttctctccctccatttctacccagacctccaggcctccttctggaatcatagaaccgtagaattggaaggaattttagaggttttctagttggagttgtgtccaacagaattcattaacaccagcctgggcttgtttttcctcctccctctggacttttttcatcttttcctccacctcaaaaaatacttacacacagattcttcttgtacaggcatcaaaaccaactcctctgcccctaaggctgtgtccctgtggtctccagccacccctaccccagtcactcgccccttcctcatctctggaatttggccaggcagtcccagaagactctggagtgacctcctttgcctaaaaagcagacagataggcatgccccaggccctgagtgagcagaggaggactgtagggtgagagggaaagaaaatgaaggtgactttcatggaagtttcatttcttttccccgattgtaccaactgcatgtacttttggcctggctgcaaggagcaatattggtttactctcgtatccttaaaaagttacagaactgtgtcttaagagaattatttatagttactataactgaattgacaaatgtcaacttaactgataaattatatttggtaaaataaagaggacgtttatttagatggttggtgtttcctgtatgtctcatcaaaaagcagcttcaactgttgtcttgggcccctctgtaggccttaccctctcctc

SEQ ID NO: 462692 - DNA, 1592 bp, Homo sapiens
ggcagtgaatcgagctcggtaccgtagcttggttgggttttgagattagggtcaggtcatgggtatgtggagaatggtttggaggttgaggacaaccacaggtgtctcattgctgccatttctcctgaggacataatcacttggtcaccttggaccctgtcacttcctaaaattactcgttctgtcatgccatagaggtcagttttcctctttcttggcttctacccacaaacattcaccaatcatttattcgttcatttagcaaatatgcagcctccgcaagatgagctctcctgcagacaagcatggtctgaaacattctttgagcaatatttattgagtgcctactatgtgttaggtactgtgccaggcactgataagccagtggtaagggaaacacagctctaacctcacctcattctccaggttacaaaggccatgtgcccctttgaatctggcagagaaagtttcctcgttgtaagtatttgcatctacttcaagccagattcttctgcctctttctcctttccagacccctactctgtgcagtgctgaccacagctagagccaccgccccattgctcaaccagtatttatttccctaaacgacccttcctcatattcccttccctccacctctccttaccaagcacccaaaagaggatttagaactagcagggtggacatcatctggttgtttctacttttctctgcctagcacaaaattgggagaaaactggagcctccatccgcagtcacacgtgtacagatctggggatttggatgtaggctttttctaacttctctctcagaagcttctacagaaacccttccatctgtagcctcaagggcccacctccaagggaaggcttaggcaatgatcctgtttctaccaacactgcaccttatcccaggaacctgccctagacctccagagaccatattttctctccctccatttctacccagacctccaggcctccttctggaatcatagaaccgtagaattggaaggaattttagaggttttctagttggagttgtgtccaacagaattcattaacaccagcctgggcttgtttttcctcctccctctggacttttttcatcttttcctccacctcaaaaaatacttacacacagattcttcttgtacaggcatcaaaaccaactcctctgcccctaaggctgtgtccctgtggtctccagccacccctaccccagtcactcgccccttcctcatctctggaatttggccaggcagtcccagaagactctggagtgacctcctttgcctaaaaagcagacagataggcatgccccaggccctgagtgagcagaggaggactgtagggtgagagggaaagaaaatgaaggtgactttcatggaagtttcatttcttttccccgattgtaccaactgcatgtacttttggcctggctgcaaggagcaatattggtttactctcgtatccttaaaaagttacagaactgtgtcttaagagaattatttatagttactataactgaattgacaaatgtcaacttaactgataaattatatttggtaaaataaagaggacgtttattta

SEQ ID NO: 462693 - DNA, 3094 bp, Homo sapiens
ttggacacatggacacacccaaggagctctggcggatgatcactgggaacatggccctcatccaggtgcaggccacggtggtgggcttcctggcgtccatcgcagccgtcgtctttggctggatccctgatggccacttcagtattccgcacgccttcctgctctgtgctagcagcgtggccacagccttcattgcctccctggtactgggtatgatcatgattggagtcatcattggctctcgcaagattgggatcaacccagacaatgtggccacacccattgctgccagcctgggcgacctcatcaccttggcgctgctctcaggcatcagctggggactctacctggaactgaatcactggcgatacatctacccactggtgtgtgctttctttgtggccctgctgcctgtctgggtggtgctggcccgacgaagtccagccacaagggaggtgttgtactcgggctgggagcctgttatcattgccatggccatcagcagtgtgggaggcctcatcttggacaagactgtctcagaccccaactttgctgggatggctgtcttcacgcctgtgattaatggtgttgggggcaatctggtggcagtgcaggccagccgcatctccaccttcctgcacatgaatggaatgcccggagagaactctgagcaagctcctcgccgctgtcccagtccttgtaccaccttcttcagccctgatgtgaattctcgctcagcccgggtcctcttcctcctcgtggtcccaggacacctggtgttcctctacaccatcagctgtatgcagggcgggcacaccaccctcacactcatcttcatcatcttctatatgacagctgcactgctccaggtgctgattctcctgtacatcgcagactggatggtgcactggatgtggggccggggcctggacccggacaacttctccatcccatacttgactgctctgggggacctgcttggcactgggctcctagcactcagcttccatgttctctggctcataggggaccgagacacggatgtcggggactagcttggtcactcaacattttccccatccctctgcactttctatttgaaatttttcttttgttcccctgtccctcctccaccccacactcccacctctttctaggacttcactttgataccaaattctcattattttcaatgggaatttttatacattgagccaagtttgtatagcaagaatttgggaaacacagatggcctgagataagcagtacaagtaggtttttgagacaatcaccaagtgcagtttcatggtgggtgcctccaggtgatgtggactggagcaggggagttttgtctggaatctggggacatggggtttggctttagcaacctgtcttggccctaatgagaaaccctttgtaagtgggctctggatttttggttttgttttctttttatctgttttgttttatttttggttttggttgaacagagggacagaagaataagtaacactcccaaacacagacatacttttgtagaagtggaccaacttcaaagctctggacaggagacacctgctccaggcccctgtgatcccagttctgttctcttgccctctggacctaagcgttcccactcgcagaaagagtaaggtggactgacttttcaatttgtgcacatgcctcttgttcaatggcctggtcaacatcaacaacccctccctctgatcatttccagttgattgtcatatccaggaaaaaatggaacagtgcactcttctccctgttgacccatgtccacctattggttccccaaaatccacattctccctgggcccagatgactttgtctccctgggcccagattctttgtctctcttcaaccttcatctcaaattgtctctaagcactaccttccccagagcttgccaggttgggttttgagattagggtcaggtcatgggtatgtggagaatggtttggaggttgaggacaaccacaggtgtctcattgctgccatttctcctgaggacataatcacttggtcaccttggaccctgtcacttcctaaaattactcgttctgtcatgccatagaggtcagttttcctctttcttggcttctacccacaaacattcaccaatcatttattcgttcatttagcaaatatgcagcctccgcaagatgagctctcctgcagacaagcatggtctgaaacattctttgagcaatatttattgagtgcctactatgtgttaggtactgtgccaggcactgataagccagtggtaagggaaacacagctctaacctcacctcattctccaggttacaaaggccatgtgcccctttgaatctggcagagaaagtttcctcgttgtaagtatttgcatctacttcaagccagattcttctgcctctttctcctttccagacccctactctgtgcagtgctgaccacagctagagccaccgccccattgctcaaccagtatttatttccctaaacgacccttcctcatattcccttccctccacctctccttaccaagcacccaaaagaggatttagaactagcagggtggacatcatctggttgtttctacttttctctgcctagcacaaaattgggagaaaactggagcctccatccgcagtcacacgtgtacagatctggggatttggatgtaggctttttctaacttctctctcagaagcttctacagaaacccttccatctgtagcctcaagggcccacctccaagggaaggcttaggcaatgatcctgtttctaccaacactgcaccttatcccaggaacctgccctagacctccagagaccatattttctctccctccatttctacccagacctccaggcctccttctggaatcatagaaccgtagaattggaaggaattttagaggttttctagttggagttgtgtccaacagaattcattaacaccagcctgggcttgtttttcctcctccctctggacttttttcatcttttcctccacctcaaaaaatacttacacacagattcttcttgtaggaagccgggatcactctagagtcacctcagcatcacc

SEQ ID NO: 462694 - DNA, 3493 bp, Homo sapiens
ttggacacatggacacacccaaggagctctggcggatgatcactgggaacatggccctcatccaggtgcaggccacggtggtgggcttcctggcgtccatcgcagccgtcgtctttggctggatccctgatggccacttcagtattccgcacgccttcctgctctgtgctagcagcgtggccacagccttcattgcctccctggtactgggtatgatcatgattggagtcatcattggctctcgcaagattgggatcaacccagacaatgtggccacacccattgctgccagcctgggcgacctcatcaccttggcgctgctctcaggcatcagctggggactctacctggaactgaatcactggcgatacatctacccactggtgtgtgctttctttgtggccctgctgcctgtctgggtggtgctggcccgacgaagtccagccacaagggaggtgttgtactcgggctgggagcctgttatcattgccatggccatcagcagtgtgggaggcctcatcttggacaagactgtctcagaccccaactttgctgggatggctgtcttcacgcctgtgattaatggtgttgggggcaatctggtggcagtgcaggccagccgcatctccaccttcctgcacatgaatggaatgcccggagagaactctgagcaagctcctcgccgctgtcccagtccttgtaccaccttcttcagccctgatgtgaattctcgctcagcccgggtcctcttcctcctcgtggtcccaggacacctggtgttcctctacaccatcagctgtatgcagggcgggcacaccaccctcacactcatcttcatcatcttctatatgacagctgcactgctccaggtgctgattctcctgtacatcgcagactggatggtgcactggatgtggggccggggcctggacccggacaacttctccatcccatacttgactgctctgggggacctgcttggcactgggctcctagcactcagcttccatgttctctggctcataggggaccgagacacggatgtcggggactagcttggtcactcaacattttccccatccctctgcactttctatttgaaatttttcttttgttcccctgtccctcctccaccccacactcccacctctttctaggacttcactttgataccaaattctcattattttcaatgggaatttttatacattgagccaagtttgtatagcaagaatttgggaaacacagatggcctgagataagcagtacaagtaggtttttgagacaatcaccaagtgcagtttcatggtgggtgcctccaggtgatgtggactggagcaggggagttttgtctggaatctggggacatggggtttggctttagcaacctgtcttggccctaatgagaaaccctttgtaagtgggctctggatttttggttttgttttctttttatctgttttgttttatttttggttttggttgaacagagggacagaagaataagtaacactcccaaacacagacatacttttgtagaagtggaccaacttcaaagctctggacaggagacacctgctccaggcccctgtgatcccagttctgttctcttgccctctggacctaagcgttcccactcgcagaaagagtaaggtggactgacttttcaatttgtgcacatgcctcttgttcaatggcctggtcaacatcaacaacccctccctctgatcatttccagttgattgtcatatccaggaaaaaatggaacagtgcactcttctccctgttgacccatgtccacctattggttccccaaaatccacattctccctgggcccagatgactttgtctccctgggcccagattctttgtctctcttcaaccttcatctcaaattgtctctaagcactaccttccccagagcttgccaggttgggttttgagattagggtcaggtcatgggtatgtggagaatggtttggaggttgaggacaaccacaggtgtctcattgctgccatttctcctgaggacataatcacttggtcaccttggaccctgtcacttcctaaaattactcgttctgtcatgccatagaggtcagttttcctctttcttggcttctacccacaaacattcaccaatcatttattcgttcatttagcaaatatgcagcctccgcaagatgagctctcctgcagacaagcatggtctgaaacattctttgagcaatatttattgagtgcctactatgtgttaggtactgtgccaggcactgataagccagtggtaagggaaacacagctctaacctcacctcattctccaggttacaaaggccatgtgcccctttgaatctggcagagaaagtttcctcgttgtaagtatttgcatctacttcaagccagattcttctgcctctttctcctttccagacccctactctgtgcagtgctgaccacagctagagccaccgccccattgctcaaccagtatttatttccctaaacgacccttcctcatattcccttccctccacctctccttaccaagcacccaaaagaggatttagaactagcagggtggacatcatctggttgtttctacttttctctgcctagcacaaaattgggagaaaactggagcctccatccgcagtcacacgtgtacagatctggggatttggatgtaggctttttctaacttctctctcagaagcttctacagaaacccttccatctgtagcctcaagggcccacctccaagggaaggcttaggcaatgatcctgtttctaccaacactgcaccttatcccaggaacctgccctagacctccagagaccatattttctctccctccatttctacccagacctccaggcctccttctggaatcatagaaccgtagaattggaaggaattttagaggttttctagttggagttgtgtccaacagaattcattaacaccagcctgggcttgtttttcctcctccctctggacttttttcatcttttcctccacctcaaaaaatacttacacacagattcttcttgtacaggcatcaaaaccaactcctctgcccctaaggctgtgtccctgtggtctccagccacccctaccccagtcactcgccccttcctcatctctggaatttggccaggcagtcccagaagactctggagtgacctcctttgcctaaaaagcagacagataggcatgccccaggccctgagtgagcagaggaggactgtagggtgagagggaaagaaaatgaaggtgactttcatggaagtttcatttcttttccccgattgtaccaactgcatgtacttttggcctggctgcaaggagcaatattggtttactctcgtatccttaaaaagttacagaactgtgtcttaagagaattatttatagttactataactgaattgacaaatgtcaacttaactgataaattatatttggtaaaataaagaggacgtttattta

SEQ ID NO: 462695 - DNA, 1838 bp, Homo sapiens
agtgaacaagttctgggcctgagtccacctatgagccgggcctgtcctgctagtgagtttcttagaggcatagtgtgcaccccacttgtttctggtatttttcccaagacgtccgggctccagcccgttttggcagtgggaatcctgtgccaatacatccaagtcttcatggacggtggaaacaaaacgtgaaacctgcagatgtgtctgggatcgtccctcctggtgcctgacgtcggttaacttccggaggctataaaaacaggaatctccagggcagcgccatcttccacgaaggccaagaaccttctggaaagctgtttaaagtgtagtttatgcatcagttctttgaggaaagtaaaaatcatgagctaaatataaacgcatccaggctcaacggagacagaggcgtaactgcagcgctgttcctccgcaggcatgggggacgcgctctgccgatgtgggtgtcctgggagccggcactgcggcctctcagcttcctttcccaccaggagtatccagggcggaccgcaccacagacatcccagtggagccaggcagcaacgcctctttgctctcaaacatctaaattcaaaaacgactagttccccaagatagtgtcctgtggccacactgtgggcacacctgaaatggaattctagccttagctgctccggggcctcggaaacaatgccctgaatttgttcctctgaggttggcgtcgacacggggctcatgccgtcagataagaagacagacccttgcagcctccgtgcggtgtttccgagagcgcattcccctgagcagagcagggtctgcgctgtgtgatgggggtgcggggctctgatgaggggtttgtgggctcttcccaggtggccaatatcctgctcaacggcgtgaagtatgagagcgagctgacgggctccagcgagcgcgcggagcagcctctgtccgtggggcgcctctgctccaccatctgcaacatgcccaaggcgctacgcaccctctgcgtcaaccacttcctggggtggctctcattcgaggggatgttgctcttctacacagacttcatgggcgaggtggtgtttcagggggaccccaaggccccgcacacatcagaggcgtatcagaagtacaacagcggcgtgaccatgggctgctggggcatgtgtatctacgccttcagtgctgccttctactcagctatcctggagaagctggaggagttcctcagcgtccgcaccctctacttcatcgcctatctcgccttcggcctggggaccgggcttgccaccctctccaggaacctctacgtggtcctgtcgctctgcataacctacgggattttattttccaccctgtgcaccttgccttactcgctgctctgcgattactatcagagtaagaagtttgcagggtccagtgcggacggcacccggcggggcatgggcgtggacatctctctgctgagctgccagtacttcctggctcagattctggtctccctggtcctggggcccctgacctcggccgtgggcagtgccaacggggtgatgtacttctccagcctcgtgtccttcctgggctgcctgtactcctccctgtttgtcatttatgaaattcctcccagcgacgctgcagacgaggagcaccggcccctcctgctgaacgtctgacatcgcggagcctcgactccggacacgcgcctgcacctgggggtctggagcaggccgaccagtgaggaccaaagggccttgttggacagggggacaggctgcctactggaatgtaaatatgtgataaaataataaatgacagcggcaaagcctatggtttct

SEQ ID NO: 462696 - DNA, 1158 bp, Homo sapiens
  misc_feature (37)..(38): n is a, c, g, or t
  misc_feature (41)..(41): n is a, c, g, or t
  misc_feature (70)..(70): n is a, c, g, or t
  misc_feature (162)..(163): n is a, c, g, or t
  misc_feature (189)..(189): n is a, c, g, or t
aagaacgggcccaccgcgttcggggttctcctcccgnngangggaacccaaaccctgtctctttccccangtttcggaggaggctttggatacgtcctcggcggaatccactgggataaaacgggcttcgggagggccctggggggacagttccgagtcatnnacctcttcactgcggtcaccctgagngtcaccaccgtcctgaccctggtcagcatccctgagaggccgctgcggccgccgagtgagaagcgggcagccatgaagagccccagcctcccgctgcccccgtccccgcccgtcctgccagaggaaggccctggcgacagcctcccgtcgcacacggccaccaacttctccagccccatctcgccgcccagccccctcacgcccaagtacggcagcttcatcagcagggacagctccctgacgggcatcagcgagttcgcctcatcctttggcacggccaacatagacagcgtcctcattgactgcttcacgggcggccacgacagctacctggccatccctggcagcgtccccaggccgcccatcagcgtcagcttcccccgggcccccgacggcttctaccgccaggaccgtggacttctggagggcagagagggtgccctgacctccggctgtgacggggacattctgagggtgggctccttggacacctctaagccaaggtcatcagggattctgaagagacctcagaccttggccatcccggacgcagccggaggagggggtcccgaaaccagcaggagaaggaatgtgaccttcagtcagcaggtggccaatatcctgctcaacggcgtgaagtatgagagcgagctgacgggctccagcgagcgcgcggagcagcctctgtccgtggggcgcctctgctccaccatctgcaacatgcccaaggcgctacgcaccctctgcgtcaaccacttcctggggtggctctcattcgaggggatgttgctcttctacacagacttcatgggcgaggtggtgtttcagggggaccccaaggccccgcacacatcagaggcgtatcagaagtacaacagcggcgtgaccatgggctgctggggcatgtgtatctacgccttcagtgctgccttctactcagctgtgctgaatgagatagaaacagccccc

SEQ ID NO: 462697 - DNA, 1764 bp, Homo sapiens
  misc_feature (37)..(38): n is a, c, g, or t
  misc_feature (41)..(41): n is a, c, g, or t
  misc_feature (70)..(70): n is a, c, g, or t
  misc_feature (162)..(163): n is a, c, g, or t
  misc_feature (189)..(189): n is a, c, g, or t
aagaacgggcccaccgcgttcggggttctcctcccgnngangggaacccaaaccctgtctctttccccangtttcggaggaggctttggatacgtcctcggcggaatccactgggataaaacgggcttcgggagggccctggggggacagttccgagtcatnnacctcttcactgcggtcaccctgagngtcaccaccgtcctgaccctggtcagcatccctgagaggccgctgcggccgccgagtgagaagcgggcagccatgaagagccccagcctcccgctgcccccgtccccgcccgtcctgccagaggaaggccctggcgacagcctcccgtcgcacacggccaccaacttctccagccccatctcgccgcccagccccctcacgcccaagtacggcagcttcatcagcagggacagctccctgacgggcatcagcgagttcgcctcatcctttggcacggccaacatagacagcgtcctcattgactgcttcacgggcggccacgacagctacctggccatccctggcagcgtccccaggccgcccatcagcgtcagcttcccccgggcccccgacggcttctaccgccaggaccgtggacttctggagggcagagagggtgccctgacctccggctgtgacggggacattctgagggtgggctccttggacacctctaagccaaggtcatcagggattctgaagagacctcagaccttggccatcccggacgcagccggaggagggggtcccgaaaccagcaggagaaggaatgtgaccttcagtcagcaggtggccaatatcctgctcaacggcgtgaagtatgagagcgagctgacgggctccagcgagcgcgcggagcagcctctgtccgtggggcgcctctgctccaccatctgcaacatgcccaaggcgctacgcaccctctgcgtcaaccacttcctggggtggctctcattcgaggggatgttgctcttctacacagacttcatgggcgaggtggtgtttcagggggaccccaaggccccgcacacatcagaggcgtatcagaagtacaacagcggcgtgaccatgggctgctggggcatgtgtatctacgccttcagtgctgccttctactcagctatcctggagaagctggaggagttcctcagcgtccgcaccctctacttcatcgcctatctcgccttcggcctggggaccgggcttgccaccctctccaggaacctctacgtggtcctgtcgctctgcataacctacgggattttattttccaccctgtgcaccttgccttactcgctgctctgcgattactatcagagtaagaagtttgcagggtccagtgcggacggcacccggcggggcatgggcgtggacatctctctgctgagctgccagtacttcctggctcagattctggtctccctggtcctggggcccctgacctcggccgtgggcagtgccaacggggtgatgtacttctccagcctcgtgtccttcctgggctgcctgtactcctccctgtttgtcatttatgaaattcctcccagcgacgctgcagacgaggagcaccggcccctcctgctgaacgtctgacatcgcggagcctcgactccggacacgcgcctgcacctgggggtctggagcaggccgaccagtgaggaccaaagggccttgttggacagggggacaggctgcctactggaatgtaaatatgtgataaaataataaatgacagcggcaaagcctatggtttct

SEQ ID NO: 462698 - DNA, 3122 bp, Homo sapiens
gcggccggagctccaggtctcgtcctcactactctgtgtcttctgcttttaggggcgcagcctctgtggccctgtgacctgccccctggaagcctagaaatgggactgttgacatttagggatgtggccatagaattctctctggaggagtggcagtgcctggacactgcacagaagaatttatataggaatgtgatgttagagaactacagaaacctggccttcctgggtattgctgtctctaagccagacctcatcatctgtctggagaaagaaaaagagccctggaatatgaagcgagatgagatggtggatgaacccccaggtaggtgagagtgaatacaacagatgacctggatgagaggtccaacgtcaagaagaaagccagtctttaaagtgatttggaaagctgcattccaaaggaaaccgtttctggaaagcctgaaatttaaaaaaaaatatactctcagataggggcatcttctgcttatgcttataaaatctctaagaattctactctcccttcaatgatcttccttaacgtttacagtgacagccaaagtactgttcatggcatataaaagagtgtacaatctgactttttttttcttgtttttgtggacagatagatatctgcatagttttgagacactctatgttaaaatttttttttgttttagaaggagtttcgcttttgtggcccatgctggagttgcaatgagctgagatcatgccactgtactttagcctgggcggcagagcaagactctctctcgatgtatatatatatagtttgaaattataaagtataatgtccttctgctttgttctttttcctcaagattgctttggctattcaaaatttattgtggtttcgtgtacattttaggattgtaattttcattactgtgaaaaactggaattttgacagggagtttattgagtctagagatcaccttagataatatggcagtttcacaatacttattctttcaatagaaataaaatatttttaaatttatttgtggagctggaactgagtcatggaactgcttcagggaccacaggaaaggccaaggtctgaggcctgccatcatggctataaatggaggtcttcctccaggcctctggaagggcaggacccacgctgcccattggctcccaagactgtggctgtgaagagtttgggatggttacagataatactaagaagatttgaaaaatgtggacatgagaatttacagttaagaaaaggttgtaaaagtgtggatgagtgtaaggtacacaaagaaggttataatggacttaaccagtgtttcacaactacccagggcaaagcttctcaatgtggtaaatatttgaaagtcttttataaatttataaatttaaacagatataagataagacatactagaaagaaacctttcaaatgtaaaaattgtgtcaaatcattttgcatgttttcacacaaaacccagcataaaagcatatatactacagagaagtcctacaaatgtaaagaatgtggaaaaacctttaattggtcctcaacccttactaatcataagaaaactcatactgaagaaaagccctacaaatgtgaagaatatggcaaagcttttaatcaatcctcaaattatactacacataaggtaactcatactggagagaagccttacaagtgtgaagaatgtggcaaagcatttagccaatcctcaacactaaccatacataagaggatacatactggagagaaaccctgcaaatgtgaagaatgtggcaaagcatttagccaaccctcagcactaaccatacataagaggatgcacattggagagaaaccctacaaatgtgaagaatgtggcaaagcatttgtttggtcctcaaccctaactagacataagaggctgcacagtggagagaaaccctacaaatgtgaagaatgtgccaaagcttttagccaattcggacaccttactacacataggataattcatactggagagaaaccctacaaatgtgaagaatgtggcaaagcatttatatggccctcaaccctaactaaacataagaggattcacactggagagaaaccctacaaatgtgaagaatgtggcaaagcttttcatcgatcctcaaatcttactaaacataagataattcatactggagagaaaccttacaagtgtgaagaatgcggcaaagcgtttatatggtcctcaaaccttactgaacataagaaaattcatactagagagaaaccctacaaatgtgaagaatgtagtaaagcatttagccgatcctcagccctaactacacataagaggatgcacactggagagaaaccctacaaatgtgaagaatgtggcaaagcttttagccagtcctcaacccttactgcacataagataattcatactggagagaaaccctacaaatgtgaagaatgtggcaaagcatttatattgtcctcgaccctatctaaacataagaggattcacactggagagaaaccctacaaatgtgaagaatgtggcaaaacttttaatcaatcctcaaatcttagtacacataagataattcatactggagagaaaccttacaagtgtgaagaatgtggaaaagcgtttaatcgatcctcaaatcttagtacgcataagataattcatactggagagaaaccttacaagtgtgacgaatgtggcaaatcatttatctggtcctcaaccctttttaagcataagaggattcatacttgagagaaaccttaaaaagggtaaagaatgtggcaaagcatttatatggtcctcaacgctaaacataagaggatgcacactggagagaaaccctacaaatgtgaagaatgtgaaaaagcttttaatcctcaaatcttactaaacattagataattcacactggagagaaaccttacaagtgtgaagaatgtgggaaagcttttaatcattctcaaatcttactacacataagataattcatactggaaataaaccctacaaatgtgaaaaatgtggcaaagcatatggtccacacccctaagtagacataagaggatgcacactggagagaaaccttacaaatgtgaggaatgtggcaaagccttt

SEQ ID NO: 462699 - DNA, 758 bp, Homo sapiens
gcggccggagctccaggtctcgtcctcactactctgtgtcttctgcttttaggggcgcagcctctgtggccctgtgacctgccccctggaagcctagaaatgggactgttgacatttagggatgtggccatagaattctctctggaggagtggcagtgcctggacactgcacagaagaatttatataggaatgtgatgttagagaactacagaaacctggccttcctgggtattgctgtctctaagccagacctcatcatctgtctggagaaagaaaaagagccctggaatatgaagcgagatgagatggtggatgaacccccaggtaggtgagagtgaatacaacagatgacctggatgagaggtccaacgtcaagaagaaagccagtctttaaagtgatttggaaagctgcattccaaaggaaaccgtttctggaaagcctgaaatttaaaaaaaaatatactctcagataggggcatcttctgcttatgcttataaaatctctaagaattctactctcccttcaatgatcttccttaacgtttacagtgacagccaaagtactgttcatggcatataaaagagtgtacaatctgactttttttttcttgtttttgtggacagatagatatctgcatagttttgagacactctatgttaaaatttttttttgttttagaaggagtttcgcttttgtggcccatgctggagtgcaatggtgcgatctcggctcactgcaaccggatcctgcctccca

SEQ ID NO: 462700 - DNA, 2514 bp, Homo sapiens
atactaaaaataaaaaaattagctgggctcagtggtgggcacctgtaatcccagctgctcgggtggctgaggcaggagaattgcttgaacccaggagccagaggttgcaatgagctgagatcatgccactgtactttagcctgggcggcagagcaagactctctctcgatgtatatatatatagtttgaaattataaagtataatgtccttctgctttgttctttttcctcaagattgctttggctattcaaaatttattgtggtttcgtgtacattttaggattgtaattttcattactgtgaaaaactggaattttgacagggagtttattgagtctagagatcaccttagataatatggcagtttcacaatacttattctttcaatagaaataaaatatttttaaatttatttgtggagctggaactgagtcatggaactgcttcagggaccacaggaaaggccaaggtctgaggcctgccatcatggctataaatggaggtcttcctccaggcctctggaagggcaggacccacgctgcccattggctcccaagactgtggctgtgaagagtttgggatggttacagataatactaagaagatttgaaaaatgtggacatgagaatttacagttaagaaaaggttgtaaaagtgtggatgagtgtaaggtacacaaagaaggttataatggacttaaccagtgtttcacaactacccagggcaaagcttctcaatgtggtaaatatttgaaagtcttttataaatttataaatttaaacagatataagataagacatactagaaagaaacctttcaaatgtaaaaattgtgtcaaatcattttgcatgttttcacacaaaacccagcataaaagcatatatactacagagaagtcctacaaatgtaaagaatgtggaaaaacctttaattggtcctcaacccttactaatcataagaaaactcatactgaagaaaagccctacaaatgtgaagaatatggcaaagcttttaatcaatcctcaaattatactacacataaggtaactcatactggagagaagccttacaagtgtgaagaatgtggcaaagcatttagccaatcctcaacactaaccatacataagaggatacatactggagagaaaccctgcaaatgtgaagaatgtggcaaagcatttagccaaccctcagcactaaccatacataagaggatgcacattggagagaaaccctacaaatgtgaagaatgtggcaaagcatttgtttggtcctcaaccctaactagacataagaggctgcacagtggagagaaaccctacaaatgtgaagaatgtgccaaagcttttagccaattcggacaccttactacacataggataattcatactggagagaaaccctacaaatgtgaagaatgtggcaaagcatttatatggccctcaaccctaactaaacataagaggattcacactggagagaaaccctacaaatgtgaagaatgtggcaaagcttttcatcgatcctcaaatcttactaaacataagataattcatactggagagaaaccttacaagtgtgaagaatgcggcaaagcgtttatatggtcctcaaaccttactgaacataagaaaattcatactagagagaaaccctacaaatgtgaagaatgtagtaaagcatttagccgatcctcagccctaactacacataagaggatgcacactggagagaaaccctacaaatgtgaagaatgtggcaaagcttttagccagtcctcaacccttactgcacataagataattcatactggagagaaaccctacaaatgtgaagaatgtggcaaagcatttatattgtcctcgaccctatctaaacataagaggattcacactggagagaaaccctacaaatgtgaagaatgtggcaaaacttttaatcaatcctcaaatcttagtacacataagataattcatactggagagaaaccttacaagtgtgaagaatgtggaaaagcgtttaatcgatcctcaaatcttagtacgcataagataattcatactggagagaaaccttacaagtgtgacgaatgtggcaaatcatttatctggtcctcaaccctttttaagcataagaggattcatacttgagagaaaccttaaaaagggtaaagaatgtggcaaagcatttatatggtcctcaacgctaaacataagaggatgcacactggagagaaaccctacaaatgtgaagaatgtgaaaaagcttttaatcctcaaatcttactaaacattagataattcacactggagagaaaccttacaagtgtgaagaatgtgggaaagcttttaatcattctcaaatcttactacacataagataattcatactggaaataaaccctacaaatgtgaaaaatgtggcaaagcatatggtccacacccctaagtagacataagaggatgcacactggagagaaaccttacaaatgtgaggaatgtggcaaagccttt

SEQ ID NO: 462701 - DNA, 767 bp, Homo sapiens
gcggccggagctccaggtctcgtcctcactactctgtgtcttctgcttttaggggcgcagcctctgtggccctgtgacctgccccctggaagcctagaaatgggactgttgacatttagggatgtggccatagaattctctctggaggagtggcagtgcctggacactgcacagaagaatttatataggaatgtgatgttagagaactacagaaacctggccttcctgggtattgctgtctctaagccagacctcatcatctgtctggagaaagaaaaagagccctggaatatgaagcgagatgagatggtggatgaacccccagatggagtctcgctctgtcacccaggctggagtgcagtggcgtgatcttggctcactgcaacctccgcctcccaggttcaagccattctcctgcctcagcctcctgagtagctgggactataggtgccgacaccgcgcttggctaattttttgtatttttagtagaaacggggtttcaccgtgctctcgatctcctgatctcgtgatctgcccgcctcggcctcccaaagtgctgggattacagatgccagtaatttaaaatgcctgccttccatgaatgcacagttacagtcaaacattgcagttatctagacaaattatttgttaatgtacataaatgttgccaactagttgtaatgagtaaacatttctgttattgtgttgcagttttatattagtgttttttgtagtgtaagtttcctaacatcagtttattgtgccta

SEQ ID NO: 462702 - DNA, 4024 bp, Homo sapiens
ttcttttctctctctctctctattcagtattttggctaccatcttcagagaagcatgggagggagtaaaagaaattggatcccctttacccacatctatacagtcttcttgctgaccctgattacaagtgtttgggccagtgcagcagaactcaagccaccgggggtcagagcagacgcagagtgtccaggcatgctggagtctgctgaacagctgctggtggaggacctgtacaaccgcgtcagggagaagatggatgacaccagcctctataatacgccctgtgtcctggacctacagcgggccctggttcaggatcgccaagaggcgccctggaatgaggtggatgaggtctggcccaatgtcttcatagctgagaaatacagaagcattcatcttacggtcactaagaacccaggcatcgccaggagtgtggctgtgaacaaggggaggctgaagaggctgggaatcacccacattctgaatgctgcgcatggcaccggcgtttacactggccccgaattctacactggcctggagatccagtacctgggtgtagaggtggatgactttcctgaggtggacatttcccagcatttccggaaggcgtctgagttcctggatgaggcgctgctgacttacagagggaaagtcctggtcagcagcgaaatgggcatcagccggtcagcagtgctggtggtcgcctacctgatgatcttccacaacatggccatcctggaggctttgatgaccgtgcgtaagaagcgggccatctaccccaatgagggcttcctgaagcagctgcgggagctcaatgagaagttgatggaggagagagaagaggactatggccgggaggggggatcagctgaggctgaggagggcgagggcactgggagcatgctcggggccagagtgcacgccctgacggtggaagaggaggacgacagcgccagccacctgagtggctcctccctggggaaggccacccaggcctccaagcccctcaccctcatagacgaggaggaggaggagaaactgtacgagcagtggaagaaggggcagggcctcctctcagacaaggtcccccaggatggaggtggctggcgctcagcctcctctggccagggtggggaggagctcgaggacgaggacgtggagaggatcatccaggagtggcagagccgaaacgagaggtaccaagcagaagggtaccggaggtggggaagggaggaggagaaggaggaggagagcgacgctggctcctcggtggggaggcggcggcgcaccctgagcgagagcagcgcctgggagagcgtgagcagccacgacatctgggtcctgaagcagcagctggagctgaaccgcccggaccacggcaggaggcgccgcgcagactcgatgtcctcggagagcacctgggacgcatggaacgagaggctgctggagattgagaaggaggcttcccggaggtaccacgccaagagcaagagagaggaggcggcagacaggagctcagaagcagggagcagggtgcgggaggatgatgaggacagcgtgggctctgaggccagttccttctacaacttctgcagcaggaacaaggacaagctcactgccctggaaagatggaagatcaagagaatccaatttggatttcacaagaaagacttgggagcgggagacagcagcggtgagcccggtgcagaggaggcagtaggggagaagaacccctccgacgtcagcctgacagcctaccaggcctggaagctgaaacaccagaagaaggtgggcagtgagaacaaggaggaggtggtggagctcagcaagggggaggactcggccttggctaagaagagacaacggaggctggagctgctggagagaagccggcagacgctggaggagagccagtctatggcaagctgggaggcggacagctccacggccagcgggagcattcccctgtctgcgttctggtctgcagacccctcagtcagcgctgatggggacacgacgtcagtactgagcacccagagccaccgctcccacctgtctcaggctgcaagcaacatagcggggtgttcaacctccaaccccaccacacccctgcctaacctgccagtggggcctggagacaccatttccattgccagtatccagaactggattgccaatgtagtcagtgagacccttgctcagaagcaaaatgaaatgctgctgttgtcccgctcaccgtctgttgcaagcatgaaggcagtaccagcggctagctgcctgggggatgaccaagtctccatgcttagtggacacagcagctcctccttgggtggctgcctgttgcctcagagccaggcaagacccagctctgacatgcagtctgtgctgtcctgcaacaccacactgagctcacccgcggaaagttgcagaagcaaagtgagggggaccagcaagcccatcttcagcctctttgctgacaatgtggacctaaaggaacttggccggaaggagaaggagatgcagatggagcttagggagaagatgtctgagtacaaaatggaaaagctggcctcagacaacaaacgcagctccctcttcaagaagaagaaggtcaaggaagatgaggatgatggtgtgggtgatggggatgaggacactgacagtgccatagggagcttccgatattcttcccgcagtaattcccagaaacctgaaacagacacatgctcctccctggctgtctgtgatcactatgcaagtggcagcagagttggcaaagagatggatagcagtattaataagtggctcagtggcctcaggacggaggaaaaacctcctttccaaagtgactggtctggaagttccagagggaagtacaccagatcgtccctgctcagggagacagagtctaaatcctccagttacaagttttccaaatcccagtcagaggaacaggacacctcctcctaccacgaggcaaatggcaactctgtaagaagcacttcacggttctcatcttcctccaccagggagggcagagagatgcacaagttctccaggtccacgtacaacgagacctcaagttcccgagaggagagcccagagccctacttcttccgccggaccccagagtcctcagaaagggaagagtccccagaaccacagcgcccaaattgggccaggtccagggactgggaagatgtggaagagtcatccaagtcagacttctctgaatttggagccaagaggaagttcacccagagctttatgaggtctgaagaagagggagagaaagagaggacagaaaacagagaagaagggaggtttgcatctggacggcggtcccagtatcggagaagcactgacagggaggaagaggaagaaatggacgatgaagccatcattgctgcttggagacgccggcaagaagaaaccaggaccaagctgcagaaaaggagggaggactgagctggggaaaatctgagaacactgaaagaaaccactcacgttagcatagggctcagggcacacgttgccaccactcatcgcaggatgaggatacagagaggatcttccagaggggcagagccaaaatgagaggtaccaagcataagggcagcagaggtggagtagggaggaggcaaggagggggagaaccatcaatacgaatacgaggtccgaatgcggaccaactgataccattttctgttgctcagcgccctctaagctttggtgtttcacttaatgtatttgacagtgttcatcacaggctagagaggtgagcttggaaaagcactgtagtttgtcagagactccagtttacatccagaaaggccatgaacataggacacgcttctgtctgtagaggcttcatatgagacccagaaagtctatcctatggcaagtctgacctctcctggcaatgctcagttctgattttttttttttaatgttttgagtctccattaaaaatggtatgttggcaaatagttcttctttattctggtcatgtttaactttttgg

SEQ ID NO: 462703 - DNA, 738 bp, Homo sapiens
gagagcacagtctacgggccaatgccggggcaccccttcccaattagccagagcctcatccctgaaaacatcttcagcctgctggcgagtgcagcctggtgtgatgctatacccatattccctagcttgtatggttacctgactgccaagagccagcatcctattggtctagcactgaagaagcagagggagttggtcacaaagagaaagaaggatgagaggactttggagcaaagaaaggaggactttgccaagagcaaacctgaaacattcctttgggttcagttcaatcgcctgcaagtcacgtttccacacaaacatgtccccaggactgaggatgcaaggcactgttcaaggcgtctcttggatgaagacatggcaaaagctaccaccaccatgcagctctgtgattcttctactagtgtcttccattggctgaactcagctgaacactacagggtaaagaagcccagatgatgctgtctgttgaagtcagtttcttgaagcacaaagcaggtaaggggaaaggtgaaaagtggatctggaggaacaaacaggatataccctgcaaaatcattgatattactatttctaaaatagaaaaaatacacaaatttaaaaagtgatggcatttgaaacttacttctgtcatcaaatgtgataaaaataattcccatctaataaaattattgggtaaccttgaaaatcaacaatgtctgttaactttttgtccttatt

SEQ ID NO: 462704 - DNA, 1504 bp, Homo sapiens
agggtcccagactgcgccaaagcttcaggagacctctccttgtctgtgcacggactggtggctgactctggagcccagactgttgctggtgaatccttcatagtctggtgtccgagctacacagagccacagaatctcacaggtgtctcagaattcctcctcctgggactctcagaggatccagaactgcagccggtcctcgctgggctgttcctgtccatgtacctggtcacggtgctggggaacctgctcatcatcctggctgtcagctctgactcccacctccacacccccatgtacttcttcctctccaacctgtccttggctgacatcggtttcacctccaccacggtccccaagatgattgtggacatgcaaactcacagcagagtcatctcctatgaaggctgcctgactcagatgtctttttttgtcctttttgcatgtatggatgacatgctcctgagtgtgatggcctatgaccggtttgtggccatctgtcaccccctgcactaccgaatcatcatgaacccacgcctctgtggcttcttaatcttgttgtctttttttattagtcttttggactcccagttgcacaatttgattatgttacagctcacctgcttcaaggatgtggacatttctaatttcttctgtgacccttctcaactcctccaccttaggtgttccgacaccttcatcaatgaaatggtcatatatttcatgggtgccatatttggctgtctccctatctcagggatccttttctcttactataaaattgtttcccccattctgagagttccaacatcagatgggaagtataaagccttctccacctgtggctctcacctggcagttgtttgcttattttatggaacagggcttgtagggtacctcagttcagctgtgttaccatcccccaggaagagtatggtggcttcagtgatgtacactgtggtcacccccatgctgaaccccttcatctacagcctgaggaacaaggacattcaaagtgccctgtgcaggctgcatggcagaatcatcaaatctcatcatctccatcctttttgttatatgggatagaaatggcagcaaaatttaacacctaggcctgcaaattctgcctccttggtcacattattttggttgcttgatggctttcattcctctctgggtttcgtatgtgaatattgcttgctttgttttgtctttaattgcaatgggtgagtattctggtatcctttgttcatcatacacatcatgaatgattccaatatacctagacagcctcctttagtatctgtgcaatgaccttgatatccaggtgcaatcacaatcttttctgatagacttgaaatcctcacttaactttgtcaagaggtttttggaaactgcaactttaaaaaaaaagcgcagcaggtcctgaaataagttcattttgttcaatgttgtttagttttaattttggtgagaaatgaataaattggtttcatggttcaaa

SEQ ID NO: 462705 - DNA, 2201 bp, Homo sapiens
ggctggcagtagggtgccaggttcaaagagcccgcggcgtcttcacgcccctgcgctcagctctagactcagtcgctcgctgagagacgccctggaacgtctgtgtagcctcagtcgctgagagacgccctggaacgtctgtggcagcctctgtcacagtgggacccgcactggcagcgggaggcagagggaggaccctggaacatcccggaagccgggaaatggacgcagtggcctttgaggatgtggctgtgaacttcacccaggaggaatgggctttgctgggtccatcacagaagaatttatacagatatgtgatgcaagaaaccatcaggaacctggactgtataagaatgatatgggaagaacagaatactgaagatcagtacaaaaatcctaggagaaatctaagatgtcatatggtagagagattcagtgaaagtaaagacagtagtcagtgtggagaaacatttagcctcattcgagatagtattgtgaacaacagcatttgtcctggagaagatccatgtcaaagcgctgagtgtgaagaagtcataatgggtcatttatcccttaatagccacatcagagttgattctggacacaaaccacatgagtatcaggaatatggagagaagccacatacacataaacaacgtgggaaagccttcagttaccatcactcctttcagtcgcgtggaaggcctcacactggaaagaaacgctatgagtgtaaggaatgtggaaaaaccttcagttctcgtagaaaccttcgaagacacatggtagtgcaaggtggaaatagaccttataaatgtaagttgtgtgggaaagcttttttttggcccagtttattacgtatgcatgaaagaactcacactggagagaaaccgtatgaatgtaagcagtgttctaaagcctttcctttttacagttcctatcgaagacatgagagaatgcacactggggagaaaccgtatgaatgtaagcagtgttctaaagccttgcctgattccagttcctatataagacatgaaagaactcacactggagagaaaccatatacatgtaaacagtgtgggaaagccttcagtgtttccagttcccttcgaagacatgaaaccactcacagtgcagagaaaccctatgagtgtaagcaatgcgggaaaacatttcatcatcttggaagctttcagatacacatgaaaaggcacactggagatcgacctcataaatgtaagatatgtgggaaaggctttgatcgtcccagtttagttcgatatcatgaacgaattcacactggagagaaaccctatgaatgcaagcagtgtgggaaaacgttatctcatagctcaagctttcgaagacacatgataatgcacactggaggtggacctcataaatgcaagatatgtgggaaagcttttgtttatcctagtgtatgtcaaagacacgaaaagtctcacagtggagagaaaccctatgaatgcaagcagtgtgggaaagcgttatctcatagctcaagctttcgaagacatatggtaatgcatacgggagatgggccgaataaatgcaaggtatgtgggaaagcctttgtttatcccagtgtatgtcaaagacatgaaaagactcactggagagaaacaatatgaatgtaaactattataaagccttctatatttccagttccctttgatatcatgaataaacttacactggacagaaaccctataaatgtaaatgtgggaaagcctttcataatttttattcctttcaaaatcatgaaatatctcacactggagagatgctgtatgatataaggaatgtgggaaagtgatcgatttttttttaacaccattgtcaacataaaacaactcacagagcagaaaaactctgttttctacttttgcttcatagaaatatggggaaaccctcatgttttcaaattcattccctaatgtttcggcttccgattggagcttttaagtcattaacatttaaagtcttgaaggaaagagtgtttctacactgtgcagaggagggcaagttgagctcccagagttaaatccttcaatgtctctccctcatcatcaggtgctgatccactctggggctccatttcaggagtcaagagtctggctctcaagctcgggaatctgtttaacttcctgaaagggggtttcctgcttacttccctgaac

SEQ ID NO: 462706 - DNA, 1891 bp, Homo sapiens
atctgatctgctttcgaaatgaattagtgaccagagttcctcactgggatctcaggctgctgtcttcaagactggcgcagaggacgcagtggcctttgaggatgtggctgtgaacttcacccaggaggaatgggctttgctgggtccatcacagaagaatttatacagatatgtgatgcaagaaaccatcaggaacctggactgtataagaatgatatgggaagaacagaatactgaagatcagtacaaaaatcctaggagaaatctaagccacatcagagttgattctggacacaaaccacatgagtatcaggaatatggagagaagccacatacacataaacaacgtgggaaagccttcagttaccatcactcctttcagtcgcgtggaaggcctcacactggaaagaaacgctatgagtgtaaggaatgtggaaaaaccttcagttctcgtagaaaccttcgaagacacatggtagtgcaaggtggaaatagaccttataaatgtaagttgtgtgggaaagcttttttttggcccagtttattacgtatgcatgaaagaactcacactggagagaaaccgtatgaatgtaagcagtgttctaaagcctttcctttttacagttcctatcgaagacatgagagaatgcacactggggagaaaccgtatgaatgtaagcagtgttctaaagccttgcctgattccagttcctatataagacatgaaagaactcacactggagagaaaccatatacatgtaaacagtgtgggaaagccttcagtgtttccagttcccttcgaagacatgaaaccactcacagtgcagagaaaccctatgagtgtaagcaatgcgggaaaacatttcatcatcttggaagctttcagatacacatgaaaaggcacactggagatcgacctcataaatgtaagatatgtgggaaaggctttgatcgtcccagtttagttcgatatcatgaacgaattcacactggagagaaaccctatgaatgcaagcagtgtgggaaaacgttatctcatagctcaagctttcgaagacacatgataatgcacactggaggtggacctcataaatgcaagatatgtgggaaagcttttgtttatcctagtgtatgtcaaagacacgaaaagtctcacagtggagagaaaccctatgaatgcaagcagtgtgggaaagcgttatctcatagctcaagctttcgaagacatatggtaatgcatacgggagatgggccgaataaatgcaaggtatgtgggaaagcctttgtttatcccagtgtatgtcaaagacatgaaaagactcactggagagaaacaatatgaatgtaaactattataaagccttctatatttccagttccctttgatatcatgaataaacttacactggacagaaaccctataaatgtaaatgtgggaaagcctttcataatttttattcctttcaaaatcatgaaatatctcacactggagagatgctgtatgatataaggaatgtgggaaagtgatcgatttttttttaacaccattgtcaacataaaacaactcacagagcagaaaaactctgttttctacttttgcttcatagaaatatggggaaaccctcatgttttcaaattcattccctaatgtttcggcttccgattggagcttttaagtcattaacatttaaagtcttgaaggaaagagtgtttctacactgtgcagaggagggcaagttgagctcccagagttaaatccttcaatgtctctccctcatcatcaggtgctgatccactctggggctccatttcaggagtcaagagtctggctctcaagctcgggaatctgtttaacttcctgaaagggggtttcctgcttacttccctgaac

SEQ ID NO: 462707 - DNA, 1856 bp, Homo sapiens
cctgttgtaataagcagaggagtgttgtgtgtgcattttaattgccagcagagccgtagtttggtgggcgccctgagctcggctccgggaaagagccctttgcagctttctttgtggcagtcatttgcaaaggggtttggctctcagctacggcggaggcagagggggcagcagcaccgcttccttctatgccgatcccgggcgcaggatgggagaaggaaatactctctttgcactgcattaagccaggaggattcatctaccgtttaactgatgtttctctgtttgagggaataccaaagatactccaggtcttaggagggaatgattccccagtaatattccctgccctgacccaaagtgctggttggcctccctcccagggaagactgcttcttgcgtaacgccggccacagaaagagactccgatggacttacaccgggcagccttcaagatggagaactcatcctaccttcccaaccctctggcatccccagcactgatggtcctggcatccacggctgaggccagccgtgatgcttccatcccttgtcagcagccacgaccctttggtgtacctgtctcagttgacaaggacgtgcatattcctttcaccaacggttcctatacctttgcctctatgtaccatcggcaaggtggggtgccaggcacttttgccaatcgtgatttccccccttctctactacacctccaccctcaatttgctcccccaaatctagattgcaccccaatcagtatgctgaatcatagtggtgtgggggctttccggccctttgcctccaccgaggaccgggagagctatcagtcagcctttacgccggccaagcgacttaagaactgccatgacacagagtctccccacttgcgcttctcagatgcagatggcaaggaatatgactttgggacacagctgccatctagctcccccggttcactaaaggttgatgacactgggaagaagatttttgctgtctctggcctcatttctgatcgggaagcctcatctagcccagaggatcggaatgacagatgtaagtactttggttccagccctcccttacccccagtaagccctgcctcaccgtgatgttcaacaggtcggtggcgttttgcatgctcctagtaataggaagggccaactacttccctttcactagctgtggagtgctaacctttgcttgtctcttatcagtgagcactgatagttcttgaaatatttttctgaaagtagccagaggcaagttggccccagcacagcctttctctccggaccctagtgggcttattctctgaggacttgagtgaagaggggtgccaccgacgtactgaagtgaatgtcatttcattaagaagtgtcggctcctagggaatttggggggcctaaagaaacatgtccacccctcctctctttgctgtcctcgttatgtttgtctgatctcagtgttattttttagcttttccattgtatcacatccagcagactccacgtgattctattttcacaactctcagcccttgtccacatcaggctatttttcagagaaggacaaaggtgtcgtcaatcaccataaagcatttcacacagctgtgttttccttgcgatcgcaaggctagaaagccgacttctcttgggatttcacaggtttgctggatgcttatcctggggctcacttttaggactagacacggttgacctgtgtgactgctccaaatttgatgttcacaactattattaatttctgcttatgaaacagctttttttcatgttctccaagtgccttgttgggctctggctacacttatagctggaactaaacctttatttggaacttgt

SEQ ID NO: 462708 - DNA, 2309 bp, Homo sapiens
agttgctgggagccatagacctcgaagctggggcgtctgacacctgaggcccgaagtaggtggccagcttcttagagggccaacccagggcattaacacaccaggatagtggccgcagttgtattatcttgtgcatttgtcaagagaggtcatccgaacgctgagataaaggcttgggattccattgtctcatctctttctgggagtgattttcctctcatctggaagtgcagagacagagtcttcatagggaactgagattacctccaaaaaacatttgtgaagtgagcaattcctagaaggctgttaatgttgattaatgaaattatacaaaaagaatcataagatagctggagaagaaaattatctgtgatgcctggaaaagatacgtcccagtgggaggtaagtacagaatcctgagttctgagatgtgaggaattcagttgaggtaatggttctactataattgtggctaccattaaatttttgtttcttcaaattatgatttatttctcttcctgataacattgaacaatcataaatgtggagggaaaggaatcattgagggttgatttagagagagtaaacaggtgtaaagccatggttcctgtgtgttttaacaaatactaactgagcacccgccctgttgcagatgcatttctagattctggaaagtgaggagcgtctctgcccggccgccatcccatctaggaagtgaggagcgcctcttcccggccgccatcccatctaggaagtgaggagtgtctctgcccggctgcccatcgtctgagatgtggggagcgcctctgccctgccgccccgtccgggatgtgaggagcgtctctgcccggccgccccgtctgagaagtgaggagaccctctgcctggcaaccgccccgtctgaaaagtgaggagcccctccgcccggcagccgccccgtctgagaagtgaggagcccctccgcccggcagccaccccgtctgggaagtgaggagcgtctccgcctggcagccaccccgtccgggagggaggtggggggggtcagtcccccgcccggccagccgccccgtccgggagggaggtgggggggtcagccccctgcccggccagccgccccatccgggaggcgtcttctgggggttggagtggaggtttcccttcaatggcccgggtaggatttcgttgtcttgggggtagatctgaagactcactcccactgcgatgggtggggagtcctgcctggacattgaggatggatccgagagagaagcgcagagcctgacggatcagacaccaccaccccttagcggcgacgaaaccgagcgggagagcgaggtgatccagaccagacagggaaccctgcggggcgtggcggggccgggggtgaagcttgcagaggtagttgcccgtgaagagcagcttgtgcgctgttggatccttggagtggagtgggaactccgaggtgaagcgcaccgtgttcagcccgatgccggtgagcggccgttggaacgcgtggcagagaaagcttgcgcgagcccagggcgcgaagaagtacaacaaagggccaacggggaggtccaacggtccgaccccagccggactcgagctcactcggttgcaggcgttaggctcccagcggctctcagccgttaagtggagaatgttcaggactgtcgaggcgcgctccgcacctggcctgaaagcgggagatttggcaaccagtagcatgggaggatgccgcctcctccaggaagctctctagcgcttttccgagtcctggagccaggcgggacttctctgtggtcgcctagaaggggcctttctcttcaaatggaccccagcagccaaccacacagctgcctcagcaagcgtaggagatggcacatcagagaccaacaattgtcagcacagcaaaactgggcatttcttttcttactgagctttgcagctacctacacagttgtgtgtggcatctcctcctgggtgcaaggacatgagatgacatcagttactgtgatctccagtaaaatgtttaatacaagtggagacaatagataaccttttccaactcctgatcggggggtggaaagtgctcagtgtgctattaacttaaggcttttatagatgtgctttatcatgtaaaggctgttccctccaattctttctatactgagaaattttttcaaagaggtgttaaattttttcaacccatgtcacaaatctgcatatgtactcccctaaacctaaaataaaagttggaaagaaaaataaaactattacttgaaacccatgttgtcatagaaaagatg

SEQ ID NO: 462709 - DNA, 781 bp, Homo sapiens
agttgctgggagccatagacctcgaagctggggcgtctgacacctgaggcccgaagtaggtggccagcttcttagagggccaacccagggcattaacacaccaggtcagaaaaagcaaaaacaaaaacaaacaaaaaatgataatctataccaaaatatgttattactttaacacaaaaatatgaaaactaggtgtttgaaattatctttccgtactgtttgcttttcgctacagaaatgctattatttaacagaatattaataggattaatagtggcaattagactaatcacgtgtgagaaaaatatatttctgtcctctgatacaggaattttaagtttctattaaatatttaaattttgtgggttctatctaagatgctaaatgtaagaccttttaaaaggagaatgtaaataaggctaatcaaacagatattaactatatgtaataggcatttatctttctgtcccatcatacgtttaggagatatttactctttctggttccttttccagtaacacctctctgtattagctgcctgtagcctttatggcattcttcttttggtttatgtaatgctaaaactgaatacaggcaaacgtgaaattcaccttgactgtcagctccgctttttgtttgttttgtttttgttttgttttgagacagggtctccctctgtcgctcagactggaatgcagtggcgctatctcggcttactgtaacctctgcctcccaggttcaagtgattctcccacctcggcctccagagtagctgagacta

SEQ ID NO: 462710 - DNA, 1413 bp, Homo sapiens
atgcgcagggccgactgcattcccacggcgacggcctcctggcccgcatcatgactgttgttttcctcgcggtggccatagcttttggattttacattcagattggttcaaggggctttttcctttctctgtttgaaggaagccaccctctcgatccccagtcagcgtggcgtcctctcagcaacccgctcctggtcttgctttgactcctgtgctcccgggctgccgagaacacgtctggagcttttaaatcaggcttttaggttcatctctgtgaataatcatcacaaatatttactgagcatccttcatctcctggaagcctcgtggattatcttgctgaatcctcaccacagcagcccgctgagggaggtgctatcatcgtccctgtttttcaagggagagaatcaaggtttgggcagggacaaggtcttgctatgttgcccaagctgatcttgaactcctggcctcaagcaatcccaatagttcggtctcccaaattgctgagattgtgggtacaagccactgcacctggacttcttctgacattataaagcaaagagcattttcaaaagctgatgctacttgtgcatattccatatttgctgagcgcttactgtgtccccattaagtgccaggcacagttttcagcactgctttaaagtgtctacaagcttagaaagggcataggcatctcttgaaatccagtgttctagggaaagtttttcctgtggttttgcacagaacccaccgcttcctgtccaaggtgacagctttagctgggagagaaattaaaaatgcctccttggaatagctatctgatgtgtctaaatatgattgctgatgttagcaataggacctgcctattagcaatggtttgggcaactgtatgtgtgaggcagggagagaaagaggaagaaaatacagctctcactattgtttccaaatggcaagactgcccccccctcctagatcgtcattgctgtgtaacaaattgtcatacatttagcagtttaaaataccacacatttactcacagcttccatgggccacgagtgtggggacgagtgactgggtcgtctgctcagggtctcttacaagactccatcagcgtttcagctggggctggggtctcatctgaggctcagggtcctcactccaggtcacagggcagaattcatttctttcaagctacggatctcatggcagcttgctttttcaaggccagcaagggagagagtgaatctgctgcttttagtgtctgacctctcgatcttcttttaaatggctcatctgattagggcagacccacccaggataatctctcttttgactaacttacagtcaactcattagagatcctaattacatctgcaaaaatcccctcacctttgcctgataatgtgacatcat

SEQ ID NO: 462711 - DNA, 2530 bp, Homo sapiens
ggtccctggaccctgctgatcggaatagttgcactcaccgacgcagcagcagaaacacttgttttcctcctagaccacaatgaggaccaagaaagattctgaattctatgtctgtcatttcaggctggttaagaaccattgttggggagctagtggactcgtttggaggtgctctgggccgtggggctcccttaaggaaaggctacagcagggagatatgccacagcctttctggaatggtccttcagaaggaagctcaccccacttccaccctggcccaagaacctctcagaggtcagctaaggccagtgcctcccggaggtgcatagagatccctggagcgtggccatctatggctgctctctgctggagctgcccagtgaacaaacgctcccaggctccatgctgtctgaaggcttgtctctgcctgctccctaggaagatcctccagacaattcataagtccatgggggatgtggggtcccctgtagcaaggatcccagaggttcatgacaagtgtgagtcatccttcattcacttctttcccaggaaccattcaggttcaggagctagctctagcattcaggaaatgaagaagttttctaagtactttaaaaaaggaaagagagattgactcttcatattttcaagaagtaattgggagagttatgtgaactggaagaggcctcagatgtgaaatgaactaggcttcatgtaaatgaaaggtataatgatggctaaaacacgtacaaatcagatagcacctgcctgaagtacttagaccggggaaagaaggagaagaaagaagatagtgttcaaaatgtttgcttagatattgattagaaggtgaaatgtcaactgggctttcttgctagactgggtacctagcaaacgcgatcccatgaaataggcaaaaagaagtaaagaatatgcacatcaactattttatgtgacatggtctcaagttagcgattgatatactaagagtgtttgcctttgagatgtttttccccagtaatagtatctagattgcttgaagaaattactttaagtgctttaagaaaccacttaaaatctgataaattcactagatgaatagaatagaatgaaagaccaatgaattatgcttttaatgaatttattgcaactttgttgtcattttctacttcacacttctttttaccacgtatattttatagcaaaaacacacaatttttccgtgtgggtgagaatttgagttatagccacaatattattgttgaagtatgtttttcaaagttgtaggtctctattttaaacatcttttctgagaagataagtagctatgtgatttgcaaaatgcacagcttgtaagtcttgtaactttaaaatatttcccttctactctctgcctgcagcccttcatctctccgtttcttggtcaccagttgagtacaaactctctggttttaaaatgttatctatgtaaattcttctgccacagctggacaagatgcattcaagagtttttctgtttcctgtgtggtgaagcagctttcccctaacgactatttcccatcagtaccacaaagacctaccttcttaaccactgtttcaacggtttcttaccacttccacctttctgtagaacatttcatttggaaggagagtcacaaatacttgttcactgggctgttcagactgataacgtctcttgggacttgaacattgatgcacaattctcatctggaaaaaaaattcaactgtcaaacattggcaaagaataccagaaatgaaaacaaactcttttctgtcttagtgtcaccataagataatttgttttgctctcttagagaataaaattctttaccttttttctaaaaatcaaagtaaaaacatttcattatttgtctattttgcttactttagcaaaaattttaatacatttggattctaagcatgtgttttactgataaatgcattaaattgttattagaaactttagacctaagaatagaaaatcaaatgagattgacaaacatggtaacataggcttaattttttaataaggaatgagagaattctagtactttattctaatacaataaataatgtcaagacttttctttacatgttcaagatttttcatctaaaaaaagacccatgttaattattaactgcagaaacaaattataagtattatgtctacatttcttataaagaaataatatcttaatatagcctttaaaaatcataattattttacctgctcatttgtaaaatactaaatgtatttgaattatttttcataaattaaggaattataaaagtttaactgtcatttgtatattatatcttgatcttttcattcatttttattttctggatttatggtctttgttcttatggttttcattctgttatatgtttccaagatattttcaaatagagttttaactgagtgatgctagattagaacattttctagttcaaaatatttgatgattcaataacataaattatgttatggctcaaaattacccctcccctc

SEQ ID NO: 462712 - DNA, 2038 bp, Homo sapiens
ttcctaggtcctctgggactgtaggtgtcccttggcctctaccttcagcttcagcatgatgccaagtgacctcacccaggtgactgaagtgctcgtcattgttgggaacggggagggcccgagctcggaggcggcacatccaggggggacgccaagggagcaggacggagccatggaccccgccaggaaagcaggtgcccaggccatgatctggactgcaggctggctgctgctgctgctgcttcgcggaggagcgcaggccctggagtgctacagctgcgtgcagaaagcagatgacggatgctccccgaacaagatgaagacagtgaagtgcgcgccgggcgtggacgtctgcaccgaggccgtgggggcggtggagaccatccacggacaattctcgctggcagtgcggggttgcggttcgggactccccggcaagaatgaccgcggcctggatcttcacgggcttctggcgttcatccagctgcagcaatgcgctcaggatcgctgcaacgccaagctcaacctcacctcgcgggcgctcgacccggcaggtaatgagagtgcatacccgcccaacggcgtggagtgctacagctgtgtgggcctgagccgggaggcgtgccagggtacatcgccgccggtcgtgagctgctacaacgccagcgatcatgtctacaagggctgcttcgacggcaacgtcaccttgacggcagctaatgtgactgtgtccttgcctgtccggggctgtgtccaggatgaattctgcactcgggatggagtaacaggcccagggttcacgctcagtggctcctgttgccaggggtcccgctgtaactctgacctccgcaacaagacctacttctcccctcgaatcccaccccttgtccggctgccccctccagagcccacgactgtggcctcaaccacatctgtcaccacttctacctcggccccagtgagacccacatccaccaccaaacccatgccagcgccaaccagtcagactccgagacagggagtagaacacgaggcctcccgggatgaggagcccaggttgactggaggcgccgctggccaccaggaccgcagcaattcagggcagtatcctgcaaaaggggggccccagcagccccataataaaggctgtgtggctcccacagctggattggcagcccttctgttggccgtggctgctggtgtcctactgtgagcttctccacctggaaatttccctctcacctacttctctggccctgggtacccctcttctcatcacttcctgttcccaccactggactgggctggcccagcccctgtttttccaacattccccagtatccccagcttctgctgcgctggtttgcggctttgggaaataaaataccgttgtatatattctgccaggggtgttctagctttttgaggacagctcctgtatccttctcatccttgtctctccgcttgtcctcttgtgatgttaggacagagtgagagaagtcagctgtcacggggaaggtgagagagaggatgctaagcttcctactcactttctcctagccagcctggactttggagcgtggggtgggtgggacaatggctccccactctaagcactgcctcccctactccccgcatctttggggaatcggttccccatatgtcttccttactagactgtgagctcctcgagggcagggaccgtgccttatgtctgtgtgtgatcagtttctggcacataaatgcctcaataaagatttaattactttgtatagtgctttaaaggagtcacttccaccttgtttctcgcaataaccgctctagctgagctagggtgggcatcataaagcctttaacgggagagatatgggacctagagccgcagtcctgggggaagtcacggttgaactttaatctcctgggtctatcctgcatgtgggtggtcccactgataagtcttagtaaagctgtttttttttttttttttagaagaaaatatctgtctcccttttaccctccccaccttttactttgctct

SEQ ID NO: 462713 - DNA, 2195 bp, Homo sapiens
ttcctaggtcctctgggactgtaggtgtcccttggcctctaccttcagcttcagcatgatgccaagtgacctcacccaggtgactgaagtgctcgtcattgttgggaacggggagggcccgagctcggaggcggcacatccaggggggacgccaagggagcaggacggagccatggaccccgccaggaaagcaggtgcccaggccatgatctggactgcaggctggctgctgctgctgctgcttcgcggaggagcgcaggccctggagtgctacagctgcgtgcagaaagcagatgacggatgctccccgaacaagatgaagacagtgaagtgcgcgccgggcgtggacgtctgcaccgaggccgtgggggcggtggagaccatccacggacaattctcgctggcagtgcggggttgcggttcgggactccccggcaagaatgaccgcggcctggatcttcacgggcttctggcgttcatccagctgcagcaatgcgctcaggatcgctgcaacgccaagctcaacctcacctcgcgggcgctcgacccggcaggtaatgagagtgcatacccgcccaacggcgtggagtgctacagctgtgtgggcctgagccgggaggcgtgccagggtacatcgccgccggtcgtgagctgctacaacgccagcgatcatgtctacaagggctgcttcgacggcaacgtcaccttgacggcagctaatgtgactgtgtccttgcctgtccggggctgtgtccaggatgaattctgcactcgggatggagtaacaggcccagggttcacgctcagtggctcctgttgccaggggtcccgctgtaactctgacctccgcaacaagacctacttctcccctcgaatcccaccccttgtccggctgccccctccagagcccacgactgtggcctcaaccacatctgtcaccacttctacctcggccccagtgagacccacatccaccaccaaacccatgccagcgccaaccagtcagactccgagacagggagtagaacacgaggcctcccgggatgaggagcccaggttgactggaggcgccgctggccaccaggaccgcagcaattcagggcagtatcctgcaaaaggggggccccagcagccccataataaaggctgtgtggctcccacagctggattggcagcccttctgttggccgtggctgctggtgtcctactgtgagcttctccacctggaaatttccctctcacctacttctctggccctgggtacccctcttctcatcacttcctgttcccaccactggactgggctggcccagcccctgtttttccaacattccccagtatccccagcttctgctgcgctggtttgcggctttgggaaataaaataccgttgtatatattctgccaggggtgttctagctttttgaggacagctcctgtatccttctcatccttgtctctccgcttgtcctcttgtgatgttaggacagagtgagagaagtcagctgtcacggggaaggtgagagagaggatgctaagcttcctactcactttctcctagccagcctggactttggagcgtggggtgggtgggacaatggctccccactctaagcactgcctcccctactccccgcatctttggggaatcggttccccatatgtcttccttactagactgtgagctcctcgagggcagggaccgtgccttatgtctgtgtgtgatcagtttctggcacataaatgcctcaataaagatttaattactttgtataggtggaaaaaaaaaaaacaaaaacacaaaaaaaaaaacaaaaaaaaaaaaacgcgaggggggcggggccccaaaaaattcccccgcgggggccccccacttctttcggcgtgccccccgcgtttttttgataccaaaaaggggggggccccccataaatggggggcgcaccgctttctaacacacgaccaaagtgcagctcctagcacccatagctatcaacaacaacggcccttcggatagtgggggaaaccacatccgcacactccgggggacaatcctttttcatgaacagcagccccatacaacatcagcggggggcacgagcactctacttgcggagcacacactccccaaaacgagcgttttacaagccgtcgcaggcggactatttcaaacatttcaccgggttatatacgggg

SEQ ID NO: 462714 - DNA, 1620 bp, Homo sapiens
cgagggggctggtacggctccggaggtacgggcccgctcctccctgcttcggtcgttctttccgctctgagcggctctttgggggcgtccatccgccaattcctgcctgtcggtcctgtggtgttggcctatttgaggccccgcccctcccagaccctacccaactctgggccacgccccatctgagaccacgcccacagctaatcccgcccttgtccctctccctagtccacggacaattctcgctggcagtgcggggttgcggttcgggactccccggcaagaatgaccgcggcctggatcttcacgggcttctggcgttcatccagctgcagcaatgcgctcaggatcgctgcaacgccaagctcaacctcacctcgcgggcgctcgacccggcaggtaatgagagtgcatacccgcccaacggcgtggagtgctacagctgtgtgggcctgagccgggaggcgtgccagggtacatcgccgccggtcgtgagctgctacaacgccagcgatcatgtctacaagggctgcttcgacggcaacgtcaccttgacggcagctaatgtgactgtgtccttgcctgtccggggctgtgtccaggatgaattctgcactcgggatggagtaacaggcccagggttcacgctcagtggctcctgttgccaggggtcccgctgtaactctgacctccgcaacaagacctacttctcccctcgaatcccaccccttgtccggctgccccctccagagcccacgactgtggcctcaaccacatctgtcaccacttctacctcggccccagtgagacccacatccaccaccaaacccatgccagcgccaaccagtcagactccgagacagggagtagaacacgaggcctcccgggatgaggagcccaggttgactggaggcgccgctggccaccaggaccgcagcaattcagggcagtatcctgcaaaaggggggccccagcagccccataataaaggctgtgtggctcccacagctggattggcagcccttctgttggccgtggctgctggtgtcctactgtgagcttctccacctggaaatttccctctcacctacttctctggccctgggtacccctcttctcatcacttcctgttcccaccactggactgggctggcccagcccctgtttttccaacattccccagtatccccagcttctgctgcgctggtttgcggctttgggaaataaaataccgttgtatatattctgccaggggtgttctagctttttgaggacagctcctgtatccttctcatccttgtctctccgcttgtcctcttgtgatgttaggacagagtgagagaagtcagctgtcacggggaaggtgagagagaggatgctaagcttcctactcactttctcctagccagcctggactttggagcgtggggtgggtgggacaatggctccccactctaagcactgcctcccctactccccgcatctttggggaatcggttccccatatgtcttccttactagactgtgagctcctcgagggcagggaccgtgccttatgtctgtgtgtgatcagtttctggcacataaatgcctcaataaagatttaattactttgtatag

SEQ ID NO: 462715 - DNA, 323 bp, Homo sapiens
cgtctgcaccgaggccgtgggggcggtggagaccagtgagtggggacccccgggccacgcacaccactgcaggctcctccggcccagccccgcctccttatagtcctttctggatctggccacgcccctttaacgcggccccacccctccctttcagcctggccgggaccctacgacacagccttgcaggccaggccttctctattaacaattacaagcgcgaggagcagagagttgagaactgggtggggcggacggggagagctcgggtttggaacgaggtcacgtcctatgcactttttctgctccaccaatgagacctc

SEQ ID NO: 462716 - DNA, 363 bp, Homo sapiens
tacagtgggcatacagggctgtcggaaggatgtgcccacagttggcatagtgggtgtgaaggaaaagggtccagtgattcccgtgcttccagatttgtggaaagcttttccctactcctgccctggaaaagtgtgtgcaataagactgtctaatcccgggacagagggcatgggaaggactatttctccttgggggtggacgctttagcaaggagggctcaggtctattcggctccgctcccccaggagcgcaggccctggagtgctacagctgcgtgcagaaagcagatgacggatgctccccgaacaagatgaagacagtgaagtgcgcgccgggcgtggacgtctgcaccgaggccgtgg

SEQ ID NO: 462717 - DNA, 1775 bp, Homo sapiens
ttcctaggtcctctgggactgtaggtgtcccttggcctctaccttcagcttcagcatgatgccaagtgacctcacccaggtgactgaagtgctcgtcattgttgggaacggggagggcccgagctcggaggcggcacatccaggggggacgccaagggagcaggacggagccatggaccccgccaggaaagcaggtgcccaggccatgatctggactgcaggctggctgctgctgctgctgcttcgcggaggagcgcaggccctggagtgctacagctgcgtgcagaaagcagatgacggatgctccccgaacaagatgaagacagtgaagtgcgcgccgggcgtggacgtctgcaccgaggccgtgggggcggtggagaccatccacggacaattctcgctggcagtgcggggttgcggttcgggactccccggcaagaatgaccgcggcctggatcttcacgggcttctggcgttcatccagctgcagcaatgcgctcaggatcgctgcaacgccaagctcaacctcacctcgcgggcgctcgacccggcaggtaatgagagtgcatacccgcccaacggcgtggagtgctacagctgtgtgggcctgagccgggaggcgtgccagggtacatcgccgccggtcgtgagctgctacaacgccagcgatcatgtctacaagggctgcttcgacggcaacgtcaccttgacggcagctaatgtgactgtgtccttgcctgtccggggctgtgtccaggatgaattctgcactcgggatggagtaacaggcccagggttcacgctcagtggctcctgttgccaggggtcccgctgtaactctgacctccgcaacaagacctacttctcccctcgaatcccaccccttgtccggctgccccctccagagcccacgactgtggcctcaaccacatctgtcaccacttctacctcggccccagtgagacccacatccaccaccaaacccatgccagcgccaaccagtcagactccgagacagggagtagaacacgaggcctcccgggatgaggagcccaggttgactggaggcgccgctggccaccaggaccgcagcaattcagggcagtatcctgcaaaaggggggccccagcagccccataataaaggctgtgtggctcccacagctggattggcagcccttctgttggccgtggctgctggtgtcctactgtgagcttctccacctggaaatttccctctcacctacttctctggccctgggtacccctcttctcatcacttcctgttcccaccactggactgggctggcccagcccctgtttttccaacattccccagtatccccagcttctgctgcgctggtttgcggctttgggaaataaaataccgttgtatatattctgccaggggtgttctagctttttgaggacagctcctgtatccttctcatccttgtctctccgcttgtcctcttgtgatgttaggacagagtgagagaagtcagctgtcacggggaaggtgagagagaggatgctaagcttcctactcactttctcctagccagcctggactttggagcgtggggtgggtgggacaatggctccccactctaagcactgcctcccctactccccgcatctttggggaatcggttccccatatgtcttccttactagactgtgagctcctcgagggcagggaccgtgccttatgtctgtgtgtgatcagtttctggcacataaatgcctcaataaagatttaattactttgtatag

SEQ ID NO: 462718 - DNA, 1253 bp, Homo sapiens
acaccttttcttcctctcggctcccctcgcaggtaatgagagtgcatacccgcccaacggcgtggagtgctacagctgtgtgggcctgagccgggaggcgtgccagggtacatcgccgccggtcgtgagctgctacaacgccagcgatcatgtctacaagggctgcttcgacggcaacgtcaccttgacggcagctaatgtgactgtgtccttgcctgtccggggctgtgtccaggatgaattctgcactcgggatggagtaacaggcccagggttcacgctcagtggctcctgttgccaggggtcccgctgtaactctgacctccgcaacaagacctacttctcccctcgaatcccaccccttgtccggctgccccctccagagcccacgactgtggcctcaaccacatctgtcaccacttctacctcggccccagtgagacccacatccaccaccaaacccatgccagcgccaaccagtcagactccgagacagggagtagaacacgaggcctcccgggatgaggagcccaggttgactggaggcgccgctggccaccaggaccgcagcaattcagggcagtatcctgcaaaaggggggccccagcagccccataataaaggctgtgtggctcccacagctggattggcagcccttctgttggccgtggctgctggtgtcctactgtgagcttctccacctggaaatttccctctcacctacttctctggccctgggtacccctcttctcatcacttcctgttcccaccactggactgggctggcccagcccctgtttttccaacattccccagtatccccagcttctgctgcgctggtttgcggctttgggaaataaaataccgttgtatatattctgccaggggtgttctagctttttgaggacagctcctgtatccttctcatccttgtctctccgcttgtcctcttgtgatgttaggacagagtgagagaagtcagctgtcacggggaaggtgagagagaggatgctaagcttcctactcactttctcctagccagcctggactttggagcgtggggtgggtgggacaatggctccccactctaagcactgcctcccctactccccgcatctttggggaatcggttccccatatgtcttccttactagactgtgagctcctcgagggcagggaccgtgccttatgtctgtgtgtgatcagtttctggcacataaatgcctcaataaagatttaattactttgtatag

SEQ ID NO: 462719 - DNA, 2161 bp, Homo sapiens
tggcaggtcaattgcagggatgcctgctttgcctgttcactcacattacagcccaggactcagtcaaggatgcctactggaagcctgttcttcagctttgggactcagactggcttccttgctcctcagcttgcagatggcctattgtgggaccttgtgattgtctctttcagccctaccatttggcgggtcccgagttcttgtcctgcatccaggaagaatgaggtatgcagacaactggaagatggagtgaagcttgttgattaagaagattttgtcttccccctcgttgctgatctgctccttgagcaggcagatgaccttcctctggtccagcaccacctggatgttgaggtagatcacagccagcagcagggccaacaccaggaagacgaagaaggtgttttccaccaggtaccggtgcgcccagggcagccaggagcccctggggcccgctgcctccagttggggcacccacatcctgcgggcctcgtacatggtgtccagggtccggaaggggccgcagatggctgagggtgtagcagaggccagacggcatagcagaggaagaggtggcgcccaggaaagcggggaagcagagcagcgtgaggaagatggtgctcacgtgggaggccagccaaggccggagcagtgcctggcagttggccaaaaggctggtctacttgacgtagaagacgagcagcagcttgatgatctgcaccgcgtggaggagcggcgagaaagagcacccccagccaggtcagagtcggcccgacgagtccatcaccaggaacccatacagcacgggttcctcccagcactggccctgcagggcgcccaccctgcggccctgccagtggtagcacagtgtccccaggatggccagcttgaggatgaagttcctgcagatggccacgtacaactccagcaccggggagtcatgcagctccagggcggtcaggccaaggcacgggtaggggccccccaggttgagggggccgaccaccagaggcaggaccagcagcgcgggctcctggccagcagcctccggattctgcatcatgaactccgagaagatgtggacggccacagcgcagcccagcgcagtccccagacacaggagccacatgagccccagcatggccgcctgccgcagcctcccgcacacgctcctggggctctgccgcagctgctgctcgggccagcagctccttctcccgtggctgtaatacatgatgatgtgggtgaagcagcctgtgtctttgaggagctccaggccagagcagatgcgggcagggcccggcggggcgggcgtgaaggcggcctccgggcccacaatgaaggccacgagcagcagcagcaggaaggcgttgaaggccagcagggtcttaaggaagaggaagtaggagagcacgttggagctgaactagcccctgatgcgcttcaggacagcagcgccagccccaggctgtgcaaggccagcacacagacatatctgagccaaccacagcaggagcagactctgccatggccccgcaggctcctccacttcccgctctgggttcggctcttctctcgcaggccgcgtttctcagccaggcttaggggaatccctcgaagcacgtggtcccgctgcgccacagccaggccctggagctccttcaccaggaggctccgcttctcctcctcttcctcccaggacgtggggtccagcttcaggtcgtacagacgcaggctgtgccgggaggagcgcaccaagtctgcgagcaggggccggccaatggtgaggctgggaatgctggccaggacgcagagtgtggccgtgctgtgggtgccctcgggccccaagagtgtctgctggccactcgctgtggccaccacccctctccctctgctacagctccagcccctcctgggcctcccagcggctctgctcttggatgagcaagtggaaggagtagtgcatttcagtctcatcaacctccttaatatgaaagagggtatctatagcaaaacctctatcaaacctcatactttaatgtgcgaggaatgcttctaaactttggaagcattttatttaacagtagtaactaaacgagccaataaaatgggggtacttctgtcaccatcaatgctcaccatgatattagaggtcccgatc

SEQ ID NO: 462720 - DNA, 423 bp, Homo sapiens
aatcatatccatgtcaggcggcaccaaacctaaatctgctttgcctcagcagacaggacatgttgagtttggccagtgagtgctgcaggatactggagggagggcaacagagaggaaggtcacctacatgtctatgttcagaagctgccttgatgccacatgcgggaggctggaaacgctgaaggatgaccactgctcagcagcagtctaccagtgatggatgagagttggtgcacaaataccccagctcccttgcctctcagtttggataatcctgaaaaggtgtgtactatgctatttctgagattaagccctagttacccatagtggtagctaaatatagtagttggctgtattctccatcacttcttgaatcccctgccagtgttctctgcacctccttaataaaccacttgaaacaaa

SEQ ID NO: 462721 - DNA, 1754 bp, Homo sapiens
agaaacaaagtggatgcccaaccaagaaaaagtcatactgaaatggaaacccctgcctccttgagcctgaaagccttgggatttctggccctgtcaaggttaattagggactcctgtacaaacgaagcctgcagtctatcaaatgtgcagacgtatgtggttggcagtgagtggggctatggcttagcaagtactggagtctcattatggagacacatgatccttgtgtgctttgctaggagaaaaccagaccctatcttttttctccccttttccctgtgtttccaattggtctgcagccctgagattgctcatagggagagaaaggtgaaagtacataaaaatttgattttcttagatgcagaattgtatgtccagttaatgtttaaaacttttaaggctttggtctcagagacctaggctgggagcaggagacatttattcaggtctttacacataaacatgtttcagctcattcccctgctctgtgaagaacacaagttggttcttaaccttttctctcatcgcagatccctttggaaatctaaagaagccatggatcctcaggaagtgaataagtgcaacttatgtcttagccacattaaaacttcgtttttatctcactattcctttacagtataaatcactggggacattttccccctgtacatagatgtaaatcctaacagattctatttcccaggatgtaagtcctaacagattccttcacacctgaatattatgcctgtagtcactttatgttaaagcataggtttcatttagaagtcagaatatccaagatattaaccttaactccaaactttatttatagtgtgttctttctcagtttgggcctgcttgtttggaaggctcaaaaagggaaggagggaagtaaggtgataggaaagttcttactggagctggccttatgttctagttgtggaagatgtttggagtagactcctttccttgtccttggagctttggagcttcttgctgggcaccacctgagtctacagtatttgtgatgtgggccaggaacattctctttacatggcttctgggagcctcttaaggtctagattttagatccttgctctcaaattttctagacctgtggcagaagctcttgggcaggtgatatggtttggctgtgtccccacccaaatctcactttgaatggtaataatgcccacacatcaaggcagggccaggtggagataattgaatcatgggggttgtttctcccatactgttctcatggtagtgaataagcctcatgagatctgatggttttcttagagactggcagatgagtcatacatgataaataaatgtaagacaaagactacaatcagtaccataaaaaagtatatcatagacatgtttgatccgagacggaaggttccagagtaagtgacaactaagcagagatcttaaagatgtgggaacacctacatgtctatgttcagaagctgccttgatgccacatgcgggaggctggaaacgctgaaggatgaccactgctcagcagcagtctaccagtgatggatgagagttggtgcacaaataccccagctcccttgcctctcagtttggataatcctgaaaaggtgtgtactatgctatttctgagattaagccctagttacccatagtggtagctaaatatagtagttggctgtattctccatcacttcttgaatcccctgccagtgttctctgcacctccttaataaaccacttgaaacaaa

SEQ ID NO: 462722 - DNA, 2006 bp, Homo sapiens
agaaacaaagtggatgcccaaccaagaaaaagtcatactgaaatggaaacccctgcctccttgagcctgaaagccttgggatttctggccctgtcaaggttaattagggactcctgtacaaacgaagcctgcagtctatcaaatgtgcagacgtatgtggttggcagtgagtggggctatggcttagcaagtactggagtctcattatggagacacatgatccttgtgtgctttgctaggagaaaaccagaccctatcttttttctccccttttccctgtgtttccaattggtctgcagccctgagattgctcatagggagagaaaggtgaaagtacataaaaatttgattttcttagatgcagaattgtatgtccagttaatgtttaaaacttttaaggctttggtctcagagacctaggctgggagcaggagacatttattcaggtctttacacataaacatgtttcagctcattcccctgctctgtgaagaacacaagttggttcttaaccttttctctcatcgcagatccctttggaaatctaaagaagccatggatcctcaggaagtgaataagtgcaacttatgtcttagccacattaaaacttcgtttttatctcactattcctttacagtataaatcactggggacattttccccctgtacatagatgtaaatcctaacagattctatttcccaggatgtaagtcctaacagattccttcacacctgaatattatgcctgtagtcactttatgttaaagcataggtttcatttagaagtcagaatatccaagatattaaccttaactccaaactttatttatagtgtgttctttctcagtttgggcctgcttgtttggaaggctcaaaaagggaaggagggaagtaaggtgataggaaagttcttactggagctggccttatgttctagttgtggaagatgtttggagtagactcctttccttgtccttggagctttggagcttcttgctgggcaccacctgagtctacagtatttgtgatgtgggccaggaacattctctttacatggcttctgggagcctcttaaggtctagattttagatccttgctctcaaattttctagacctgtggcagaagctcttgggcaggtgatatggtttggctgtgtccccacccaaatctcactttgaatggtaataatgcccacacatcaaggcagggccaggtggagataattgaatcatgggggttgtttctcccatactgttctcatggtagtgaataagcctcatgagatctgatggttttcttagagactggcagatgagtcatacatgataaataaatgtaagacaaagactacaatcagtaccataaaaaagtatatcatagacatgtttgatccgagacggaaggttccagagtaagtgacaactaagcagagatcttaaagatgtgggaacacctacatgtctatgttcagaagctgccttgatgccacatgcgggaggctggaaacgctgaaggatgaccactgctcagcagcagtctaccagtgatggatgagagttggtgcacaaataccccagctcccttgcctctcagtttggataatcctgaaaagacccagcaagaaatgattccaagatcacctagctgatctcatgctctatctggatttgagtgaagatatacatattcaccaagtcttgactcagtcaccttttgtgcaggcccaatagaagcaaatgcaggtatgatctggagaagcatatcttgaatctcaaaaagtcaggacagacaacaccataagaaacagcagggggaaaagaaaaaagcagaatcaggctcagaactacagacaccttcagagggcagtgttccattttattgagggagatctgaagagatgaagtgacttgccagagcacaggtccagtaagtgtcaggtttcaagttctttgagttgagattcagtcatttgaaagccatttatctagtggaataacaccctggg

SEQ ID NO: 462723 - DNA, 480 bp, Homo sapiens
  misc_feature (67)..(67): n is a, c, g, or t
catcatgatgatacgggcaacagtcccttccatacacctttaaatccaagtctcttgaggaccaganaagctgctgggaaaattgtgtgagcagaacaaggtggtgagggagcaggaccggctggtgcagcagctccgagctgagaaggagagcctggaaagtgccttgatggggacccaccaggagctggagatgtttggaagccagcccgcctacccagaaaagctgcgacacaaaaaggattcactgcagaaccagctcatcaacatccgcgtggagctgtctcaggcgaccacggtaacccagggagcggggttcgtgcaccccacctcatcagcactaggcagcagggccaccacctcccagcttgtgctgtcctagtccagttttcctcagaggacaagagctgagtactcccgtgcagaggggcataaacaaagacctcaatattgccctgcaaataaatagcaagtcagcca

SEQ ID NO: 462724 - DNA, 539 bp, Homo sapiens
ctctgcgggggctgtctctccatctctctctctccttctggtggcttttcatacctttgattcatgtcttctctcaccacaacaagattctgcctacctcctcctcatcccccttcttttctgatctaccacccactcacccttccctcccatgctggctgtatccatttctccactgagcgctgggccgttttgcctacggcagtgagatctgcttgtaacatgaatgcagactttgttgggagatagatcagtcagtctattctgtgcccagcatggcattagtccctacaggtaactagaaaggagaatacggctatgcccctgccttcagggagcttcagggtagtgggaagtgccaggtagcagcaggaggtggcaacacggtattcatgtagtgaaggggagccataataggttctgccaggtgcagggaagtgaggccgtgtgggctgaaggtcagggacaaaacaagcagcatgtgagttaggccttgaagttaaaaggcccagagggtaaaatctggctcagtggaaagg

SEQ ID NO: 462725 - DNA, 550 bp, Homo sapiens
taggggggatagggttgtggtcaagggcgctaacttcgggtccaaatagacccatattgagatgatggtcatgctgcttactaaatagatggccttgggtgtaagtctcttcatctctgaagaggggatagctgctgcccttatctcctagagtcatgcagccgaaatgagttagcactgtatatgcaaattgcttagcatagtgcctggtgctgagggatgctaaataaatggaaggtcttaccttttagactgtcaactgtaattgaattcatgactcttcaggcgtacgctgggagtgggtattagaaaagggctgtttggatgtgaagaaaagcagtaaaatggaagctcttgccccacgaaaaacaggataccataaagtgttcacttagatgggcattcactcgaaaaccacccatctttcccctgagggagctcggaagggtgcgtcctcagtcttggttcagaaactcgggcaattctggggtgccatctcctagaggctgaagagcagaggcagcccatgggaaagatgactgctggaggg

SEQ ID NO: 462726 - DNA, 461 bp, Homo sapiens
tgcctcctgctggcccaaagggatgtgggttccaaggggtctgggctgagagaaagggctggacactcctcatggccatttcctttgactcactgtgtggctgcttcagaatgaggtgctgaaccggcaaatccaaaaggagatctggaggatccaggacgtgatggaggggctgaggaagaacaacccctcccggggcacggacaccgccaagcacagaggtgggtgcctcctgtgccagcctcctaggctgcctgcctcaccaggagtgctccagtatttctgacctccatcccactcctgccagctcacactgtgttctagggtggtaggtaggggtcccttaccccccacagaatagaccaaataaacaactcagagacactgttgaccctgacactctaaagtcctccccagaaaaggtcaaaagcacctaagcctccccagcccccaagcaaggg

SEQ ID NO: 462727 - DNA, 348 bp, Homo sapiens
gggaggcttaggtgcttttgaccttttctgggaaggtcttaccttttagactgtcaactgtaattgaattcatgactcttcaggcgtacgctgggagtgggtattagaaaagggctgtttggatgtgaagaaaagcagtaaaatggaagctcttgccccacgaaaaacaggataccataaagtgttcacttagatgggcattcactcgaaaaccacccatctttcccctgagggagctcggaagggtgcgtcctcagtcttggttcagaaactcgggcaattctggggtgccatctcctagaggctgaagagcagaggcagcccatgggaaagatgactgctggaggg

SEQ ID NO: 462728 - DNA, 3206 bp, Homo sapiens
gacatgtccaataaaacaggtgggaaacgcccggctaccaccaacagtgacatacccaaccacaacatggtgtccgaggtccctccagagcggcccagcgtccggttgctgagtgcttgttatggctggataccttgctggctctggtgataaagagatgaaaaagacaaaagttcctccctgcaaagagctcatggtgcaatggaagagatagaaagctgcattgtgacaggcaactcgcacagcccgcaaagccgtcgcctttggcaagcgctcacactccatgaagcggaaccccaatgcacctgtcaccaaggcgggctggctcttcaaacaggccagctccggggttaagcagtggaacaagcgctggttcgtcctggtggatcgctgcctcttctactataaagatgagaaggaagagagtatcctgggcagcatccccctcctgagcttccgggtagccgcagtgcagccctcagacaacatcagccggaaacacacgtttaaggtgactgtgtgctgggtggatgaggccgaggccagctccacacgctgcctctccccacaggctgagcatgccggggtccgcacctacttcttcagtgccgagagccccgaggagcaagaggcctggatccaggccatgggggaggctgctcgagtacagatccctccagcccagaagtcagtgccccaagctgtgcggcacagccatgagaagccagactcggagaacgtcccacccagcaagcaccaccagcagccaccccacaacagcctccctaagcctgagccagaggccaagactcgaggggagggtgatggccgaggctgtgagaaggcagagagaaggcctgagaggccagaagtcaagaaagagcctccggtgaaagccaatggcctcccagctggaccggagccagcctcagagccgggcagcccttaccccgagggcccaagagtgccagggggtggggaacagcctgcccagcccaatggctggcagtaccactccccaagccggccagggagcacagctttcccgtctcaggatggagagactgggggacaccggcggagtttcccaccacgcaccaaccctgacaaaattgcccagcgcaagagctccatgaaccagcttcagcagtgggtgaatctgcgccggggggtacccccgcctgaagaccttcggagtccctctaggttctatcctgtgtctcgcagggtccctgagtactatggcccctactcctcccagtaccccgatgattatcagtactacccgccaggagtgcggccggagagcatctgttccatgccggcctatgatcggatcagcccgccctgggccctggaggacaagcgccatgccttccgcaatgggggtggccctgcctaccagctgcgagagtggaaggagcccgccagctacgggcggcaggatgccaccgtctggatcccaagcccctcccggcagccagtctattatgatgagctggatgccgcctctagctccctgcgccgcctgtccctgcagccccgctcccactctgtgccccgctcacccagccagggctcctacagccgtgcccgcatttactcccctgtccgctcacccagtgcccgttttgagcggctgccacctcgcagtgaggacatctatgctgaccctgctgcctatgtgatgaggcgatccatcagctcccccaaggtccctccatacccagaagtgttccgggacagcctccacacctacaagttaaacgagcaagacacagataagctgctgggaaaattgtgtgagcagaacaaggtggtgagggagcaggaccggctggtgcagcagctccgagctgagaaggagagcctggaaagtgccttgatggggacccaccaggagctggagatgtttggaagccagcccgcctacccagaaaagctgcgacacaaaaaggattcactgcagaaccagctcatcaacatccgcgtggagctgtctcaggcgaccacggccctgacaaacagcaccatagagtatgagcacctcgagtctgaggtctctgccctgcacgatgacctctgggagcagctcaatttggacacccagaatgaggtgctgaaccggcaaatccaaaaggagatctggaggatccaggacgtgatggaggggctgaggaagaacaacccctcccggggcacggacaccgccaagcacagaggaggacttggcccctcagccacctacagctccaacagcccggccagccccctcagctctgccagcctcaccagccccctgagccccttttcactggtgtcgggctctcaggggtcccccaccaagcctggctccaacgagcccaaggcaaactatgaacaaagcaagaaagacccccaccagacattgcccctggacacccccagagacatcagccttgtgcccaccaggcaagaggtagaggcagagaagcaggcagctctcaacaaaggtgggtacctctgcaagctcatgcaggcctgagctgggctgcgagcccaggggcctgtgtgtgtacctactcatctccctctgctgttcaagaaattcagggctggagaggaaggtggaacacgtgagaggaggggcaagagccccactggaggaggagctctcctgcagggagatgtgtcaggggatgaggaagctatgctgcattggtcagggttctctagagggacagaactaataagatatataatatatatgtgtaaaggggagtttagtaagtattaacttacatgctgacaaggtcccacaataggctgtctacaagctgaggagcaagaagagccagtctgagttccaaaactgaagaacttggagtccgatgtttgagggcaggaagcatccagcacgggagaaaaatgtaggctgggaggctaggccagtctctccttttcatgtttttctgcctgctttatattcactggcagctgattagattgtgcccaccagattaagggtagctctgccttccccagcatgttaatctgttttggcaacaccctcacagacacacccaggatcaatactttgtatccttcaatccagccaagttgacactcaatattaatcatcacaagtccaccccttgtcaacttgaacccatacacatctcctgagatcatacataatcttcaaataaagacaataataaggtcat

SEQ ID NO: 462729 - DNA, 3146 bp, Homo sapiens
  misc_feature (61)..(61): n is a, c, g, or t
  misc_feature (151)..(151): n is a, c, g, or t
  misc_feature (157)..(157): n is a, c, g, or t
gctcttgcgctgggcaattttgtcagggttggtgcgtggtgggaaactccgccggtgtccnccagtctctccatcctgagacgggaaagctgtgctccctggccggcttggggagtggtactgccagccattgggctgggcaggctgttcnccaccncctggcactcttgggccctcggggtaaggactgcccggctctgaggctggctccggtccagctgggaggccattggctttcaccgtcgtcttctgtctctccctttggtgtttggttgacctgttctctgcttctcctccttctgaccgcgtgaggacccctcctctggacaggagctctcttctgggttcccgcccgcagtacctgctcgcagccaccaactaggtgactgtgtgctgggtggatgaggccgaggccagctccacacgctgcctctccccacaggctgagcatgccggggtccgcacctacttcttcagtgccgagagccccgaggagcaagaggcctggatccaggccatgggggaggctgctcgagtacagatccctccagcccagaagtcagtgccccaagctgtgcggcacagtctggcaccccctgccccactccatgctgggctagagtcactgacagcatctcccttggcatcctgcagccatgagaagccagactcggagaacgtcccacccagcaagcaccaccagcagccaccccacaacagcctccctaagcctgagccagaggccaagactcgaggggagggtgatggccgaggctgtgagaaggcagagagaaggcctgagaggccagaagtcaagaaagagcctccggtgaaagccaatggcctcccagctggaccggagccagcctcagagccgggcagcccttaccccgagggcccaagagtgccagggggtggggaacagcctgcccagcccaatggctggcagtaccactccccaagccggccagggagcacagctttcccgtctcaggatggagagactgggggacaccggcggagtttcccaccacgcaccaaccctgacaaaattgcccagcgcaagagctccatgaaccagcttcagcagtgggtgaatctgcgccggggggtacccccgcctgaagaccttcggagtccctctaggttctatcctgtgtctcgcagggtccctgagtactatggcccctactcctcccagtaccccgatgattatcagtactacccgccaggagtgcggccggagagcatctgttccatgccggcctatgatcggatcagcccgccctgggccctggaggacaagcgccatgccttccgcaatgggggtggccctgcctaccagctgcgagagtggaaggagcccgccagctacgggcggcaggatgccaccgtctggatcccaagcccctcccggcagccagtctattatgatgagctggatgccgcctctagctccctgcgccgcctgtccctgcagccccgctcccactctgtgccccgctcacccagccagggctcctacagccgtgcccgcatttactcccctgtccgctcacccagtgcccgttttgagcggctgccacctcgcagtgaggacatctatgctgaccctgctgcctatgtgatgaggcgatccatcagctcccccaaggtccctccatacccagaagtgttccgggacagcctccacacctacaagttaaacgagcaagacacagataagctgctgggaaaattgtgtgagcagaacaaggtggtgagggagcaggaccggctggtgcagcagctccgagctgagaaggagagcctggaaagtgccttgatggggacccaccaggagctggagatgtttggaagccagcccgcctacccagaaaagctgcgacacaaaaaggattcactgcagaaccagctcatcaacatccgcgtggagctgtctcaggcgaccacggccctgacaaacagcaccatagagtatgagcacctcgagtctgaggtctctgccctgcacgatgacctctgggagcagctcaatttggacacccagaatgaggtgctgaaccggcaaatccaaaaggagatctggaggatccaggacgtgatggaggggctgaggaagaacaacccctcccggggcacggacaccgccaagcacagaggaggacttggcccctcagccacctacagctccaacagcccggccagccccctcagctctgccagcctcaccagccccctgagccccttttcactggtgtcgggctctcaggggtcccccaccaagcctggctccaacgagcccaaggcaaactatgaacaaagcaagaaagacccccaccagacattgcccctggacacccccagagacatcagccttgtgcccaccaggcaagaggtagaggcagagaagcaggcagctctcaacaaaggtgggtacctctgcaagctcatgcaggcctgagctgggctgcgagcccaggggcctgtgtgtgtacctactcatctccctctgctgttcaagaaattcagggctggagaggaaggtggaacacgtgagaggaggggcaagagccccactggaggaggagctctcctgcagggagatgtgtcaggggatgaggaagctatgctgcattggtcagggttctctagagggacagaactaataagatatataatatatatgtgtaaaggggagtttagtaagtattaacttacatgctgacaaggtcccacaataggctgtctacaagctgaggagcaagaagagccagtctgagttccaaaactgaagaacttggagtccgatgtttgagggcaggaagcatccagcacgggagaaaaatgtaggctgggaggctaggccagtctctccttttcatgtttttctgcctgctttatattcactggcagctgattagattgtgcccaccagattaagggtagctctgccttccccagcatgttaatctgttttggcaacaccctcacagacacacccaggatcaatactttgtatccttcaatccagccaagttgacactcaatattaatcatcacaagtccaccccttgtcaacttgaacccatacacatctcctgagatcatacataatcttcaaataaagacaataataaggtcat

SEQ ID NO: 462730 - DNA, 2172 bp, Homo sapiens
gacatgtccaataaaacaggtgggaaacgcccggctaccaccaacagtgacatacccaaccacaacatggtgtccgaggtccctccagagcggcccagcgtccggttgctgagtgcttgttatggctggataccttgctggctctggtgataaagagatgaaaaagacaaaagttcctccctgcaaagagctcatggtgcaatggaagagatagaaagctgcattgtgacaggcaactcgcacagcccgcaaagccgtcgcctttggcaagcgctcacactccatgaagcggaaccccaatgcacctgtcaccaaggcgggctggctcttcaaacaggccagctccggggttaagcagtggaacaagcgctggttcgtcctggtggatcgctgcctcttctactataaagatgagaaggaagagagtatcctgggcagcatccccctcctgagcttccgggtagccgcagtgcagccctcagacaacatcagccggaaacacacgtttaaggtgactgtgtgctgggtggatgaggccgaggccagctccacacgctgcctctccccacaggctgagcatgccggggtccgcacctacttcttcagtgccgagagccccgaggagcaagaggcctggatccaggccatgggggaggctgctcgagtacagatccctccagcccagaagtcagtgccccaagctgtgcggcacagccatgagaagccagactcggagaacgtcccacccagcaagcaccaccagcagccaccccacaacagcctccctaagcctgagccagaggccaagactcgaggggagggtgatggccgaggctgtgagaaggcagagagaaggcctgagaggccagaagtcaagaaagagcctccggtgaaagccaatggcctcccagctggaccggagccagcctcagagccgggcagcccttaccccgagggcccaagagtgccagggggtggggaacagcctgcccagcccaatggctggcagtaccactccccaagccggccagggagcacagctttcccgtctcaggatggagagactgggggacaccggcggagtttcccaccacgcaccaaccctgacaaaattgcccagcgcaagagctccatgaaccagcttcagcagtgggtgaatctgcgccggggggtacccccgcctgaagaccttcggagtccctctaggttctatcctgtgtctcgcagggtccctgagtactatggcccctactcctcccagtaccccgatgattatcagtactacccgccaggagtgcggccggagagcatctgttccatgccggcctatgatcggatcagcccgccctgggccctggaggacaagcgccatgccttccgcaatgggggtggccctgcctaccagctgcgagagtggaaggagcccgccagctacgggcggcaggatgccaccgtctggatcccaagcccctcccggcagccagtctattatgatgagctggatgccgcctctagctccctgcgccgcctgtccctgcagccccgctcccactctgtgccccgctcacccagccagggctcctacagccgtgcccgcatttactcccctgtccgctcacccagtgcccgttttgagcggctgccacctcgcagtgaggacatctatgctgaccctgctgcctatgtgatgaggcgatccatcagctcccccaaggtccctccatacccagaagtgttccgggacagcctccacacctacaagttaaacgagcaagacacagataagctgctgggaaaattgtgtgagcagaacaaggtggtgagggagcaggaccggctggtgcagcagctccgagctgagaaggagagcctggaaagtgccttgatggggacccaccaggagctggagatgtttggaagccagcccgcctacccagaaaagctgcgacacaaaaaggattcactgcagaaccagctcatcaacatccgcgtggagctgtctcaggcgaccacggattggccggttgtggtggcacacacctgtagtcccagataggaggctgaggcaggagaattgcttgaacccatgaggcggaggttgccgtgagccgagatcgcaccattgcactccagcctgggcaacaagagtgaaactccatctcaaaaaaaaaa

SEQ ID NO: 462731 - DNA, 2196 bp, Homo sapiens
gacatgtccaataaaacaggtgggaaacgcccggctaccaccaacagtgacatacccaaccacaacatggtgtccgaggtccctccagagcggcccagcgtccggttgctgagtgcttgttatggctggataccttgctggctctggtgataaagagatgaaaaagacaaaagttcctccctgcaaagagctcatggtgcaatggaagagatagaaagctgcattgtgacaggcaactcgcacagcccgcaaagccgtcgcctttggcaagcgctcacactccatgaagcggaaccccaatgcacctgtcaccaaggcgggctggctcttcaaacaggccagctccggggttaagcagtggaacaagcgctggttcgtcctggtggatcgctgcctcttctactataaagatgagaaggaagagagtatcctgggcagcatccccctcctgagcttccgggtagccgcagtgcagccctcagacaacatcagccggaaacacacgtttaaggtgactgtgtgctgggtggatgaggccgaggccagctccacacgctgcctctccccacaggctgagcatgccggggtccgcacctacttcttcagtgccgagagccccgaggagcaagaggcctggatccaggccatgggggaggctgctcgagtacagatccctccagcccagaagtcagtgccccaagctgtgcggcacagccatgagaagccagactcggagaacgtcccacccagcaagcaccaccagcagccaccccacaacagcctccctaagcctgagccagaggccaagactcgaggggagggtgatggccgaggctgtgagaaggcagagagaaggcctgagaggccagaagtcaagaaagagcctccggtgaaagccaatggcctcccagctggaccggagccagcctcagagccgggcagcccttaccccgagggcccaagagtgccagggggtggggaacagcctgcccagcccaatggctggcagtaccactccccaagccggccagggagcacagctttcccgtctcaggatggagagactgggggacaccggcggagtttcccaccacgcaccaaccctgacaaaattgcccagcgcaagagctccatgaaccagcttcagcagtgggtgaatctgcgccggggggtacccccgcctgaagaccttcggagtccctctaggttctatcctgtgtctcgcagggtccctgagtactatggcccctactcctcccagtaccccgatgattatcagtactacccgccaggagtgcggccggagagcatctgttccatgccggcctatgatcggatcagcccgccctgggccctggaggacaagcgccatgccttccgcaatgggggtggccctgcctaccagctgcgagagtggaaggagcccgccagctacgggcggcaggatgccaccgtctggatcccaagcccctcccggcagccagtctattatgatgagctggatgccgcctctagctccctgcgccgcctgtccctgcagccccgctcccactctgtgccccgctcacccagccagggctcctacagccgtgcccgcatttactcccctgtccgctcacccagtgcccgttttgagcggctgccacctcgcagtgaggacatctatgctgaccctgctgcctatgtgatgaggcgatccatcagctcccccaaggtccctccatacccagaagtgttccgggacagcctccacacctacaagttaaacgagcaagacacagataagctgctgggaaaattgtgtgagcagaacaaggtggtgagggagcaggaccggctggtgcagcagctccgagctgagaaggagagcctggaaagtgccttgatggggacccaccaggagctggagatgtttggaagccagcccgcctacccagaaaagctgcgacacaaaaaggattcactgcagaaccagctcatcaacatccgcgtggagctgtctcaggcgaccacggtaacccagggagcggggttcgtgcaccccacctcatcagcactaggcagcagggccaccacctcccagcttgtgctgtcctagtccagttttcctcagaggacaagagctgagtactcccgtgcagaggggcataaacaaagacctcaatattgccctgcaaataaatagcaagtcagcca

SEQ ID NO: 462732 - DNA, 340 bp, Homo sapiens
agcagaacaaggtggtgagggagcaggaccggctggtgcagcagctccgagctgagaaggtgagaagctgggggtggctttaagctggggcagatgggcgaggctggcttggagaaggttgtgggctgctgtctccaacctgactgagatgacaaagcaaggacagcttccactcagctgcctgttgaacctctaagggctcaggcctctgctgttcaatcccagagaggagctgtcagggctgctcatgtcattcccctgcctttcttcaggagagcctggaaagtgccttgatggggacccaccaggagctggagatgtttggaagccagcccgccta

SEQ ID NO: 462733 - DNA, 476 bp, Homo sapiens
ccaggggatgtggaatgagctcaggtccctggaacagaagctaccagaggtgacggaccatggtctctggcaggagcacagcgggattgtgatgttagcttcctatccctgcataccctcatcctgcccctgctgcagtaaccggcctcatgttcctgcaggtccctccatacccagaagtgttccgggacagcctccacacctacaagttaaacgagcaagacacagatgtaagagcagcgccccctgctccctccctccactccagcctcctgctgctgtcctctgcggggggctgtctctccatccatctctcttcctctgcgggggctgtctctccatctctctctctccttctggtggcttttcatacctttgattcatgtcttctctcaccacaacaagattctgcctacctcctcctcatcccccttcttttctgatctaccacccactcacccttccctcccatgctg

SEQ ID NO: 462734 - DNA, 790 bp, Homo sapiens
aggataccataaagtgttcacttagatgggcattcactcgaaaaccacccatctttcccctgagggagctcggaagggtgcgtcctcagtcttggttcagaaactcgggcaattctggggtgccatctcctagaggctgaagagcagaggcagcccatgggaaagatgactgctggaggggcatgtgtgtgtgtgtgtgtgtgtgtgtgtgtgtacacagggtgcctgcctcctgctggcccaaagggatgtgggttccaaggggtctgggctgagagaaagggctggacactcctcatggccatttcctttgactcactgtgtggctgcttcagaatgaggtgctgaaccggcaaatccaaaaggagatctggaggatccaggacgtgatggaggggctgaggaagaacaacccctcccggggcacggacaccgccaagcacagaggtgggtgcctcctgtgccagcctcctaggctgcctgcctcaccaggagtgctccagtatttctgacctccatcccactcctgccagctcacactgtgttcagagccaggcagggccttcttgggacaccagaatcttcccctgggttctagggtggtaggtaggggtcccttaccccccacagaatagaccaaataaacaactcagagacactgttgaccctgacactctaaagtcctccccagaaaaggtcaaaagcacctaagcctccccagcccccaagcaaggggcccacttgtgacatgtgacccctaccttagagttttccttgagccctgggacct

SEQ ID NO: 462735 - DNA, 248 bp, Homo sapiens
atggtgcaatggaagagatagaaagctgcattgtgacaggttttaggcaaggggtgtccaatcttttggcttccctgggccacactggaagaagaaagattgtcttgggccacacataaaatacactaacacaaacaatatctgatgaactaagaaaaaaaaatcataatgttttaagaaagtttgtgttgggctgcattcaaagccatcctgggctgcgtgtggcccacgggccatggcttggactg

SEQ ID NO: 462736 - DNA, 373 bp, Homo sapiens
cagtgaagaccagagcaaaaccacaacttgtctgcagttgcagagctggtcaggagcagagccaggcttagcactgcgattccctgactcactctccaccaccagcctgaatttccctggtgcaagctctccactccccaccccttggtaggcagaactgggcattgttgggtgctgccattcccgggggaatgctgagtagaagaggacaatctgaatattcccccttccctgtgctcctcaccgtttcctgccacgtcgtcttctgtctctccctttggtgtttggttgacctgttctctgcttctcctccttctgaccgcgtgaggacccctcctctggacaggagctctcttctgggttcccgcccgca

SEQ ID NO: 462737 - DNA, 706 bp, Homo sapiens
gacatgtccaataaaacaggtgggaaacgcccggctaccaccaacagtgacatacccaaccacaacatggtgtccgaggtccctccagagcggcccagcgtccggttgctgagtgcttgttatggctggataccttgctggctctggtgataaagagatgaaaaagacaaaagttcctccctgcaaagagctcatggtgcaatggaagagatagaaagctgcattgtgacaggcaactcgcacagcccgcaaagccgtcgcctttggcaagcgctcacactccatgaagcggaaccccaatgcacctgtcaccaaggcgggctggctcttcaaacaggccagctccggggttaagcagtggaacaagcgctggttcgtcctggtggatcgctgcctcttctactataaagatgagaaggaagagagtatcctgggcagcatccccctcctgagcttccgggtagccgcagtgcagccctcagacaacatcagccggaaacacacgtttaaggctgagcatgccggggtccgcacctacttcttcagtgccgagagccccgaggagcaagaggcctggatccaggccatgggggaggctgctcgagtacagatccctccagcccagaagtcagtgccccaagctgtgcggcacagtccatgagaagccagatacggagacggtcccacccacaaccaccttaagctc

SEQ ID NO: 462738 - DNA, 3275 bp, Homo sapiens
gacatgtccaataaaacaggtgggaaacgcccggctaccaccaacagtgacatacccaaccacaacatggtgtccgaggtccctccagagcggcccagcgtccggttgctgagtgcttgttatggctggataccttgctggctctggtgataaagagatgaaaaagacaaaagttcctccctgcaaagagctcatggtgcaatggaagagatagaaagctgcattgtgacaggcaactcgcacagcccgcaaagccgtcgcctttggcaagcgctcacactccatgaagcggaaccccaatgcacctgtcaccaaggcgggctggctcttcaaacaggccagctccggggttaagcagtggaacaagcgctggttcgtcctggtggatcgctgcctcttctactataaagatgagaaggaagagagtatcctgggcagcatccccctcctgagcttccgggtagccgcagtgcagccctcagacaacatcagccggaaacacacgtttaaggtgactgtgtgctgggtggatgaggccgaggccagctccacacgctgcctctccccacaggctgagcatgccggggtccgcacctacttcttcagtgccgagagccccgaggagcaagaggcctggatccaggccatgggggaggctgctcgagtacagatccctccagcccagaagtcagtgccccaagctgtgcggcacagtctggcaccccctgccccactccatgctgggctagagtcactgacagcatctcccttggcatcctgcagccatgagaagccagactcggagaacgtcccacccagcaagcaccaccagcagccaccccacaacagcctccctaagcctgagccagaggccaagactcgaggggagggtgatggccgaggctgtgagaaggcagagagaaggcctgagaggccagaagtcaagaaagagcctccggtgaaagccaatggcctcccagctggaccggagccagcctcagagccgggcagcccttaccccgagggcccaagagtgccagggggtggggaacagcctgcccagcccaatggctggcagtaccactccccaagccggccagggagcacagctttcccgtctcaggatggagagactgggggacaccggcggagtttcccaccacgcaccaaccctgacaaaattgcccagcgcaagagctccatgaaccagcttcagcagtgggtgaatctgcgccggggggtacccccgcctgaagaccttcggagtccctctaggttctatcctgtgtctcgcagggtccctgagtactatggcccctactcctcccagtaccccgatgattatcagtactacccgccaggagtgcggccggagagcatctgttccatgccggcctatgatcggatcagcccgccctgggccctggaggacaagcgccatgccttccgcaatgggggtggccctgcctaccagctgcgagagtggaaggagcccgccagctacgggcggcaggatgccaccgtctggatcccaagcccctcccggcagccagtctattatgatgagctggatgccgcctctagctccctgcgccgcctgtccctgcagccccgctcccactctgtgccccgctcacccagccagggctcctacagccgtgcccgcatttactcccctgtccgctcacccagtgcccgttttgagcggctgccacctcgcagtgaggacatctatgctgaccctgctgcctatgtgatgaggcgatccatcagctcccccaaggtccctccatacccagaagtgttccgggacagcctccacacctacaagttaaacgagcaagacacagataagctgctgggaaaattgtgtgagcagaacaaggtggtgagggagcaggaccggctggtgcagcagctccgagctgagaaggagagcctggaaagtgccttgatggggacccaccaggagctggagatgtttggaagccagcccgcctacccagaaaagctgcgacacaaaaaggattcactgcagaaccagctcatcaacatccgcgtggagctgtctcaggcgaccacggccctgacaaacagcaccatagagtatgagcacctcgagtctgaggtctctgccctgcacgatgacctctgggagcagctcaatttggacacccagaatgaggtgctgaaccggcaaatccaaaaggagatctggaggatccaggacgtgatggaggggctgaggaagaacaacccctcccggggcacggacaccgccaagcacagaggaggacttggcccctcagccacctacagctccaacagcccggccagccccctcagctctgccagcctcaccagccccctgagccccttttcactggtgtcgggctctcaggggtcccccaccaagcctggctccaacgagcccaaggcaaactatgaacaaagcaagaaagacccccaccagacattgcccctggacacccccagagacatcagccttgtgcccaccaggcaagaggtagaggcagagaagcaggcagctctcaacaaaggtgggtacctctgcaagctcatgcaggcctgagctgggctgcgagcccaggggcctgtgtgtgtacctactcatctccctctgctgttcaagaaattcagggctggagaggaaggtggaacacgtgagaggaggggcaagagccccactggaggaggagctctcctgcagggagatgtgtcaggggatgaggaagctatgctgcattggtcagggttctctagagggacagaactaataagatatataatatatatgtgtaaaggggagtttagtaagtattaacttacatgctgacaaggtcccacaataggctgtctacaagctgaggagcaagaagagccagtctgagttccaaaactgaagaacttggagtccgatgtttgagggcaggaagcatccagcacgggagaaaaatgtaggctgggaggctaggccagtctctccttttcatgtttttctgcctgctttatattcactggcagctgattagattgtgcccaccagattaagggtagctctgccttccccagcatgttaatctgttttggcaacaccctcacagacacacccaggatcaatactttgtatccttcaatccagccaagttgacactcaatattaatcatcacaagtccaccccttgtcaacttgaacccatacacatctcctgagatcatacataatcttcaaataaagacaataataaggtcat

SEQ ID NO: 462739 - DNA, 3079 bp, Homo sapiens
gacatgtccaataaaacaggtgggaaacgcccggctaccaccaacagtgacatacccaaccacaacatggtgtccgaggtccctccagagcggcccagcgtccgggcaactcgcacagcccgcaaagccgtcgcctttggcaagcgctcacactccatgaagcggaaccccaatgcacctgtcaccaaggcgggctggctcttcaaacaggccagctccggggttaagcagtggaacaagcgctggttcgtcctggtggatcgctgcctcttctactataaagatgagaaggaagagagtatcctgggcagcatccccctcctgagcttccgggtagccgcagtgcagccctcagacaacatcagccggaaacacacgtttaaggtgactgtgtgctgggtggatgaggccgaggccagctccacacgctgcctctccccacaggctgagcatgccggggtccgcacctacttcttcagtgccgagagccccgaggagcaagaggcctggatccaggccatgggggaggctgctcgagtacagatccctccagcccagaagtcagtgccccaagctgtgcggcacagccatgagaagccagactcggagaacgtcccacccagcaagcaccaccagcagccaccccacaacagcctccctaagcctgagccagaggccaagactcgaggggagggtgatggccgaggctgtgagaaggcagagagaaggcctgagaggccagaagtcaagaaagagcctccggtgaaagccaatggcctcccagctggaccggagccagcctcagagccgggcagcccttaccccgagggcccaagagtgccagggggtggggaacagcctgcccagcccaatggctggcagtaccactccccaagccggccagggagcacagctttcccgtctcaggatggagagactgggggacaccggcggagtttcccaccacgcaccaaccctgacaaaattgcccagcgcaagagctccatgaaccagcttcagcagtgggtgaatctgcgccggggggtacccccgcctgaagaccttcggagtccctctaggttctatcctgtgtctcgcagggtccctgagtactatggcccctactcctcccagtaccccgatgattatcagtactacccgccaggagtgcggccggagagcatctgttccatgccggcctatgatcggatcagcccgccctgggccctggaggacaagcgccatgccttccgcaatgggggtggccctgcctaccagctgcgagagtggaaggagcccgccagctacgggcggcaggatgccaccgtctggatcccaagcccctcccggcagccagtctattatgatgagctggatgccgcctctagctccctgcgccgcctgtccctgcagccccgctcccactctgtgccccgctcacccagccagggctcctacagccgtgcccgcatttactcccctgtccgctcacccagtgcccgttttgagcggctgccacctcgcagtgaggacatctatgctgaccctgctgcctatgtgatgaggcgatccatcagctcccccaaggtccctccatacccagaagtgttccgggacagcctccacacctacaagttaaacgagcaagacacagataagctgctgggaaaattgtgtgagcagaacaaggtggtgagggagcaggaccggctggtgcagcagctccgagctgagaaggagagcctggaaagtgccttgatggggacccaccaggagctggagatgtttggaagccagcccgcctacccagaaaagctgcgacacaaaaaggattcactgcagaaccagctcatcaacatccgcgtggagctgtctcaggcgaccacggccctgacaaacagcaccatagagtatgagcacctcgagtctgaggtctctgccctgcacgatgacctctgggagcagctcaatttggacacccagaatgaggtgctgaaccggcaaatccaaaaggagatctggaggatccaggacgtgatggaggggctgaggaagaacaacccctcccggggcacggacaccgccaagcacagaggaggacttggcccctcagccacctacagctccaacagcccggccagccccctcagctctgccagcctcaccagccccctgagccccttttcactggtgtcgggctctcaggggtcccccaccaagcctggctccaacgagcccaaggcaaactatgaacaaagcaagaaagacccccaccagacattgcccctggacacccccagagacatcagccttgtgcccaccaggcaagaggtagaggcagagaagcaggcagctctcaacaaaggtgggtacctctgcaagctcatgcaggcctgagctgggctgcgagcccaggggcctgtgtgtgtacctactcatctccctctgctgttcaagaaattcagggctggagaggaaggtggaacacgtgagaggaggggcaagagccccactggaggaggagctctcctgcagggagatgtgtcaggggatgaggaagctatgctgcattggtcagggttctctagagggacagaactaataagatatataatatatatgtgtaaaggggagtttagtaagtattaacttacatgctgacaaggtcccacaataggctgtctacaagctgaggagcaagaagagccagtctgagttccaaaactgaagaacttggagtccgatgtttgagggcaggaagcatccagcacgggagaaaaatgtaggctgggaggctaggccagtctctccttttcatgtttttctgcctgctttatattcactggcagctgattagattgtgcccaccagattaagggtagctctgccttccccagcatgttaatctgttttggcaacaccctcacagacacacccaggatcaatactttgtatccttcaatccagccaagttgacactcaatattaatcatcacaagtccaccccttgtcaacttgaacccatacacatctcctgagatcatacataatcttcaaataaagacaataataaggtcat

SEQ ID NO: 462740 - DNA, 848 bp, Homo sapiens
  misc_feature (20)..(20): n is a, c, g, or t
tggtacggtcggaggtttangatcgacaaggcgagccgcgtttctccccacactccccaaaaaggcgatgaccctccccaggccgcgctcacgctgaacccctgttgctgagctgcagttcctggaggtgtcctgtcctcaaatgtggggatgcggggaaaagattaagaagacagggtatgtgcggatgttgtaacagggtttgaatgaagcacgtctcacacacctcacatgtgagaacccaatcatcacatttatgaactacaaaaggattggcattttaaaatttgtaatttgtggatttttctcattccaagtaaatagttgtttacatacccaattttttatctttgtttttgttttaattttttatttctttttttattttttattttttctatttattttttctattttctacaaccaattttttattcctaactttgcgttctttttcttaaagaaagcctctgccaaattgtgtaagctcctacacaacgcataactacccctggtgatcaggcaacagtcacaatcagtgaaggctccaaatgatatttaccagtttggttactttggaagtactttcaacgtcaggctttaaaagggcaagaatattaactgagaagaattgaagctactttattgaatgccctacatggtttgttaagtgaacataacctaatattaaaatagaacgcttctcacctcagaagcgtcagtccagagggactgacattgtggctctcaggtaccaatgtgcgcatgggacagaacaccataagagtaatctaaaacaaaacaaaccctgatgtttgggtttggttgcaaattttaaggtcatttat

SEQ ID NO: 462741 - DNA, 1567 bp, Homo sapiens
agctccttaaaggatacacaaaactgtcatcagtagttaagatttcggtggtctgggggtgaattccaggtagcaagagaagagtctaaggagcagcaggcaacgtgctgaagtgcagagccaggtcaaggctgggtttgtctgagcagctggtgagtaagagagctgtgaccagggctctgagaaatatggacaggggccagcctgacaaagacaacaaagaactgcccaggggaaggtgaagaaggtaactgtcaacccttcaaaaagtgaaatggcagcgggcacacggacacatgggagcatgttacacacaccacaccctcacagcgtgcacacatgcacatgcacacacacacacctgctccactgctattcggctgtgcgaggtctctgcggccccgctggcgctgctggtgttttgcaggcagctgtttcctcctccggccctcctgttccccgggccgcctgggcaccggcgcctgcactctggcattcattgctctacccgttccaggggctggcctgacttggaatttaagcagcagcgcagccctccctggagtgagcggcggccggggctccagataaggcgggcctgcctcctagtggccaaggtgctgcagggcagctctgagggctggagggctgcgcagccgccacccgaggacacggggaggaggcacaggagaatcctcaagcggggagacacacccttcctgcagaggcgtatcgccagccacgacaaggcgagccgcgtttctccccacactccccaaaaaggcgatgaccctccccaggccgcgctcacgctgaacccctgttgctgagctgcagttcctggaggtgtcctgtcctcaaatgtggggatgcggggaaaagattaagaagacagggtatgtgcggatgttgtaacagggtttgaatgaagcacgtctcacacacctcacatgtgagaacccaatcatcacatttatgaactacaaaaggattggcattttaaaatttgtaatttgtggatttttctcattccaagtaaatagttgtttacatacccaattttttatctttgtttttgttttaattttttatttctttttttattttttattttttctatttattttttctattttctacaaccaattttttattcctaactttgcgttctttttcttaaagaaagcctctgccaaattgtgtaagctcctacacaacgcataactacccctggtgatcaggcaacagtcacaatcagtgaaggctccaaatgatatttaccagtttggttactttggaagtactttcaacgtcaggctttaaaagggcaagaatattaactgagaagaattgaagctactttattgaatgccctacatggtttgttaagtgaacataacctaatattaaaatagaacgcttctcacctcagaagcgtcagtccagagggactgacattgtggctctcaggtaccaatgtgcgcatgggacagaacaccataagagtaatctaaaacaaaacaaaccctgatgtttgggtttggttgcaaattttaaggtcatttat

SEQ ID NO: 462742 - DNA, 1988 bp, Homo sapiens
gaaaccaccagtttcagagtaactacaccatttcacatttccactagccacgtatgagagtcttcattgttccatgtgaaaaagcaaaacccaagattacagagcctactgcttctcagctggccttctctgaggaatcctctttccaggaacttctggcacagagatcctcaagagattccaggttggggcaagctagagatgaggaaaagctaataaaaattcaggaagggaacttgaggccaggaacaaacccccacaaagagatatgccctgagaagttgagttataaacatgatgatttggagccagatgatagtctgggcttaagggttttacaggaacgagtcactccacaagatgctctccatgagtgtgactctcaaggaccaggaaaagaccccatgactgatgcaaggaataacccttacacatgcacggaatgtgggaaagggtttagcaagaagtgggcccttgttcggcatcaacagattcatgctggagtgaagccctatgagtgcaatgagtgtgggaaagcctgtcgttatatggctgatgtcattcgacatatgaggcttcatactggggaaaaaccatacaagtgtattgagtgtgggaaagccttcaaacgcaggtttcacctcacggagcaccagcgtattcacaccggagataagccctatgagtgcaaagaatgtggcaaagcattcacccaccgctcttcttttatccagcataatatgactcacactcgagaaaaaccctttttatgcaaagaatgtgggaaagctttttactacagctcctcatttgctcaacatatgaggattcatactggaaagaaactctatgagtgcggtgaatgtggaaaggccttcacgcaccgctccacatttatccagcacaatgtgacccacacaggagaaaaaccatttttatgtaaagaatgtggaaaaaccttttgcctcaactcatccttcactcagcacatgaggattcacactggagagaaaccctatgagtgcggtgaatgtggaaaggcctttactcatcgctccactttcatccgacataagaggacccataccggagagaagccctttgagtgcaaagaatgtgggaaggccttttgtgacagctcttccttaattcaacatatgaggattcacactggtgagaagccttatgagtgcagtgaatgtggaaaggcttttacacaccactctgtttttattcgacataataggacccacagtggacaaaaacccttggagtgcaaagaatgtgcaaaagccttttactatagctcttccttcactcgacacatgaggattcacactggagagaagccctatgtttgtagagaatgtggaaaggcttttacccaacctgcaaattttgttcggcataataggatccacactggagaaaaaccttttgaatgcaaagaatgtgagaaagccttctgtgacaactttgctttaactcagcacatgagaactcacactggagagaaaccctttgaatgcaatgaatgtggaaagaccttcagccacagttcatctttagagccttacactgtacctgagaataatcgaggggagagacctggtggttaacatgcatttagggattcccaaattgttgttgtgctaaagttccaatcctcattcttttttatattgataatttgtattttcctgtttttaagtttgctgaatctctcctctgattgcatgtcttctgaatccctttattgtattcatattttgtttccattactgtaaattttgatctagaatgttttttgttctttttagaaatcattttatctctttatttctatcctcattttgctcatacatctttttcctttgttcatgtctttagctttttaagcatctttaagacagttgtctttttctggcgagactgacatctgggtttcctcaagtatgttttccctccattcattttgttcctttaat

SEQ ID NO: 462743 - DNA, 1282 bp, Homo sapiens
tgaagatctgatgccggaatataaggggaggacggtgctagtgagagatgcccaagagggaagtgtcactctgcagatccttgacgtgcgccttgaggaccaagggtcttaccgatgtctgatccaagttggaaatctgagtaaagaggacaccgtgatcctgcaggttgcaggaggagcgtggggagagagtggagagaggacaagttccattaacagctgcccctgttcatcacaggaggctatgggggaagagggccatggccaggaccataccctggcagaggccctgctggcttcaggcctactgctgcggcatcatagaaattgctttgcccccgtggacagtgctcagggcaaagaggttgctgcctgctcttctagagcagatatctctggggatactcccatggtccacagctgggatctactgctcttgcaaactcttctggggaagttccagggtatagctattgagtatctgtctgctcatggttgggatgggactgtagcattatgggagggcctctacatagaggccctccttctgatttgccaaattgttttcattctttagagaaactccggagtgaactgagtaagtttcccatgttcttgtaacttccgtaccaacttatctcctgttgccctaatatttgcagtgatagctcattccccttgtttcttctttcatagagttgaaaagagctgcagcaaactcaggctggagaagagcccggttgcattttggtaagttataccaatcaaataggtccatatctcagagcacttcctccttatggctttgtaaccttagattttgttccattcctctggaatgcaggtaatttaaaaatttttaaatcaaatctgtatatctgactatcaaattaaaaaaatctttgtgatcgatcttgaggtcatatttagatttagaaagtatcccctcttttagagcactgataatattaggtttggtcttcttaagggttttctgtggtttttgagatttttcctatgtttatcagttatttgtatttcttctttgtgtgacttgtctgttcctgttctatttgggcttttttttgatttgtgaagactctttctagataaagtatattagctctttgtcatatttgtcaccattacttttcatttgtacttccttatagtatttttctgatgcataagtgttttatttttacgtagtcaaattcattcatctttttctgtgtagtctcttccatgctttcaggtttgggaagtccttcctatcccacaa

SEQ ID NO: 462744 - DNA, 1722 bp, Homo sapiens
aggcacttgtcagagccctgttttcccatggcagcaggaacgccccaagagtgctgtgtttcctggcgaggggaaggtcaagatgagcgtggaggagcagattgaccgaatgcggcggcaccagagtggctccatgagggagaagcggaggagcctgcagctcccggccagcccggcccccgaccccagtccccggccagcctacaaagtggtgcgccgccaccgcagcatccatgaggtagacatctccaacctggaggcagccctgcgggcagaggagcctggcgggcatgcctacgagacaccccgggaggaaattgcccggcttcgcaaaatggagctagagccccagcattatgacgtggacatcaataaggagctctccactccagacaaagtcctcatccctgaacggtacattgacctggagcctgacactcccctgagccctgaggagttgaaggagaagcagaagaaggtggagaggatcaagacactcattgccaaatccagtatgcagaacgtggtgcccatcggcgagggggactctgtggacgtgccccaggactcagagagccagctgcaggagcaggagaagcggattgaaatctcctgcgccctggcgaccgaggcctcccgcaggggccgcatgctgtctggtggtatatggtaaggtgttggagcataaatgtacatgtatgtgagtgtacaatacattggtggaggtggtgtttatgaatgcatgtatttatgtgtgattggcttttccgcagtatgggaaatgataaagcatatttgtgtatatgttgtgtacagtgtatatattgcaatactgtgaacttctgtctgtgtgcacaggctgggagaaagtacagtgtcatgaatgtgagtatgtgtgactgatcatttctgcatgcatgtggtacttgtgattgcacacattataatatcacatctgtatgattcacatctgcagcatatgcaaatcttaactattttgatggatatatttctaatatatatttagtatttttctgccttcttaacaaagttctgtttacatatgacctcttcttgctcatgtattatcattataaatatctttattttgccgatctctgttaaaggaatgcccttagggccacaatggacatagatctgtttgtagctatgctaaatgttcccaaactgtcactcttttaaagctgttatgtctgctttttacaaaatattttttctcctcagtcgtgctttcttacagatgtcagtgggcctcccaattcctctgtctctttgaattttcctgtttctaatctcccctgggctagaaacccagcgagtcaacaccttttagaattgcgtataaataagagtaactggactccagggggtccatatgagtaaattctgagagcctcgctgcatgtcctgtgggctataacctctatgttggcttcctggagatatcttttgcttcgtttttggtttcttggctgttttagaagttgagactgctagatgactaagcgttgggtcagtgatgtggctatgcacacgaatgtgtgtttgaaagtgtttgtgagtgtatttgcacatgaagttacaagtgttgggtcatgtggaagggcacaggcttggaagtacacaaatacgcttatgtgagctgtgtgcgatgagtgtaatgatatggacttgccagatcccatgcacaaactttgtatc

SEQ ID NO: 462745 - DNA, 914 bp, Homo sapiens
cctaatggtgcattcacacccacctaagttacccaaacagcagtggggacgcaattattcaaaccacaagggccatggttcctggaaaacatcaataggtcgaagtcatgtgcgcagatccaaaaggaagcaaacgtgtcttatcatgctggggagattcctggccacgtatgattgtggccgccatcctcgccatcgctggcattgtgatgatgacctacgctgatggcttccacagccactccgtcatcggcatcgcactggtggtggcctcagcatcgatgtctgccctctacaaggttttgttcaagctcctcctgggcagtgctaagtttggagaagccgccttatttttgtccatcttgggtgtgtttaacatcctcttcatcacctgcattcctattatcctctactttaccaaagtggaatactggagctcttttgatgacattccatggggaaacctttgtggattttcagttcttttattgacattcaatattgtattaaattttggaattgccgttacatatcccactctgatgtctcttggaatcgtcctcagcatacctgtgaatgcagtgattgatcactacaccagtcagatcgtcttcaatggggtccgggtcatcgccatcatcatcatcggcctgggttttctcctcctgctcctgccagaggagtgggatgtctggttgatcaagctgctcacccgactcaaagtgaggaagaaggaggagcctgcagagggcgctgccgacctgagctcaggacctcagagcaagaacagaagagcccgcccttccttcgcccgctaacaccactcctctagaactcggtggtaatgactgggaggtctattcctgccgggaggaacctcagttgggtaaggtgtacatacctgtacagttttg

SEQ ID NO: 462746 - DNA, 3004 bp, Homo sapiens
  misc_feature (1295)..(1295): n is a, c, g, or t
  misc_feature (1301)..(1301): n is a, c, g, or t
  misc_feature (1304)..(1305): n is a, c, g, or t
tggtttgaatcttcaccctaggtttctgtgagcttcacatgtacacgctcaactgcctagttgacactgccattggctcggagcagctgtgtccttcagtgcaggtccagccaagagccgtgggccacagatgacgctggtggggaagcagagggcagactaggcagaggcaaggctttcctgtgccctgagctgtcagagatgggccagggccttcagcttcctcgatagggcagaagtgaccacgctggctccattcagcaaaggacgtggacggagctgccgggcttgtctgagaggaggagaaatgtggaattgagtgaggctctctaagaaggttctgctggagttgagaaaaattagggtgaggcacctccccgattttatgtcctttttcctgggtccagcctcctgaacagctaccattcgcttctgtgagacacctgtcggtgcctccttttccagcccttaatggaacggtgagtgaggttccctgactggggtggagtctgcttgtgagtttccccatcccatgtctctctgactcctgctccaactccttacttcgccagttcctctcccagccacctcagacttcccataccaccctccctggacaggaagcgtttttacaggagtttgaagcttcaggagtgccctccggccacatgaagacaaggcgctaacaaacatggcgttctgcaaattgcaccatcgccaactcctgtcttactctcacagaggtctcttgggctcttctgagaagggtgaatgaacttggttggagggaagagaggggtttggtggctcttagtaaaattgcttcacgcagtgacctttggcagtttaggataataacctgtgcagagagagggtctcctgtcctgaagtcacagcccggatctccaggctggctctgctgcctctgaatgatttgtgggtcacacacgccaacagcatcgccaagggctgacatcagcctgcttgagccacggaaactgaatgggcaaggatgagttccccagcacagagggaggcatcctctgtcaagaccatctgcgcatgtgctgtgcagtctccagtctgcactgtgagcagtgtgtctcaacggcttttgagaactgcttcgagaggggaccagatgcgcagagacaagcttccagcctggctagggacggaccctctggggatgctcctctctggccgggcagcagtagaagcacctgcctccatccacatccagacgccattcccttttcttcaccgctgcttcccatcagatggtccccaggacntgcccntcnncaggtgttcagcctgggtaggcgggagaaggaggaggcgtttcaggtatgggaggttcagctgcagacccaccaggtgaagacccaccagcacaccttgccctgcttctgggccacgtctctccagtgcacctgcaggagacctctgtggatgcaccgtgtctcctaacactgtctccagcccacactgagcttgtcttgcgtggaaatctttgtctctgctgttgcctttgcctggagcgtccttgccccacaccctctcacagctgcctctctgtcatctttccaatgtctgtcctcagagagcccttcctggccactccatctaaaggagtcctgggccaggtgtggtggcccacacctgtaatctcagaactttgggagacggaggtgggaagatcacttgaggccaggggttcaagaccaacctgggcaacatactgaaacccccatgcctataacaataaaaaaggaaaaaaagggaatctgaaattgttctatttattcatcttttgtcaacaattcctggtaagaggtgctactcaggtcacagaattggttttaggttgctctagtaaaaactttttgctgtctttagcaaaaagagctgtgcacatagacatactttcaggttaaaccaatatgtatgtttttaatttgctaccccttgccacctcttggcctagaaacagggaggaggaagccacgctttcattattattaactatctcgggccttttattagtttgatcaagtaataatcatctaaagtgcatctcctttgtggggagcccaaattccaggccggaaaaggtccaaccgctgttcctccaacaccggtgcttttccagaacgcgaacttcacgagagctgccgcttcctgtcttgttcaccaaaacattctcagcagcttgaacaagtcctggccgggagcagttgatgaaggagtgaatgacaggcaaattgggatgcgagcaggtgtccatgtctctggacaagggagtgtctttttttccccaaatccctgcaacgagagcctaatagagtgctttagagcacaggaaacctttgaaatagcgccgaactgttgacggaaatgtaaattaatacagttattatggaaaacaaccaagagtagagggggagtggttaactagaggaaaattgggatgctgctaccagaagaaggagggatgaattctaggcaggcagcgcccaggtgagagcttagggtgtcatctcccaggacgtgctgggagtattttaggtatctagcttcctcctgtttctaagcaggcagctcttggtgatcagccttaagtggacttttaccaacttgttgaataaggtgcatagatacagccacctctgccatttcgggatcccccaggaaccaagaacttttacacttgagcttgctatgtgtcaggaagaggaaggtcaagagttgagctgtttctcaggccgcttagccctctgtgtttcccctgaaagtctgttcccacaaatctcattgatcctttctagatctcaagccctgattattctttcagactttgttctgctttcataattcattcaggcattctgtttcatttcctctcttggtggattattccaaaggagcttgtccactgccagtttctcctatgcttccatccctgcctctggctactctccttgtttggtcagttttccct

SEQ ID NO: 462747 - DNA, 2186 bp, Homo sapiens
  misc_feature (477)..(477): n is a, c, g, or t
  misc_feature (483)..(483): n is a, c, g, or t
  misc_feature (486)..(487): n is a, c, g, or t
catgtttttcaggttgaactagaggatcccgacgtagtggactcacgagagagagggtctcctgtcctgaagtcacagcccggatctccaggctggctctgctgcctctgaatgatttgtgggtcacacacgccaacagcatcgccaagggctgacatcagcctgcttgagccacggaaactgaatgggcaaggatgagttccccagcacagagggaggcatcctctgtcaagaccatctgcgcatgtgctgtgcagtctccagtctgcactgtgagcagtgtgtctcaacggcttttgagaactgcttcgagaggggaccagatgcgcagagacaagcttccagcctggctagggacggaccctctggggatgctcctctctggccgggcagcagtagaagcacctgcctccatccacatccagacgccattcccttttcttcaccgctgcttcccatcagatggtccccaggacntgcccntcnncaggtgttcagcctgggtaggcgggagaaggaggaggcgtttcaggtatgggaggttcagctgcagacccaccaggtgaagacccaccagcacaccttgccctgcttctgggccacgtctctccagtgcacctgcaggagacctctgtggatgcaccgtgtctcctaacactgtctccagcccacactgagcttgtcttgcgtggaaatctttgtctctgctgttgcctttgcctggagcgtccttgccccacaccctctcacagctgcctctctgtcatctttccaatgtctgtcctcagagagcccttcctggccactccatctaaaggagtcctgggccaggtgtggtggcccacacctgtaatctcagaactttgggagacggaggtgggaagatcacttgaggccaggggttcaagaccaacctgggcaacatactgaaacccccatgcctataacaataaaaaaggaaaaaaagggaatctgaaattgttctatttattcatcttttgtcaacaattcctggtaagaggtgctactcaggtcacagaattggttttaggttgctctagtaaaaactttttgctgtctttagcaaaaagagctgtgcacatagacatactttcaggttaaaccaatatgtatgtttttaatttgctaccccttgccacctcttggcctagaaacagggaggaggaagccacgctttcattattattaactatctcgggccttttattagtttgatcaagtaataatcatctaaagtgcatctcctttgtggggagcccaaattccaggccggaaaaggtccaaccgctgttcctccaacaccggtgcttttccagaacgcgaacttcacgagagctgccgcttcctgtcttgttcaccaaaacattctcagcagcttgaacaagtcctggccgggagcagttgatgaaggagtgaatgacaggcaaattgggatgcgagcaggtgtccatgtctctggacaagggagtgtctttttttccccaaatccctgcaacgagagcctaatagagtgctttagagcacaggaaacctttgaaatagcgccgaactgttgacggaaatgtaaattaatacagttattatggaaaacaaccaagagtagagggggagtggttaactagaggaaaattgggatgctgctaccagaagaaggagggatgaattctaggcaggcagcgcccaggtgagagcttagggtgtcatctcccaggacgtgctgggagtattttaggtatctagcttcctcctgtttctaagcaggcagctcttggtgatcagccttaagtggacttttaccaacttgttgaataaggtgcatagatacagccacctctgccatttcgggatcccccaggaaccaagaacttttacacttgagcttgctatgtgtcaggaagaggaaggtcaagagttgagctgtttctcaggccgcttagccctctgtgtttcccctgaaagtctgttcccacaaatctcattgatcctttctagatctcaagccctgattattctttcagactttgttctgctttcataattcattcaggcattctgtttcatttcctctcttggtggattattccaaaggagcttgtccactgccagtttctcctatgcttccatccctgcctctggctactctccttgtttggtcagttttccct

SEQ ID NO: 462748 - DNA, 1713 bp, Homo sapiens
ggggctagtacgaggctggtgtgaatcggccgaggtggggttcctgccggctgtattcgggccttggactggactgagaagctacggtggagaccatccatggaaaagaacccccctgatgatacgggccccgtgcacgtgcctttggggcatattgtggccaatgagaaatggcgcgggtcacagctggcgcaggagatgcaagggaaaattaagctcattttcgaggatggcttgacaccagacttttatctgtcgaacagatgctgcattctttatgtcaccgaagctgatttggtggcaggaaatggctacagaaagaggcttgttcgggttagaaattccaataatcttaaaggaattgtagtcgttgaaaaaacccggatgagtgaacaatacttcccagccctacagaagtttactgtgctggaccttggaatggtgctgcttccagtggccagccagatggaagcatcctgcctcgtcatccagttggttcaagagcaaaccaaagaacccagtaagaaccctcttctcgggaagaaacgggccctgctgctgtctgagccttcgctccttcgaaccgtgcagcagatcccaggagttggaaaagttaaagctccccttctcctccagaagtttccaagcatccagcaactgagtaatgcttccattggggaactggagcaggtggtcggacaagcagtggcacagcagatccatgccttcttcacgcagcccaggtgagggctggcctcagggccacggcatcttctcccgagaccacaaacaccaggatcttgttttcagctttaaaaaccaagagaatgggccgggtgcactggctcacgcctctaatctcagcactttgggaggccgaagacagcggatcatctgaggtcaggagttcaagaccagcctggccaacatggagaaacccctaaaaataggaacaattagccaggcatggtgacaggtgcctgtaatcccagctacttgggaggccgaggcatgagaatcacttgaacccgggaggcggaggttgcagtgagctgagatcgtgccactgcactccagcctgggcaccagagcgagactccgtctcaaagaaaacaacaaaaaaaaaaaaaaaagaaaaaggattttctccagcagcaaccagtgaaagatgaggcgaggcttgaatggagcccgtgggtcgtcctgccttagcgtctgagttcagcttgtgaagttagtgggccgcagagggcactgccttcattctgctaagacgaaaagggctggtgggatcttcgcaagagagtcagggactcacactcagcaaaaagcattagggccgattttaatgtgcgaccttgacctgcatctgtcatggaaagtgccttctaaaaagcttcagtggtggatgtgaccatctgaaggaaacaaatgtacaaggaagcactgtgtatcctaagccctgggttcccagagtttcacctgctgttcatcaggtctggccttcatatacccgtactgcgagggctgtttccaatgtaaataaataactgcgcaacagttccttcctcctttcctttgttcctccctccccccggcctttttttttggcagatgtacagtttgtttataatcactgcatatgtcttctgcacacagaaagtatgaagtctgaagttcccacttaaagttgaaaactcaacggccgggcat

SEQ ID NO: 462749 - DNA, 1744 bp, Homo sapiens
ggggctagtacgaggctggtgtgaatcggccgaggtggggttcctgccggctgtattcgggccttggactggactgagaagctacggtgcggatccagctggggtatcaggggctaggtggagaccatccatggaaaagaacccccctgatgatacgggccccgtgcacgtgcctttggggcatattgtggccaatgagaaatggcgcgggtcacagctggcgcaggagatgcaagggaaaattaagctcattttcgaggatggcttgacaccagacttttatctgtcgaacagatgctgcattctttatgtcaccgaagctgatttggtggcaggaaatggctacagaaagaggcttgttcgggttagaaattccaataatcttaaaggaattgtagtcgttgaaaaaacccggatgagtgaacaatacttcccagccctacagaagtttactgtgctggaccttggaatggtgctgcttccagtggccagccagatggaagcatcctgcctcgtcatccagttggttcaagagcaaaccaaagaacccagtaagaaccctcttctcgggaagaaacgggccctgctgctgtctgagccttcgctccttcgaaccgtgcagcagatcccaggagttggaaaagttaaagctccccttctcctccagaagtttccaagcatccagcaactgagtaatgcttccattggggaactggagcaggtggtcggacaagcagtggcacagcagatccatgccttcttcacgcagcccaggtgagggctggcctcagggccacggcatcttctcccgagaccacaaacaccaggatcttgttttcagctttaaaaaccaagagaatgggccgggtgcactggctcacgcctctaatctcagcactttgggaggccgaagacagcggatcatctgaggtcaggagttcaagaccagcctggccaacatggagaaacccctaaaaataggaacaattagccaggcatggtgacaggtgcctgtaatcccagctacttgggaggccgaggcatgagaatcacttgaacccgggaggcggaggttgcagtgagctgagatcgtgccactgcactccagcctgggcaccagagcgagactccgtctcaaagaaaacaacaaaaaaaaaaaaaaaagaaaaaggattttctccagcagcaaccagtgaaagatgaggcgaggcttgaatggagcccgtgggtcgtcctgccttagcgtctgagttcagcttgtgaagttagtgggccgcagagggcactgccttcattctgctaagacgaaaagggctggtgggatcttcgcaagagagtcagggactcacactcagcaaaaagcattagggccgattttaatgtgcgaccttgacctgcatctgtcatggaaagtgccttctaaaaagcttcagtggtggatgtgaccatctgaaggaaacaaatgtacaaggaagcactgtgtatcctaagccctgggttcccagagtttcacctgctgttcatcaggtctggccttcatatacccgtactgcgagggctgtttccaatgtaaataaataactgcgcaacagttccttcctcctttcctttgttcctccctccccccggcctttttttttggcagatgtacagtttgtttataatcactgcatatgtcttctgcacacagaaagtatgaagtctgaagttcccacttaaagttgaaaactcaacggccgggcat

SEQ ID NO: 462750 - DNA, 1603 bp, Homo sapiens
ggaaacgtccgcccttatccgttctcttattggtcaggttagacgtccatttctgacgccacagcctatccggcgctgcgggaggcggagggcgggctggatgaaggactgggcgagcaccgagggcgtgaacccggaaggtggcgcggccaccagtaacatgatctctagactgggacggtggggttcctgccggctgtattcgggccttggactggactgagaagctacgtccaataatcttaaaggaattgtagtcgttgaaaaaacccggatgagtgaacaatacttcccagccctacagaagtttactgtgctggaccttggaatggtgctgcttccagtggccagccagatggaagcatcctgcctcgtcatccagttggttcaagagcaaaccaaagaacccagtaagaaccctcttctcgggaagaaacgggccctgctgctgtctgagccttcgctccttcgaaccgtgcagcagatcccaggagttggaaaagttaaagctccccttctcctccagaagtttccaagcatccagcaactgagtaatgcttccattggggaactggagcaggtggtcggacaagcagtggcacagcagatccatgccttcttcacgcagcccaggtgagggctggcctcagggccacggcatcttctcccgagaccacaaacaccaggatcttgttttcagctttaaaaaccaagagaatgggccgggtgcactggctcacgcctctaatctcagcactttgggaggccgaagacagcggatcatctgaggtcaggagttcaagaccagcctggccaacatggagaaacccctaaaaataggaacaattagccaggcatggtgacaggtgcctgtaatcccagctacttgggaggccgaggcatgagaatcacttgaacccgggaggcggaggttgcagtgagctgagatcgtgccactgcactccagcctgggcaccagagcgagactccgtctcaaagaaaacaacaaaaaaaaaaaaaaaagaaaaaggattttctccagcagcaaccagtgaaagatgaggcgaggcttgaatggagcccgtgggtcgtcctgccttagcgtctgagttcagcttgtgaagttagtgggccgcagagggcactgccttcattctgctaagacgaaaagggctggtgggatcttcgcaagagagtcagggactcacactcagcaaaaagcattagggccgattttaatgtgcgaccttgacctgcatctgtcatggaaagtgccttctaaaaagcttcagtggtggatgtgaccatctgaaggaaacaaatgtacaaggaagcactgtgtatcctaagccctgggttcccagagtttcacctgctgttcatcaggtctggccttcatatacccgtactgcgagggctgtttccaatgtaaataaataactgcgcaacagttccttcctcctttcctttgttcctccctccccccggcctttttttttggcagatgtacagtttgtttataatcactgcatatgtcttctgcacacagaaagtatgaagtctgaagttcccacttaaagttgaaaactcaacggccgggcat

SEQ ID NO: 462751 - DNA, 1395 bp, Homo sapiens
cacctttcaataattttactgatgtctgagaaattatattcatgatacatgaaaacatttgttcccttaagtcaagctgagccaaatggaaaaacgcaatttctacaaaacatattttaagaaaacggccagtcctccagagggcgctcacgtgctgttgctttcattgtggttcaggttcaagagcaaaccaaagaacccagtaagaaccctcttctcgggaagaaacgggccctgctgctgtctgagccttcgctccttcgaaccgtgcagcagatcccaggagttggaaaagttaaagctccccttctcctccagaagtttccaagcatccagcaactgagtaatgcttccattggggaactggagcaggtggtcggacaagcagtggcacagcagatccatgccttcttcacgcagcccaggtgagggctggcctcagggccacggcatcttctcccgagaccacaaacaccaggatcttgttttcagctttaaaaaccaagagaatgggccgggtgcactggctcacgcctctaatctcagcactttgggaggccgaagacagcggatcatctgaggtcaggagttcaagaccagcctggccaacatggagaaacccctaaaaataggaacaattagccaggcatggtgacaggtgcctgtaatcccagctacttgggaggccgaggcatgagaatcacttgaacccgggaggcggaggttgcagtgagctgagatcgtgccactgcactccagcctgggcaccagagcgagactccgtctcaaagaaaacaacaaaaaaaaaaaaaaaagaaaaaggattttctccagcagcaaccagtgaaagatgaggcgaggcttgaatggagcccgtgggtcgtcctgccttagcgtctgagttcagcttgtgaagttagtgggccgcagagggcactgccttcattctgctaagacgaaaagggctggtgggatcttcgcaagagagtcagggactcacactcagcaaaaagcattagggccgattttaatgtgcgaccttgacctgcatctgtcatggaaagtgccttctaaaaagcttcagtggtggatgtgaccatctgaaggaaacaaatgtacaaggaagcactgtgtatcctaagccctgggttcccagagtttcacctgctgttcatcaggtctggccttcatatacccgtactgcgagggctgtttccaatgtaaataaataactgcgcaacagttccttcctcctttcctttgttcctccctccccccggcctttttttttggcagatgtacagtttgtttataatcactgcatatgtcttctgcacacagaaagtatgaagtctgaagttcccacttaaagttgaaaactcaacggccgggcat

SEQ ID NO: 462752 - DNA, 1859 bp, Homo sapiens
ggaaacgtccgcccttatccgttctcttattggtcaggttagacgtccatttctgacgccacagcctatccggcgctgcgggaggcggagggcgggctggatgaaggactgggcgagcaccgagggcgtgaacccggaaggtggcgcggccaccagtaacatgatctctagactgggacggtggggttcctgccggctgtattcgggccttggactggactgagaagctacggtggagaccatccatggaaaagaacccccctgatgatacgggccccgtgcacgtgcctttggggcatattgtggccaatgagaaatggcgcgggtcacagctggcgcaggagatgcaagggaaaattaagctcattttcgaggatggcttgacaccagacttttatctgtcgaacagatgctgcattctttatgtcaccgaagctgatttggtggcaggaaatggctacagaaagaggcttgttcgggttagaaattccaataatcttaaaggaattgtagtcgttgaaaaaacccggatgagtgaacaatacttcccagccctacagaagtttactgtgctggaccttggaatggtgctgcttccagtggccagccagatggaagcatcctgcctcgtcatccagttggttcaagagcaaaccaaagaacccagtaagaaccctcttctcgggaagaaacgggccctgctgctgtctgagccttcgctccttcgaaccgtgcagcagatcccaggagttggaaaagttaaagctccccttctcctccagaagtttccaagcatccagcaactgagtaatgcttccattggggaactggagcaggtggtcggacaagcagtggcacagcagatccatgccttcttcacgcagcccaggtgagggctggcctcagggccacggcatcttctcccgagaccacaaacaccaggatcttgttttcagctttaaaaaccaagagaatgggccgggtgcactggctcacgcctctaatctcagcactttgggaggccgaagacagcggatcatctgaggtcaggagttcaagaccagcctggccaacatggagaaacccctaaaaataggaacaattagccaggcatggtgacaggtgcctgtaatcccagctacttgggaggccgaggcatgagaatcacttgaacccgggaggcggaggttgcagtgagctgagatcgtgccactgcactccagcctgggcaccagagcgagactccgtctcaaagaaaacaacaaaaaaaaaaaaaaaagaaaaaggattttctccagcagcaaccagtgaaagatgaggcgaggcttgaatggagcccgtgggtcgtcctgccttagcgtctgagttcagcttgtgaagttagtgggccgcagagggcactgccttcattctgctaagacgaaaagggctggtgggatcttcgcaagagagtcagggactcacactcagcaaaaagcattagggccgattttaatgtgcgaccttgacctgcatctgtcatggaaagtgccttctaaaaagcttcagtggtggatgtgaccatctgaaggaaacaaatgtacaaggaagcactgtgtatcctaagccctgggttcccagagtttcacctgctgttcatcaggtctggccttcatatacccgtactgcgagggctgtttccaatgtaaataaataactgcgcaacagttccttcctcctttcctttgttcctccctccccccggcctttttttttggcagatgtacagtttgtttataatcactgcatatgtcttctgcacacagaaagtatgaagtctgaagttcccacttaaagttgaaaactcaacggccgggcat

SEQ ID NO: 462753 - DNA, 1102 bp, Homo sapiens
  misc_feature (968)..(968): n is a, c, g, or t
ggaaacgtccgcccttatccgttctcttattggtcaggttagacgtccatttctgacgccacagcctatccggcgctgcgggaggcggagggcgggctggatgaaggactgggcgagcaccgagggcgtgaacccggaaggtggcgcggccaccagtaacatgatctctagactgggacggtggggttcctgccggctgtattcgggccttggactggactgagaagctacgggaaaattaagctcattttcgaggatggcttgacaccagacttttatctgtcgaacagatgctgcattctttatgtcaccgaagctgatttggtggcaggaaatggctacagaaagaggcttgttcgggttagaaattccaataatcttaaaggaattgtagtcgttgaaaaaacccggatgagtgaacaatacttcccagccctacagaagtttactgtgctggaccttggaatggtgctgcttccagtggccagccagatggaagcatcctgcctcgtcatccagttggttcaagagcaaaccaaagaacccagtaagaaccctcttctcgggaagaaacgggccctgctgctgtctgagccttcgctccttcgaaccgtgcagcagatcccaggagttggaaaagttaaagctccccttctcctccagaagtttccaagcatccagcaactgagtaatgcttccattggggaactggagcaggtggtcggacaagcagtggcacagcagatccatgccttcttcacgcagcccaggtgagggctggcctcagggccacggcatcttctcccgagaccacaaacaccaggatcttgttttcagctttaaaaaccaagagaatgggccgggtgcactggctcacgcctctaatctcagcactttgggaggccgaagacagcggatcatctgaggtcaggagttcaagaccagcctggcaatgggaacctaaaatngaataccgatggaaggcggatcccgatggaggggaggaataacggggggggggagaagggtcctggaggagttaaaaaaagggggtggggccattggagagttatgggtaggatttgcagtgttgtgttgtccc

SEQ ID NO: 462754 - DNA, 1801 bp, Homo sapiens
ggaaacgtccgcccttatccgttctcttattggtcaggttagacgtccatttctgacgccacagcctatccggcgctgcgggaggcggagggcgggctggatgaaggactgggcgagcaccgagggcgtgaacccggaaggtggcgcggccaccagtaacatgatctctagactgggacggtggggttcctgccggctgtattcgggccttggactggactgagaagctacggtggagaccatccatggaaaagaacccccctgatgatacgggccccgtgcacgtgcctttggggcatattgtggccaatgagaaatggcgcgggtcacagctggcgcaggagatgcaagatgctgcattctttatgtcaccgaagctgatttggtggcaggaaatggctacagaaagaggcttgttcgggttagaaattccaataatcttaaaggaattgtagtcgttgaaaaaacccggatgagtgaacaatacttcccagccctacagaagtttactgtgctggaccttggaatggtgctgcttccagtggccagccagatggaagcatcctgcctcgtcatccagttggttcaagagcaaaccaaagaacccagtaagaaccctcttctcgggaagaaacgggccctgctgctgtctgagccttcgctccttcgaaccgtgcagcagatcccaggagttggaaaagttaaagctccccttctcctccagaagtttccaagcatccagcaactgagtaatgcttccattggggaactggagcaggtggtcggacaagcagtggcacagcagatccatgccttcttcacgcagcccaggtgagggctggcctcagggccacggcatcttctcccgagaccacaaacaccaggatcttgttttcagctttaaaaaccaagagaatgggccgggtgcactggctcacgcctctaatctcagcactttgggaggccgaagacagcggatcatctgaggtcaggagttcaagaccagcctggccaacatggagaaacccctaaaaataggaacaattagccaggcatggtgacaggtgcctgtaatcccagctacttgggaggccgaggcatgagaatcacttgaacccgggaggcggaggttgcagtgagctgagatcgtgccactgcactccagcctgggcaccagagcgagactccgtctcaaagaaaacaacaaaaaaaaaaaaaaaagaaaaaggattttctccagcagcaaccagtgaaagatgaggcgaggcttgaatggagcccgtgggtcgtcctgccttagcgtctgagttcagcttgtgaagttagtgggccgcagagggcactgccttcattctgctaagacgaaaagggctggtgggatcttcgcaagagagtcagggactcacactcagcaaaaagcattagggccgattttaatgtgcgaccttgacctgcatctgtcatggaaagtgccttctaaaaagcttcagtggtggatgtgaccatctgaaggaaacaaatgtacaaggaagcactgtgtatcctaagccctgggttcccagagtttcacctgctgttcatcaggtctggccttcatatacccgtactgcgagggctgtttccaatgtaaataaataactgcgcaacagttccttcctcctttcctttgttcctccctccccccggcctttttttttggcagatgtacagtttgtttataatcactgcatatgtcttctgcacacagaaagtatgaagtctgaagttcccacttaaagttgaaaactcaacggccgggcat

SEQ ID NO: 462755 - DNA, 1037 bp, Homo sapiens
ctaccactcatgcagagccaatcagaactcgcggtgggggctgctggttcttccaggagcgcgcatgagcggacgctgcctactggtggccgggcgggatggttttgcccggccgccgccgcacataagccacgaggaggagctttacgacttcccggttttcggcgccgggcgcagcaagggccagactatgcgctagcaggcgttgcgcgccaaccggccggcacctgtcgcagaaggtgcaaccgatcgcactgtcgcgcagaagctcctcaatggccaacgccagctgcagccccggccgcccactcgcctcatctgagcctgggcaaatctggattgggaaagttgacattaatcaactcattattcctcacagatttgtattctccagagtatccaggtccttctcagagaattaaaaagcctgtacaggtctagatattggtatttttaattgatgataagctggaataatattaatacacacaaagcacgtgttgtaactttcattatgcttccttagagctctgttcacggaaagggcctgggagctgcaacacctcaacagcaacaagcacacctgctacctagaacttggtttctaaaaaccatcctcctctaaaaggaaacagagctctttgaagaaacggtaatttcaaagctagagcacagaaagtataagatgagcccagaatatctttttgtacaagaaagtaaggcaatgctcaaagaatgatggagacatgcccaaaaaaagcagagaagccaacttgaaaagattccaacaggccaaatatggggcgatttgaacatcagaataaaatggtgacagtcacagaattataacccagtgaagaaaggaattcatgacatcatattaatataaataataattgaatattgaaattcgttaaaggaaatgagatatttatgtagtcttaaggtatcttctcacaaattatgtattacttacaaaggggaaaagtgcaccttgacgtgagaatcttggcagaaccactttaatcaagaggttt

SEQ ID NO: 462756 - DNA, 837 bp, Homo sapiens
ctaccactcatgcagagccaatcagaactcgcggtgggggctgctggttcttccaggagcgcgcatgagcggacgctgcctactggtggccgggcgggatggttttgcccggccgccgccgcacataagccacgaggaggagctttacgacttcccggttttcggcgccgggcgcagcaagggccagactatgcgctagcaggcgttgcgcgccaaccggccggcacctgtcgcagaaggtgcaaccgatcgcactgtcgcgcagaagctcctcaatggccaacgccagctgcagccccggccgcccactcgcctcatctgagcctggctctgttcacggaaagggcctgggagctgcaacacctcaacagcaacaagcacacctgctacctagaacttggtttctaaaaaccatcctcctctaaaaggaaacagagctctttgaagaaacggtaatttcaaagctagagcacagaaagtataagatgagcccagaatatctttttgtacaagaaagtaaggcaatgctcaaagaatgatggagacatgcccaaaaaaagcagagaagccaacttgaaaagattccaacaggccaaatatggggcgatttgaacatcagaataaaatggtgacagtcacagaattataacccagtgaagaaaggaattcatgacatcatattaatataaataataattgaatattgaaattcgttaaaggaaatgagatatttatgtagtcttaaggtatcttctcacaaattatgtattacttacaaaggggaaaagtgcaccttgacgtgagaatcttggcagaaccactttaatcaagaggttt

SEQ ID NO: 462757 - DNA, 641 bp, Homo sapiens
cgcgcagaagctcctcaatggccaacgccagctgcagccccggccgcccactcgcctcatctgagcctgggtacgtgcggtccacaacgcctcccccagccagggcccggggatccccgggagtgtccccggctacctggcgccgctcatcctgggtagggtcggccccctgaggctgcccggcatgagggagttgcacccctgagcttgacctctgacggtcctttgtaatagcattaagtctttgaaacttgtagcggggtagaaggggctaggaaatgaagaaaacatctttttaaaaatataagcagtcggctgggcgaggtggcccacacctgtaatcccagcactttgggaggtcgaggcgggtggatcacgaggacaggagttcaagaccagcctggccagcatggtttcactgaaaccccgtctctactaaaaacacaaaaattagtcgggcgtggtggcaggtgcctgtaatcccagctactcgggaggctgaggcagagaattgtttgaacccgggatgcggaggttgcagtgagcggagatcgcgccactgcactccagcctgggcaacagaccaagactccgtctaaacaaacaaatatatgtgtgtatatatatgcgatcgagcccgg

SEQ ID NO: 462758 - DNA, 629 bp, Homo sapiens
ctaccactcatgcagagccaatcagaactcgcggtgggggctgctggttcttccaggagcgcgcatgagcggacgctgcctactggtggccgggcgggatggttttgcccggccgccgccgcacataagccacgaggaggagctttacgacttcccggttttcggcgccgggcgcagcaagggccagactatgcgctagcaggcgttgcgcgccaaccggccggcacctgtcgcagaaggtgcaaccgatcgcactgtcgcgcagaagctcctcaatggccaacgccagctgcagccccggccgcccactcgcctcatctgagcctggaaggtaagcatgagcaaattactttttagaggtaactttgctgaacttgtgaagaatggtgtgcaaggtccagagcgactgcaggagagggaaggtgggattcccacagagcaggagcacagatgagccaagcaaggccctgcttggaaggcagcaatcaacagagatgcacagacctgtgagggtgccgggacagccatgcaacaatgcagcccttttgcttcctaagctcaccagttccctcgctccacctctgagaggtggtttggagaaacacagcccttctcaagagggctgcaag

SEQ ID NO: 462759 - DNA, 1105 bp, Homo sapiens
gtctccgcgtggcgcgcgcctctagccgcccttcccctggcggctacggccggagggagcggaggcgagcgggagtcgggctccatggagagcggcggacaactgggcagaggcggagctttcatctcggcaccctggttccagtgacccgcgctagcgtcccgtcccgcccgcgtcggagcggccgccggccccgggactgaccggcctcgccgcacctcccgcaccgactagcgctcccaggcgctcctgcgcccgactcgccctcgcccccactccccggcggggtggcggcggccggagcagcagcagcagcagcaggagcccgcctctatgatgaagttcaagcccaaccagacgcggacctacgaccgcgagggcttcaagaagcgggcggcgtgcctgtgcttccggagcgagcaggaggacgaggtgctgctggtgagtagcagccggtacccagaccagtggattgtcccaggaggaggaatggaacccgaggaggaacctggcggtgctgccgtgagggaagtttatgaggaggctggagtcaaaggaaaactaggcagacttctgggcatatttgagcagaaccaagaccgaaagcacagaacatatgtttatgttctaacagtcactgaaatattagaagattgggaagattctgttaatattggaaggaagagagagtggttcaaagtagaagatgctatcaaagttctccagtgtcataaacctgtacatgcagagtatctggaaaagctaaagctgggttgttccccagccaatggaaattctacagtcccttcccttcggataataatgccttgttttgatgatcgcatcacagttgagtgaaatggccttcctgttcagctgttagagactgaagattgttagggcaccttagaatgtctcatcttttctaggttgtcaacagatgcatagtttgtgaatatttctaaaattttctccaaacattagctctttttagagacatgttggatttgacatgtgtccatgttttaagtaagatttttaaaataagaatacagggcaagttgaaataaatggtaactcattgtgtctagtaagtcagacacat

SEQ ID NO: 462760 - DNA, 762 bp, Homo sapiens
gtgacttctgtcacctgactggaccctgattgtgttacgaggatttcaggaactccatgtcctcaccaacacttggtatgatgtccagttcattcaacaacatttctttaaaacacgatcttcagtgagttgcctttgcacctttctttaaaattatttgatcttatatttgttggtctatttctgcacttccttaatctgtatttttgctaatattttaaagtcttatttaacataattttacactatgtctttaaatcaggcaatgtattcctttaactttgtacttcttttcaaattttttctgtttttattttgttttgtttttggcttttctaagttcttcgcatttccatatgaattttagaatttagttgtcattttctaataaaagtattgtggattttgattgggattgcattgaatatatgtatatcaatttgaagagaattttaacgttaacaatattgagtgttgtaacccataaacgtggcatatctctccctttatttagatctttaatttttctccgcaatcttttatagtttcagtgtatatatcctgcaaatcttatatgtctcaagtatatgttgtatgctcttgtaaaaagtactcttaaatttcaattttaaattagtcattgttagtacatagaaatacaatttttatagaaatattcattatctaccctgtaaaccagaggtgtccaatcttttggcttccctggcccacagtggaagaagaatagtcttgggccacaga

SEQ ID NO: 462761 - DNA, 3828 bp, Homo sapiens
agggcagtgtgggctgatgggcacaggtggccattgcccaggagatccaaggagcctgcagaaagggcctgaggtttggggagggaccttccccagagggagttggtggagccttgtcaatgcattgaaggccactgagacctccagcgaggacgaaatcaactgaagggtgaggtgggacagaggcaccatgcctgagagtggtgctcgttccctgtgacctcagtgtcccctgtcatggtcacatggccacagagacccccatggcttcatgcagattgcctggtcccaacagcccgaggagcagagctgagctgcaggccttgcatcttcccagactcaggtagttgtccacttggggctggaggaagagacatggatgcctgacaaagctatgggaggagggactctggcggggactggctctggccttctccagtaccagacccagaattcacccagaaatactgagtgcaaggaggcctttcacattggagaagggtatcacaggtgcagtgaatgtgggaaagcctttagccacagaaataggctttgtgagcaccagagagtccacagcagagaaagaccttacaaatgcagtgaatgtgggaaattcttcagtcataactctagccttactgtacaccagagagttcacatgggtttaaagccttacgggtgcagcgaatgtgggaaagcctacagaaaaagctcccatcttgttcaacacaagaaagttcacgctggagagaggccttatgggtgcagtgaatgtggaaaagcctacagcagaagcacccaccttgttaggcataaaaaccttcacactggagaaagggcttacagatgcagtgaatgtgggaaagcctatagcagcaaacacacactcattcagcaccagagagtccacactggagaaatggagccaggccttatgaatgcagtgaatgtgggaaatcctttagacaaagctatggccttattgaacaccagagaattcacactggggcaaagccttataagtgtagtgaatgtgggaaatgcttcagctgcaaaatcacacttgctcggcattggagaatccacactggagaaaggccttataagtgcactgaatgtgggaaggtttttagccaaatctctggccttactgcacatcagagagttcacactggtgaaaggctgtgagtgcacagaatgtgggaaatcttttagccaaagatccagcctcattttacaccagagagttcacactggtgaaaggccctatgtgtgcagcgaatgtgggaaagccttcagcgttaaatctatacttgttcaacacctgagagtccatactagaaaaagaccttatgagtgtagtgaatgtaggaaattatttagccacaagtccaacctcattaaatataaaaaaaaaatcacactggagaaaaggcttaaaccaacagcctatgtggtgccagaaagttcaccctggaggaaggccttggaacgcagggaggatgctgtctgcttggtccacatagtgggtgacaccggacagaagctctgaaagtagctttgtgtagtagctatcaatcagccaaaagttaatctcacatctggacatccatgctggagagattccgtacttattttctttttctaaaactttacataaatggaataacaaaatgctgttttttgcttttttctcactcagcataattattttgagattcctccatgttgcatgtgtcaacacttcattgttttattacagactcgtgtatagctttatatagatactccacaattttgctgctcatttgttaaaggacatttggattgcttctagtttggggctattacaaataaagctgctatcaacattcatgtactagtctttcttatatgttaatacctaggagtaacaggactgagtgtttcatttctacctgtgggatgttaatttatacaggtgactaagtgacaacacagagaagccagtgccattgaaataattcaccattcacattttccaagagaaggaaaggcatcgtgccacagagggccacatggaaagcaccagtgttggtcaggaggcaggagcaaggggaaaacataggccacagcctttattggggtttccatggaaaagaccaggcagggcagagtaagcagcttgtgattagctagtttgcataatttcagcaggctttggcctacagggttggtctctggttacctggtacttggtcctggggtgctttagtgcaggagagatattggcgtggggtgtgagagttggataaagaggtaattggggctgtagactctagactggttggctgtatatgagagaggtgctctgggtcaaggcttttgccatctctaagaaagggctagccctgggaggggcagtctctccagagccagcaaacttttaaagatgtcaccataaaatacagaaaataagcataagcacaccaacttacagggtaagtggatgtttacctttttcaaactgacaaattgtgttccaaagtggttatactattttatattctctccacagtgttacgaggatttcaggaactccatgtcctcaccaacacttggtatggtcagtgtttaattttcaccattctcatttggtgtgtagtggtatttctctgtgattttactttgtatccccctaatgactaatgtttacaatttttatgtgtactactgccatccctctgtcttctttggacttttaagtgttcaaatcttttgcccatttaaactcttttctttattattgagttttgagggttcttaataagtattgaatacaagtcctccttcagatatgtgatttgccagtatagtcttctagcctatggatcttttttaccttcatcttaacagtctgtcctatagcagaaaattttactgttgacaaagttgaatgtgttatttttcctttgattgaacatatttttggtacatatctcagaagtatttgccaagatttaagaaattatctcatgttacttaattaaagttttgtacttttaggtttataatccattttgaggtagttcttgaatattgtataccatgtgaggtttggggtcacagctttacagtgttgttttttggtttttgttttaatacagatgtccagttcattcaacaacatttctttaaaacacgatcttcagtgagttgcctttgcacctttctttaaaattatttgatcttatatttgttggtctatttctgcacttccttaatctgtatttttgctaatattttaaagtcttatttaacataattttacactatgtctttaaatcaggcaatgtattcctttaactttgtacttcttttcaaattttttctgtttttattttgttttgtttttggcttttctaagttcttcgcatttccatatgaattttagaatttagttgtcattttctaataaaagtattgtggattttgattgggattgcattgaatatatgtatatcaatttgaagagaattttaacgttaacaatattgagtgttgtaacccataaacgtggcatatctctccctttatttagatctttaatttttctccgcaatcttttatagtttcagtgtatatatcctgcaaatcttatatgtctcaagtatatgttgtatgctcttgtaaaaagtactcttaaatttcaattttaaattagtcattgttagtacatagaaatacaatttttatagaaatattcattatctaccctgtaaaccagaggtgtccaatcttttggcttccctggcccacagtggaagaagaatagtcttgggccacaga

SEQ ID NO: 462762 - DNA, 780 bp, Homo sapiens
  misc_feature (55)..(55): n is a, c, g, or t
cgtaccactaatataccacaacccccaatattgctttctcttcagtcgttacccnacgcatttcaggttactccatgtcacaaccaacacttggtatgatgtccagttcattcaacaacatttctttaaaacacgatcttcagtgagttgcctttgcacctttctttaaaattatttgatcttatatttgttggtctatttctgcacttccttaatctgtatttttgctaatattttaaagtcttatttaacataattttacactatgtctttaaatcaggcaatgtattcctttaactttgtacttcttttcaaattttttctgtttttattttgttttgtttttggcttttctaagttcttcgcatttccatatgaattttagaatttagttgtcattttctaataaaagtattgtggattttgattgggattgcattgaatatatgtatatcaatttgaagagaattttaacgttaacaatattgagtgttgtaacccataaacgtggcatatctctccctttatttagatctttaatttttctccgcaatcttttatagtttcagtgtatatatcctgcaaatcttatatgtctcaagtatatgttgtatgctcttgtaaaaagtactcttaaatttcaattttaaattagtcattgttagtacatagaaatacaatttttatagaaatattcattatctaccctgtaaaccagaggtgtccaatcttttggcttccctggcccacagtggaagaagaatagtcttgggccacaga

SEQ ID NO: 462763 - DNA, 416 bp, Homo sapiens
cagctgagatcagactttgtgtgtaactccactagcctaccagggtgcctctcataaagatgaatttcttcctctgctgagtactctaaagactcactccttggcactcagggccgtggacaggagctttttactcaccaatgaagaacaccaagttaacgcgacccccgtgctgccctgaggaagtcgaagctcctcgctgcttctggcacctcagcgggaagttggttggggcgggatcgcgcgccctctggtggcgccatggttcagcacagacgctcttgctcacagtttctcggcggatgtgcgccccctcctggctgtcctgaaatacctataaaattcaatattcagtttattcagtgtcataattttggaaattcaaaccgaaataaaggccagtatatccataccct

SEQ ID NO: 462764 - DNA, 596 bp, Homo sapiens
  misc_feature (592)..(592): n is a, c, g, or t
cagctgagatcagactttgtgtgtaactccactagcctaccagggtgcctctcataaagatgaatttcttcctctgctgagtactctaaagactcactccttggcactcagggccgtggacaggagctttttactcaccaatgaagaacaccaagttaacgcgacccccgtgctgccctgaggaagtcgaagctcctcgctgcttctggcacctcagcgggaagttggttggggcgggatcgcgcgccctctggtggcgccatggttcagcacagacgctcttgctcacagtttctcggcggatgtgcgccccctcctggctgtcctgaaatacctgtaataccagctactcaggaggctgaggcaggagaatcgcttgaacctgggaggcggaggttgcagtgagccgagatcacgccactgcactccagcctccgcaacaagagcgaaactccgtctcaaaaacaaaacaaaacaaaacaaaaaacttatctaggtttagtgctttgtcctctttgggtaaatttttgattactgtttcaacttacagccattggtcagggtttcactactctttggccaaacttgggcnctca

SEQ ID NO: 462765 - DNA, 1407 bp, Homo sapiens
cagctgagatcagactttgtgtgtaactccactagcctaccagggtgcctctcataaagatgaatttcttcctctgctgagtactctaaagactcactccttggcactcagggccgtggacaggagctttttactcaccaatgaagaacaccaagttaacgcgacccccgtgctgccctgaggaagtcgaagctcctcgctgcttctggcacctcagcgggaagttggttggggcgggatcgcgcgccctctggtggcgccatggttcagcacagacgctcttgctcacagtttctcggcggatgtgcgccccctcctggctgtcctgaaatacctataaaattcaatattcagtttattcagtgtcataattttggaaattcaaaccgaaataaaggccagtatatccatacccttcccataaatggtgatggaagaattatttggaagccatatagaatgaaatgactctatacacaaattaaaacacaaaaacctactcaaaatactccagagactacaacttcaattgcaaaactataaataacctaaaagaaaacctaagagacattggatctggtgttgagtttttacacacagcatcaagtgccaattcgtgaaaatactgagaacagactttataaaactaaattttctactatgaaaaaccctattcagagaacaaaaagacaagacacactgtgtccctgtagggatgacggcgcctcctgcgtaggtcctgaggagacggctcggctccgccccctggagccgcaggccgtctgtgccggaacccgggcgccgcttgaggttctgcagcagaggcgtcacttagggaccagacttccgtgggaaaccaccatctccttccaacccagatgcgcttcatggcaaacgcgagcagatgaaggtcatgtaggagacgaaagaactcgctccccaagccccattgaagaacgtctttacaaaggctgtacaaaacctgccatattctttgtcacacagattgactcatgtgcaatgcagccatttgatgaaacactggcatttaccagatgtaaacttattagcagacgacaactagaaatagtgtgctggatgtgcccgtttatttatatgaatataaccatctctctagatgcatcgaaagatacacaacatgagatccactttatttctacaagtttatgatcaggtggtcaggacagggaaagaagaggaaaaaactttaaatcatggacctttattcttagacacctttatcctacatacacaagggacatgcatggttgaaataacggaaacaagtggataaaagtgaaagtaacttaaacagctttacccaggaatgcccaattcaggtgctgcagagaagagcatgagaaccgggtgtcttcaggacaggtg

SEQ ID NO: 462766 - DNA, 839 bp, Homo sapiens
tgtcggagatgagatcagctaataacagactcaattcctgaccttcctagttttctgagactgcatccactttgatagtttctactgagtccaaattagaacatcccagctggtgggctgtctcccaggaagccctcggagaggagcggtgcatagggggcacctggacacagcccacctcccccgagtagcgtcaggtaggcttgtctatctacatcctttcgccctttctcaggaaactatcagatgatgtgctcccccagatgaagaagtagtgccaggaaaaaggagacacgggatacagggatcctgaagccggcggaggacaagggagctcctgggaggacagctgtgctccggcctagcaatagcgagcagctggtccagactgccgccgtgactcagaagatagacatgcggagggttatgatcacagagcaacgatggtccttgtacatgaagataaaaatgctcaggtgtgcccaggttgaagaagatgaaaggccctgcctcccagagcgcccggggacactggtgatctcttccaggtctgtttccacccactgcagctgtgatggagtcttgctctgttgcccaggctagaatgcagtggcgtgatcttggctcaccaaaaattctgcctcctgggttcaagtgcctccacacccagctaattttgtatttttagtagagacgagatttcaccatgttggccaggctagtcttgaactcctgacattgtgatccacccacctcagcctcccaaagtgctaagattacaggtgtgagccaccatgcccggcctacctggagcattattaaaaccttaaacctttaaa

SEQ ID NO: 462767 - DNA, 630 bp, Homo sapiens
ttcgggagctgcagaacttcagtgtccatcagtcagaggcaatgcccctgacccagacgcctctagttgagagatagacagagctggatttatagcaccacagacctgacctggaatgagacttgcaagtatgtcagggagctgcacgctaacctaggaagaggctggccagatggagtcttgctctgttgcccaggctagaatgcagtggcgtgatcttggctcaccaaaaattctgcctcctgggttcaagtgcctccacacccagctaattttgtatttttagtagagacgagatttcaccatgttggccaggctagtcttgaactcctgacattgtgatccacccacctcagcctcccaaagtgctaagattacaggtgtgagccaccatgcccggcctacctggagcattattaaaaccttaaacctttaaaaaaaaacaaaaaaaaggatttaaaaaaaaaaaaagagaaaaaaaaaaaacagaaaaaaaagaaacaaaacaaaacaacaaaacaaaaaaaaacagaaacaacaaaaccagccacgagacaaacaacaaaggaggggccgcagcaaaaacacccaccacaggagaggagcgcaaagcagagccgccagcacaca

SEQ ID NO: 462768 - DNA, 1798 bp, Homo sapiens
tgtcggagatgagatcagctaataacagactcaattcctgaccttcctagttttctgagactgcatccactttgatagtttctactgagtccaaattagaacatcccagctggtgggctgtctcccaggaagccctcggagaggagcggtgcatagggggcacctggacacagcccacctcccccgagtagcgtcaggtaggcttgtctatctacatcctttcgccctttctcaggaaactatcagatgatgtgctcccccagatgaagaagtagtgccaggaaaaaggagacacgggatacagggatcctgaagccggcggaggacaagggagctcctgggaggacagctgtgctccggcctagcaatagcgagcagctggtccagactgccgccgtgactcagaagatagacatgcggagggttatgatcacagagcaacgatggtccttgtacatgaagataaaaatgctcaggtgtgcccaggttgaagaagatgaaaggccctgcctcccagagcgcccggggacactggtgatctcttccaggtctgtttccacccactgcagctgtgatggagtcttgctctgttgcccaggctagaatgcagtggcgtgatcttggctcaccaaaaattctgcctcctgggttcaagtgcctccacacccagctaattttgtatttttagtagagacgagatttcaccatgttggccaggctagtcttgaactcctgacattgtgatccacccacctcagcctcccaaagtgctaagattacaggtgtgagccaccatgcccggcctacctggagcattattaaaaccttaaacctttaaatttttcatcattgtgctttgtttccttaaagattaggaaagggattgtcagcggataagacttgccctcttctgctgctctctagccgtgggcaagttccttccactcactgtgtgtcattttcttcatctgtaaacacaggataatagtaacaacacctctctcctagggcctggacggggcatgccagtaaggggtcctgaagcttaggcccctgggatttggatagagaaagtcatggtgaaggtgggtgtgacattggtgaggtggcattggacacccttcagggcctctcctgtcctctgtacactccagacagtgcccatttgtgcagaggctgtcctgggtctctgcctgagggctttctctgctcctctaccccagaccaatccgaagtgtccccacgagcaaccttcaaccaaagagggacaggagtcggtgaacatgcacctcagcctcctcacctctccgaggaactttaaaaaaatcttcttaatgaattactccaaggcaaacacctctgtaaccattggtgggacattgcgagagctctcaggagtcctggggaatgagctccagttgcctacagtggttacctgctccttaagtgacacacgctttactggcctgcttttttggatttccttttctcactcatttcaggatcaccttccaaataagccatatacccaaattctcatctcaggtgtctacgcagaggacaccaagcaggccctgggacacagcaatcctgagtgtgtttggagcagaaagcagcccatggtggctggaccacagggagagatggcctgggagagtcaggcaggagcctaatcatatggtttacagccctgcgtgtgtgtgttggggttggggggggggggctgggtgtgtgtatgtgagcaacgtgtgagtcatgtgggatgggaggcccccttgcactttccttctcagcccct

SEQ ID NO: 462769 - DNA, 701 bp, Homo sapiens
aggaacgagattcatggttaacgttaacccacatgaaagctcttcccactgttggaagagaaaaacagattttcactcaatgtcttctcaattgctaggttcacttcttcatgggaaaacaccccacaattatggtagttgctgccaagagaataatggtaacaaagagaaaagaaacagttattatggagtttgtccagaaatccatccctattatgtaacagcaaatgatacaattgattccctcaaacttgggccaggagacttttttgagagaaggtgtgggtggacaaagcaaagcagagccctgacctcacaccagctggctgagctgtcttggcttgcatttgctgttccagcatttgtggagtttgaaatctgcatgcttggagtgcggagagctggatcttgcaccacagtctccctgtgggctcttgaatgagaaaaccaggggaagcagaggtaagaacctgttcaagaaggcacatctcagatgtggaagaaccatgattcaactcgagtctgtctgcttcccaagactgtggtatttaaacagcttataatgaaaattccttctatagctccccataaaagggcacacagttctttcttaacgtattatttcaggcattcattcaccattgatgtatttgtgaaggtgttctctctaaataaactattgggaccttacttgactgtga

SEQ ID NO: 462770 - DNA, 449 bp, Homo sapiens
tgaaacgacaatggaaacacagagaaggtgtgggtggacaaagcaaagcagagccctgacctcacaccagctggctgagctgtcttggcttgcatttgctgttccagcatttgtggagtttgaaatctgcatgcttggagtgcggagagctggatcttgcaccacagtctccctgtgggctcttgaatgagaaaaccaggggaagcagaggtaagaacctgttcaagaaggcacatctcagatgtggaagaaccatgattcaactcgagtctgtctgcttcccaagactgtggtatttaaacagcttataatgaaaattccttctatagctccccataaaagggcacacagttctttcttaacgtattatttcaggcattcattcaccattgatgtatttgtgaaggtgttctctctaaataaactattgggaccttacttgactgtga

SEQ ID NO: 462771 - DNA, 1379 bp, Homo sapiens
gtgggaagtcaccaggactatgttggtgaggaaactgaggcacaggccactgcatgctttcacgctcacctgcctgaaaatccccgctgcagggaaggctgcactctgggctctggggctaggaggtgggatctgcgtgtgcagcttggggactccgggtgtttccaatgcgcagcagcagtggggggcgctctgctttatggagcccattgtgcagatgggtaaacagtctctgaggggcaaagtgaccccaaaggacccacaggtcctctgggctcctgtttctgcctcctccatgacttggctgccctcagatgactggttcctgagggtgccaccatgcaggcagggtgtcctgcagagctctggggttggggccagggtccccgggtctcctgtgcccccagcactgtcgggtatgaggccccagaccctcccgcaaggaggccccatcctggaggagcggagcctgccccagctgccaggcacgcgagaaatcccagcccagccgcaccaggactacttgaattcatttctggaaaacgtcaaacatccacacaagtgctctagagaacagcctcggagccccagagaataccctggtggccgagcctccagcgccggcatctctacttgctgtttccacaccctcggccccctccaaaccatggggctgccgggttctttattctgccctaaaactaatgcaaccagacccaagtccaaccccagagccgggctccctgccctcctgtgcggaaaggacacggacacgcctggtggatggcgtggcctggacagggctgcctggcggcatgtctgtctcctcggcctcccatggcccttctgcaggatcctgttgcacccaggcctggggcccacgattaaatcgtgcattggcactgcagcatggggccaaggaggggctggcagctccttcccacttcacatacgtttgcatttcccccagagacgcgaccacttagaaacctataaatccctggcagggctgccggcctaggctagtatataaatcaggacttgtaaaagcctaatggccccctctggcgggtgagacgggcgtgtgccaagaatcctcaggcggcgccccaggactcaagtcttggtctctagctgcagatgggcaggggggcaggcaggcgccggtgccacagacctgcctggaatccccgctctgccccctctccaacctcgggcaagtcacccctgtgagcctcagttctctcctcagtacaatgaggtcacaacccgtgccttgcagaaggtcatcagcaggctgcacaagccctctaggagcccagcattcttttctggtgggctgaagggatgggggacagagcgcaaatggggccctgaag

SEQ ID NO: 462772 - DNA, 1457 bp, Homo sapiens
ggtccttgggtcagaaaacaagatcttctgattctggactctacagctgtcttgggtaaggaaactgaggttggaggaggacaccgggagcctggtcaggccgctggcagcctggagacccagaggtccaggcattcaccgccctccacaccaccgcccctccctcccaggcccaggagtcttcattcccagcatattcacctgtcaataactcaggccccccgcaatcgtcaggtgatggcctccctgtgtgtggctgccaggctagggatgggggtgtctgtgcttccctcgcccaagctgagagtggcctgttcccagggggcgggcttcctctttggttggcagcctggagtctggagtgcaggtgccgggcaggcagcactgggagcgctcggcgacttggctggaggccgaaggtgccgcccctcggggaccagagcgtctttgcaagcgtggttggggaactccagagccccacatcacagttcagcatgtgcctcaggagcttcagcaagtctttcgtggaaggagagtctgccggtgacgggggaagcaggccatcagcccgcccagcttcatctcaggccgcttccaacaccgccaagcaaactcccttggcaagatccatgcaaggccgcggctgaccaccgggaggcagcagcctactctgcaaggcactttctttacccgacccccacccccttttaacaggtggcaggaaacctgctggcccagccatctgccgcacccacccttcactcccagtcccatctccccatagcacagatttccctatcatgagccctgacgtgacctgggtgtcctcttgccttcctctgcccaaggaattcctacagagattctttctctatcctcctttgtacatttccaaggaattgtttccccagggcccctccccttgaagaaattagacaggaagctggagtagatggttccctctttcccacctctcacactcccaagctctggttaactctctgtgggccagtggctagattccccaacacagatgacaactgaacaatacacatgcagcgtaagaatgttgtcgctgccaccagccacttacagatacaccattgctaaggtccacccaactggactgtttccccctcccatagactaagccccaaaggccaaaaagtaaaacccgctaccccaaacctgcctgtaactgtttgaccagaggccagctgtcccaggatgcggttaagacgtctactttgcacaagagaactggcaagaaaaacatctccaggaagcggtcagacacatggcacaaaggacccccccccttttctttttccttcaccctgatccagttctatgtcctataaaaccttgctctagcctataagtggggctgccttctctgcttttgtcaagaggtagccaggcaggactgacaataaatcagcttgcctgaacttggg

SEQ ID NO: 462773 - DNA, 3675 bp, Homo sapiens
ccctctggcagccctggacagacataagagggcatttggcaatgtctggagacaattttggttgtcacaactggaaggtttttggcattgtgcctgcactgaataaaagcaagcagctccagttctcggggctgaactccggccacttgagctgctcttacactgtatacctgtgtctgagtactcagttcatccaccagtcagggtctgtgggacagactaggcaggtggtgccccgtgtgaggagcagcgcagtggatcatgatggaaccctcgaaaatgaacgtgaagtgactgcgcaaggtcatctcaggaacttccaggaagagtcaaataaagagctgtcacacaccctagagctggaatctgcaccctccacaccaacccctttgcacagcctgtctgctctgcatgatcctgcagctggttactgcagcctggaagagctgagacagagaagacagacgtggggagggagaataacaataataaacagaccttagacaagaggctgctgcatggatctcattcagctgtttactcaggacaataggagcacctgatcttcggagatgcctggtagagatgattgaaaagaactgatcagcattggcctctttcccccaagatctaccagggtcatagcactctgaggattattttgtgatatttcccccatggcctctccatcaactgcccatactccataagtttgtcccctgtcctctgtccagatctagactccagggcagtgaggcacaagggaaaactatcctatcacctcttctattaatagaaacaattaggagagcagatgtagcttggcctcctaagggtccctccttctgccctccttaagactgtctgaggggaagggcaagttctgaggcttctttagaacccctccccccaccatagactcttggagcagacagtgtcatctggctcagtctccagccttcagccaggaaaattctacagctttcagagcagacagagaagactcagtatctcttcaaccatcaagatgggacagactgtaagagagccctggaggtaagatgttgaggctgtttctaggctcggtggcaggctgcttggcatcatgaaggggtcaagcaagatgctactctgggatctatggtatgtctccttgaaggtatgtcctctatgtaggaccagggctggaggaagttctacatgtttgtcttcccagtaatctacaagctccttcaaggaaaggaatgtcttattcatatttgtttctcccacctaacagggcacgtggcacaaaaaagatgccaataaatatttgtgggcagaagagaggaagggaggccttaagtaaactcaaccaaatgagttgctaaccaggatgcaagccctgtcctttcccagctcagcccaatgttctgttgtgggactcctctggcttctcccttaacccttcaggccctaactcggacaatacctcctcttttacttctccctgcccttttgcatgtcaaagcagaattcatcattccgttctccaatggaatattggatattccattacagcctttaatcaactggattgatagtctctgcctcttcctcttcaccaatagtcagggatgctagagggaaaggctcagagcctgttcctcagactggatgcgaggacctccaggttacttgcagataacaaaggtcgcacagcaaggtaactgggatgaaggttgaggttagacagctctttcctggggtgaggacggaggaggggtgagtggaggaaggttgcctttgaggagggctggcaggacaaacgaggcttctttagaccagtgggaatgtgccatctggacaggcttgtttttcctaaaactcgtgaggcagctcttggcaccagaagtcagaactgagcctgggagcaggatggaaaaggtacctatgctgtctcacctggggctcagggctccagcatcatggaaggtagagttggacctctgggctctcccaggccagtggctgctgtagggcaaccctgggtcactccgagtccttaaaagtaatcatggggacctgagagacactttcaatttctccaaagaactcgtggaattttcatcatatggtaagattgaataggctaaagtaaatggttgcttttctttgcttttggctagaattatatcaacacagtgtcctcatggaaaaataaattatttgataaatgcagtttggtgggtacaatttttcaaaatatgggatccttctttttgatgttaaaaaaattgggaaccactggttcccccaaatctttctttccatagatgagaagcatgaggcccagataggtcacgcagcaggtcagtagcaggcctagggttaggaccaagtgaactgaccctagtcaactgccctctctgcacaccacatgcttctctgctttctcttgtcttcatcattcttactgaagggggagtcctctgactctgccaccccaacacctactgctctccagtggaacttctaatggagtctgacacccatgtgttctctggggtgccccactgagccccagcatctactgctatcaatattatgtccatagctgccaggggagtggtgtccctatgaaagaaaggagacatccaagatatacccctaggggatacatcagtcagattcatatttagttatgggtaaaggaaatcttgacaaattgtggcctaaccaagaaagttcttttcttccctccccttccttccccttccctccccttccttccccttccctccccttccttccccttccctccccttccctttcttccccttccctcccatcccctcccctttccccctcccctcccctcacctttctttccttttcttaccatcctttctaccttccttctctcctcccctcccctccccctccctgcccttccttgtttctttgtttctttgtttctgtcccttccatgcaacaagaagtctgggggtgggcagtcccgggcaggtacagctgctcaaggaggtcattaaggtaccaggctctttctctttttctgttctatcatcctcagtgtttagcctttctcctcatgtttgcaaagtaactgctaaatttccagtcaagaagagggtgaaaatggtcagggagagggaaaagcccactgctagaaggccttggctctgattattcaggaagggaaggcctcctcggggatagctccccctccctttgagtagaactcatctcatgaacatcactagctgcaagggacactagacatttaagcattttcctttccagcccttatactagaggaaggtaatatagaagaggattgaaatggggtagacagagccaacataaatacgcacatctcccctgcgtccttacccatcctcctctccagccttgctgttacaaggagagatgactgtgggcagccaatctttccactggtgctatggatcccatgccctgtcacctcctcacctctgtttcctgtatcttcaaacttttctgctctcttggatcttattcactttttaatatgttcttaaatcattcccatgttaaacaaagtcaaacaactcttggagcagtgacttagaggacttatagaaaaatgctgggaactaaaattgtgtttgtcagcatttgctgaccttcagtgag

SEQ ID NO: 462774 - DNA, 1255 bp, Homo sapiens
gatacggttgattcacaggatctggcagcacagggcatctctttccaagcgaaaggtggagccatttgaaggaaggcatgcagcatggaacccaagctgctgtgcaggatccgcagcccttcatatgggagccccagctggtgcacacagaacttcagcattctggttgggatgagggcagagtacaagagagggatccgaggagtgccgaccagagaggcagttcatgtagcctcattagtaaagcccccaggggctgtgactgtcctgcgcgggcttccaagtccacctgagagttctgatgctgtgctgaccccatggcacatcaggggcagcgagcctgctgtccacactggctgggagaagcagcagccaggcaagagaacaacaaacaggggcaggcagccacccaccaagaggacatgtggaaccaggcagcacgccatttggaaagcaagtctatatgggagtggtcactatcatggaaaggaaaaagaatgggaaaacctgagatttaagaaagacccaatgctgttctagaagcatcttcagaaagagcaataaagcttctttggggaagtcacaggacacagactctccagggtggaagggatcttgaagagcacagaggccaagtcctcatccatctctcgacttccttcatgactcatctgaagacggctggattggtctatgtctgtaccctaccctcaccccacaatcccagtccaccctatctcagaacaatttcaaatgcaggggaggatcagagatgaagatgttactccaaaagtatacatgcaaagatgttctggaagtgctacttcttaacttgtctggtcttatagtctgtggttgaaagagtcctccatggagaagtctactgccgaagtccactgattttcactgccgtatgatattccatcgtgtggcacgtggaacaatcaggatcatatttcaacatgagatccccacgttgatgtctcagtcttgggtagacatggtagggctggtaggaagtggtctaatgacttccattcctctgttggaacatttgggttgcttttgggtgttttgttattaaaaacactgctgctgctatcattcttttttgtacagtttctttggattccaatccataaaagcctagcatggaattgttagggatcacattttgagaacctcccagccttaaatcaaggctcaaaatgctgttgcatactctcccgagtcaacaaagcccataaatatagac

SEQ ID NO: 462775 - DNA, 1040 bp, Homo sapiens
gatacggttgattcacaggatctggcagcacagggcatctctttccaagcgaaaggtggagccatttgaaggaaggcatgcagcatggaacccaagctgctgtgcaggatccgcagcccttcatatgggagccccagctggtgcacacagaacttcagcattctggttgggatgagggcagagtacaagagagggatccgaggagtgccgaccagagaggcagttcatgtagcctcattagtaaagcccccaggggctgtgactgtcctgcgcgggcttccaagtccacctgagagttctgatgctgtgctgaccccatggcacatcaggggcagcgagcctgctgtccacactggctgggagaagcagcagccaggcaagagaacaacaaacaggggcaggcagccacccaccaagaggacatgtggaaccaggcagcacgccatttggaaagcaagtctatatgggagtggtcactatcatggaaaggaaaaagaatgggaaaacctgagatttaagaaagacccaatgctgttctagaagcatcttcagaaagagcaataaagcttctttggggaagtcacaggacacagactctccagggtggaagggatcttgaagagcacagaggccaagtcctcatccatctctcgacttccttcatgactcatctgaagacggctggattggtctatgtctgtaccctaccctcaccccacaatcccagtccaccctatctcagaacaatttcaaatgcaggggaggatcagagatgaagatgttactccaaaagtatacatgcaaagatgttctggaagtgctacttcttaacttgtctggtcttatagtctgtggttgaagtgagtttctccacttctagaacgctttaggtctgtttcctggtcctctttgaacaagtttcattaataattacgtgctgcccttctattactcctactttccacaccctgggaaagtatacacgggttctagaaatattccattaggagggccaggtaaggattcttaaatatgaatgg

SEQ ID NO: 462776 - DNA, 1879 bp, Homo sapiens
cctccagaaacggaagcctcagcctatcagcgatgcctaagtcccagtcacgataaccaaacggcgtcgcccttttacaccttcccggagcggcagtcatcccaaatacaaactacatgttccaggatgctttgggcggcagatctcgcggaagccgcgaggagagcccggccccgtctcgcgcgcctgcttccgcctccctgtggcggcggcttgttgttgtggaggccaaaatggcggctcaggcggcggcagcggcccaggcggcggcggcccaggctgcgcaggccgaggcggccgactcgtggtacctggcgcttctgggcttcgctgagcacttccgcacttccagcccgcccaaaatccgcctgtgcgtgcactgcctgcaggccgtgttccccttcaagccgccgcagcgcatcgaggcccgtacacacctgcagctgggctccgttctctatcaccacaccaagaacagcgagcaggcgcgcagccacctggagaaggcggtgagcgcgggccgggccgcgagggaggagtcgcgggctccttgcaagatctgggctgacgggtcgcgaccgcggcgggtggggggccgctcctcggcgacctgggggcgcgacctccgtcaaagccgcaggacccccacccgcctctgccggaccccaaagccaccagcctctcaagggacacgaaagcctcgccccccacgccttatttcccgtttctggtgacagggctccaggagccccgtcaccgtactctgaaagttgcctgttattgggagcaacaggatccgcaaatcgtctggttttcaggaggatcccacctgttggtggcgatggggacatcacagggtcctgaagctattagctcctcctggttcagcttccggagcatcagccccaaacgcttccacctaaagtgacttggggtaggggttggcgaaggcgagacccctggcattctcccgggaatctgaagtctggtctctcaggaacctggaagggcatgattctccttggacacagaagtttggtaatcgtggtttttggagggtcttgtgcccccatcaataatgcctggtgtcgtacgagggaagctgagacccggagtctggagttggtcatttgaggcctatgaggaggagaaacaggggttctggattccaggccccgctgttcagtttcagtattaggggaactaaaagcagctcctgctttttctccatccactggtgacttctaccatccatcagtccatcctcttccgtcagatcgcatcccaactgaaaatttttccagcttttagttaaagtaatgttttctatactgttttccttccaccaacgtttgtgaattttttttgtgttacaacataagcatgctttctttcatcttcattctttattaattgtgcattttttcccaatcagggagctatcaacttttattctttccttccccagagctacttaataaagaatcgtatgttctccgcttagaggtggtttgctggtttctacttctgaaaagcaaatggctgaagagattccagtgtcttcttggagagccaacccagtgtaacagtattttgcaatagtttgtgacatttctccttgctcattctctctgctgttctttttatttttattgttacttttattttatttatttattttttgagatgtagtcttgctctgtcacccaggctctggagtgcaatggcgcaatcttggctcactgcaacctctgcctcccgggttcaagcgagtctcctgcctcagcctcccaaactttgtgaggccaaagtgggcagattgcttaagcccaggagttcaagaccggccttggcaacatagcaaaaccctgtctctacc

SEQ ID NO: 462777 - DNA, 2656 bp, Homo sapiens
ccctgcgcggatgattctgggaaatgtcgatcggctgtgggcggcgcactgggtccgccccgctgtagcctcaggcctgacggcgactcccaggctccgggacgattctgggcagtgtcgtccccagaggtcggcggccgttgcccgctcaccagcgacgcggggcgcctgcggggacggtgaggccctgctgaggactccggccagtatgagtcccgggggcggcggcggggctcaggccctgggtctgccccgcggtgtgaccccggccggtgccttggttttcctggccttcatgtcctcctatgtaaacgcggggtgatgacggcgccgacctcttggcgctgttgtgagagtgaagtgggcgcgtggttagacgccagccacagttgtctttgggttatgtcgtcatgaagccggcgctctacagttgtgtaaccttgaacaaatgggttcagtatcttggaatttcagttttgtcatcgtttaaaaaatagatctggaaaaatgtgaacgcacaccgtgcatagtggtgaagactgaacgagctgataaagtttttaccattgttttatgaggattttatttacagagtaattgattttcctcgcaggtggcacctggtaaatggttagcccttgcggagaaacaccctgttagttcccagggagagattggcgccctggagagtgattaccagtgtgcctttccattatggtgtgtcacaggtgccgcaagataagcctgatttttcatgactgctttttcctgcccttctgtgccctcaggacactgcccatctctaagataagagcctggaaagaggactctgttggctgttggaaattgcagagtaatgcctcaggtgacatttaatgatgtggctatagacttcactcatgaagagtggggatggctcagttctgctcagagggacttatacaaggatgtgatggtccagaattatgagaacctggtctctgtagcaggtctttctgtaactaagccatatgtgatcacgttattggaggatggaaaagagccctggatgatggagaaaaaactgtcaaaaggtatgattccagattgggaatcaagatgggaaaacaaggaattatcaacaaagaaggataattatgatgaagattcaccccaaacagtaataatagaaaaagttgtaaaacaaagttatgaattttcaaattctaagaagaatttggaatatatagagaagttggaagggaagcatggaagtcaggtagaccatttcagaccagcaattctcacctctagagaaagccccactgcagacagtgtttacaaatacaatatatttagaagcacctttcattcaaagtctactctttctgaaccacaaaaaatttctgctgaagggaattcacacaaatatgatatattaaagaagaacttaccaaaaaagtcagttataaaaaatgagaaagtcaatggtggaaagaaacttttgaattctaataaaagtggggcagccttcagccagggcaaatctcttacccttccccagacttgtaatagagagaaaatctatacatgcagtgaatgtgggaaagcctttggcaaacagtcaatcctcaatcgccactggagaattcatacaggagagaagccctatgaatgtcgtgaatgtgggaagacttttagccatggctcatcccttacacgacatctgataagccatagtggagagaaaccttacaaatgtattgaatgtgggaaggcctttagccatgtctcatcacttactaaccatcagagcactcacactggagagaaaccatatgaatgtatgaactgtggaaagtcttttagtcgtgtgtcccatcttattgaacatctaagaattcatactcaagaaaaactctatgagtgtcgtatatgtggaaaggccttcattcataggtcatctctcattcaccatcagaaaatccatactggagagaagccttatgaatgtagagaatgtgggaaagctttctgctgtagctcacaccttactcgacatcaaagaattcacactatggagaaacaatatgaatgcaacaaatgtctgaaagtctttagtagcctctcatttcttgttcagcatcagagtattcatactgaagaaaaaccctttgaatgtcagaaatgcaggaaatccttcaaccagcttgaatcactgaatatgcatttgagaaatcacattagattgaaaccctacgaatgcagtatatgtgggaaagcctttagtcataggtcatccctgcttcaacatcacagaattcatactggagagaaaccttatgaatgtattaaatgtgggaagaccttcagctgtagttcaaaccttaccgtacatcagagaattcacactggagaaaagccatataaatgtaatgagtgtgggaaagcttttagcaaaggctcaaatcttactgcccatcaaagagtacataatggagagaaacccaatagtgtgattccagaagatgagaaatacttaatctagagctagcaaggccaaagggaaaaaaaaaaaagactctcctagtaggtgacattgacattggtgcagaacagggaaggatgcaaaggaggagaggagagggagaggcactgcagagatctggactcagtg

SEQ ID NO: 462778 - DNA, 2047 bp, Homo sapiens
ccctgcgcggatgattctgggaaatgtcgatcggctgtgggcggcgcactgggtccgccccgctgtagcctcaggcctgacggcgactcccaggctccgggacgattctgggcagtgtcgtccccagaggtcggcggccgttgcccgctcaccagcgacgcggggcgcctgcggggacggacactgcccatctctaagataagagcctggaaagaggactctgttggctgttggaaattgcagagtaatgcctcaggtgacatttaatgatgtggctatagacttcactcatgaagagtggggatggctcagttctgctcagagggacttatacaaggatgtgatggtccagaattatgagaacctggtctctgtagcaggtctttctgtaactaagccatatgtgatcacgttattggaggatggaaaagagccctggatgatggagaaaaaactgtcaaaaggtatgattccagattgggaatcaagatgggaaaacaaggaattatcaacaaagaaggataattatgatgaagattcaccccaaacagtaataatagaaaaagttgtaaaacaaagttatgaattttcaaattctaagaagaatttggaatatatagagaagttggaagggaagcatggaagtcaggtagaccatttcagaccagcaattctcacctctagagaaagccccactgcagacagtgtttacaaatacaatatatttagaagcacctttcattcaaagtctactctttctgaaccacaaaaaatttctgctgaagggaattcacacaaatatgatatattaaagaagaacttaccaaaaaagtcagttataaaaaatgagaaagtcaatggtggaaagaaacttttgaattctaataaaagtggggcagccttcagccagggcaaatctcttacccttccccagacttgtaatagagagaaaatctatacatgcagtgaatgtgggaaagcctttggcaaacagtcaatcctcaatcgccactggagaattcatacaggagagaagccctatgaatgtcgtgaatgtgggaagacttttagccatggctcatcccttacacgacatctgataagccatagtggagagaaaccttacaaatgtattgaatgtgggaaggcctttagccatgtctcatcacttactaaccatcagagcactcacactggagagaaaccatatgaatgtatgaactgtggaaagtcttttagtcgtgtgtcccatcttattgaacatctaagaattcatactcaagaaaaactctatgagtgtcgtatatgtggaaaggccttcattcataggtcatctctcattcaccatcagaaaatccatactggagagaagccttatgaatgtagagaatgtgggaaagctttctgctgtagctcacaccttactcgacatcaaagaattcacactatggagaaacaatatgaatgcaacaaatgtctgaaagtctttagtagcctctcatttcttgttcagcatcagagtattcatactgaagaaaaaccctttgaatgtcagaaatgcaggaaatccttcaaccagcttgaatcactgaatatgcatttgagaaatcacattagattgaaaccctacgaatgcagtatatgtgggaaagcctttagtcataggtcatccctgcttcaacatcacagaattcatactggagagaaaccttatgaatgtattaaatgtgggaagaccttcagctgtagttcaaaccttaccgtacatcagagaattcacactggagaaaagccatataaatgtaatgagtgtgggaaagcttttagcaaaggctcaaatcttactgcccatcaaagagtacataatggagagaaacccaatagtgtgattccagaagatgagaaatacttaatctagagctagcaaggccaaagggaaaaaaaaaaaagactctcctagtaggtgacattgacattggtgcagaacagggaaggatgcaaaggaggagaggagagggagaggcactgcagagatctggactcagtg

SEQ ID NO: 462779 - DNA, 1874 bp, Homo sapiens
ttggaatccagaatgccttccacattttatttctgataacttcctttttttccatactatttcatccattacatatatttttcccatttccattatcacactgtgttcccacttctgtgaactctgtattctctgctccatttgagcactgttcagaaatcattgaaatatttcagttgtcagaactatgtgttttctgggggcttcatttctaatccagttctcctaattccaatttagaagtttcttttcaaatagttaaaaaaaaacaaaacagtgctttgcttttttgatgtatttcagattgggaatcaagatgggaaaacaaggaattatcaacaaagaaggataattatgatgaagattcaccccaaacagtaataatagaaaaagttgtaaaacaaagttatgaattttcaaattctaagaagaatttggaatatatagagaagttggaagggaagcatggaagtcaggtagaccatttcagaccagcaattctcacctctagagaaagccccactgcagacagtgtttacaaatacaatatatttagaagcacctttcattcaaagtctactctttctgaaccacaaaaaatttctgctgaagggaattcacacaaatatgatatattaaagaagaacttaccaaaaaagtcagttataaaaaatgagaaagtcaatggtggaaagaaacttttgaattctaataaaagtggggcagccttcagccagggcaaatctcttacccttccccagacttgtaatagagagaaaatctatacatgcagtgaatgtgggaaagcctttggcaaacagtcaatcctcaatcgccactggagaattcatacaggagagaagccctatgaatgtcgtgaatgtgggaagacttttagccatggctcatcccttacacgacatctgataagccatagtggagagaaaccttacaaatgtattgaatgtgggaaggcctttagccatgtctcatcacttactaaccatcagagcactcacactggagagaaaccatatgaatgtatgaactgtggaaagtcttttagtcgtgtgtcccatcttattgaacatctaagaattcatactcaagaaaaactctatgagtgtcgtatatgtggaaaggccttcattcataggtcatctctcattcaccatcagaaaatccatactggagagaagccttatgaatgtagagaatgtgggaaagctttctgctgtagctcacaccttactcgacatcaaagaattcacactatggagaaacaatatgaatgcaacaaatgtctgaaagtctttagtagcctctcatttcttgttcagcatcagagtattcatactgaagaaaaaccctttgaatgtcagaaatgcaggaaatccttcaaccagcttgaatcactgaatatgcatttgagaaatcacattagattgaaaccctacgaatgcagtatatgtgggaaagcctttagtcataggtcatccctgcttcaacatcacagaattcatactggagagaaaccttatgaatgtattaaatgtgggaagaccttcagctgtagttcaaaccttaccgtacatcagagaattcacactggagaaaagccatataaatgtaatgagtgtgggaaagcttttagcaaaggctcaaatcttactgcccatcaaagagtacataatggagagaaacccaatagtgtgattccagaagatgagaaatacttaatctagagctagcaaggccaaagggaaaaaaaaaaaagactctcctagtaggtgacattgacattggtgcagaacagggaaggatgcaaaggaggagaggagagggagaggcactgcagagatctggactcagtg

SEQ ID NO: 462780 - DNA, 1215 bp, Homo sapiens
gcggcaggtcctgacgcggcataagcatgagtctgagcccagaggaaacttctgctgccacaattgctgcgtgtgctcatggcttgggtttgcggcctcatctggtggactttctggcacagcccttcctcaaggttgctgcatctgaagctctttaagacggcgtttcccttctgccagattgcactctgtgcacagtgcagttgcttctccctgcggagtgagatgggcccacattggctgtggctccacctggccttggtgctcttgccgccccctgctctgctgctcccttcatgtgagaagggtgtgttaagagtccccctaccactgcccaggcaggcccaggaagtgtcccagcagtgcccaagaaggtcacctccacctgtggaatccacagtgtgggtagcccccagggagccacagccatgtagacccagattcacaggaggatgcggttactgcaagcatctgaacctggccccaccacctatgggcagagttggttccagctcagtgtgtccatgggatgtctttaggttcaccttgcttttctgttcccacgctcacatgttggagctaagctgcatggagtgtcgttctccctgtacatatgagattagtcagcaatcctgtctccttccatattctgtctttatttctgcgacactatttctggagaacattgtatttgtgcttttcctttgatatgtttgtaattttcgttagaaaacccttttagattctaaagcttctacattcagtatttcaatcaatgataacaaactggtgtaagactaaatataaaatacaaacacatttccataaatcaacacatttccataaattgctgttataatgtctgccacaaaaagttcagttgtttgtatgtttttcaaatgtgctttgcttgtcttgatgatttacaactgttggcactgctgtttaagtctgttctgacagtgagaaagtgactcatttggcaaagtcagctgttttttactaaaagtgaatagtggtgagtggaaaggggcttgtatacaattttcttgtcaaagaacgatgaccggcaaataagcaattttagttccttggatttgagcaccactcttgcatgcctccaccaaccagcttgtctccacagagcttccttcctcactttacactgaaaatctgttatcagtgtgtggaaaataaaaattttacacatcttta

SEQ ID NO: 462781 - DNA, 2417 bp, Homo sapiens
caaaagcctgaggcgacccaggcccaggcagtgagggagcacttgtgtccagatggcattctgtccgcttcctcctccagccggtgctcagtgtggcacaaactgggcaagaccattctcacccaaccctctgctgagccctaggtgtacctgctgttggcaaatgtttccagctgcctggcaagctcaagagcagacagttctgactttcagaaggaggggctgtccagggagaagaggaacatggaacagaaagcattgacgttgaggtatttgagataacatttggggatagcagaagcatcctgttgctgttctgcagcatcccacactcatgtctgggcctccttcctgtctctgctctctggtcacgctgtcacttgtagactgttctgcctagaagccatgtgtgggccagcttgcacctaacagacattaggtagcactaaaacagatgcacactgccctgtgaggggcatgggaatactgtaatgggcatgaagctgcattataatagatcttaggaaattctgactctggcagctgagttgatggcagtgagaagtggcgtccaggactgggactgagccccacggtggtgagacatggcgtccaggaggaggactgagccaatggtgatgagacatggcgtccaggaggaggactaagcccatggcagtgagacacagcgtccaggaggaagactgagccagtggtgggcagctctggcaggccgttctgtttgagatcaggggttcctgtaattgatagcatcccagctcaagctcacagccaccttttcactctctgccctctgaggccagggaagcccactgggcccatgtgcaagtgtggtcctgaagtccatcaccaggttccccctttactgacaccccttccctgtggctcctgcccccctactcctggatctcccttctccacacagccagcgacctctctcagcagccacctctctgagggctgggctcggatgtgaatgatgttgagacgtgagccacagcgcaaatcagatagaagcctctgggcccatatagtctatgcctcactcatgaacaccaaacacatctcattttctgtgctcgacaagggcagcgttgagaggaacagtggatccctgcaccattatcccccaaaaccaggacttatctactgtagggaagaaatgtgtaggacaattgaagttgacccctcagggaaaggcaagaatgctatcttccaagatggagctgatttagcctccacatggagtcgctggaaacctcatggggaggaaaccagaaacagaaatggaaaaactagattttgtccaacaatggaggaaccacgtagaaagtacagtgcatcaatatcccagactatgcagccacgagacaatacttgtgacaaaactggcttctagcttcccatcctgtgaaaaacagcagaacccccatggtgcacccactgtatgcaggtggacagagccagggaggaaagggtcacagaagaaaacatttttgtcatggtggaattaacttattaccccaggtggaaaaatgactgcatgtgtgctgggatccttttcaaatgttcaaattatttttttttttaaatccagagtataatataaaaaggactctgcaaggaatagaggagtttattcatttaccttctagctggcagcttccccacttccagagttcgcctattttcttgacatatatgaagctcagagaaaatcagtttcttttgaacttgtacgtttcttcaaagggtagagcaatttgaactccctgcctattgtggttttcttaacaagccaaaaaggacacaacacataatgcttaaatctgcaagtacaaaagcctcttcttggatttaaagttgggaaacatctcctggggaaagtgtaactattaacgcaaagtatttggtattcactgtactggaggagaaaaagttctatacaaccatacttctggaacctgacctatctgtttaattacttcaccaaagaagtgtttaaccctctgcaaatccaacttcgtaatttatcagtccagtcgctgtgcctatgaggaaacataaattgcaatcatcttgcatttgcacagcagccaccaacttacagagcactttcacatcttttggtccatttcattcacgaacactcatcttcccgccccagagcccagtgaggagggcagggtaaattcctgtggtgctggagctgtgaataactaatctaatctgtggaacacagctcctgccctctcctggcttaccctctgagttcaggaagcctcaggaactgtttgctccttgatatctgggaagtgttgcacagagcagttctcacccttgtgggagcctggcgtagaggcagaaggccttacagatacagagtggggctcttc

SEQ ID NO: 462782 - DNA, 1583 bp, Homo sapiens
ttcttacagaagagctgggactgcgccctgtagcctttctcctagccctcatgtctgtgtgctgtggctgccgctgctttaatattttagaggccctcaaaatcacaaactatgctcaactcactctctacagttctcataacttccaaaatctattttcttcctcacagctaacacatatactttctgctccccagctccttcagctatactcactctttgttgagcctcccacaattaccattgttcctggcccagacttcaatccaggctcccgcattattccggataccacacctgacccccatgactatatctccctgatccacctgacattcactccatttccccatatttccttctttcttgttcctcactctaatcacacttggtttatcgatggcagttccaccaggcctacttgccgctcatcagcaaaggcaggctatgctatagtatcttccacatctatcattgaggctaccactctgccccctccaccagctctcagcaaatgatgtaaatcttttcttttgctgagccatgcatatttttggtattgtgacatgtcgctggacccaacacctacaggattggatcagaggctactgaataagccctgcccataggcggccttgtgacatatgtctgcatctatcgcctaagtgatgtgactctttttctgcctgcagcctgcacatagagaagattgtgacatatagctctgcccagtaaccaggtgatgtgtcttttctggcaggtcttttcccacagggagcattgtgaaacatcactgggctcagccaccaggttatgtgactcttctgcctgtgccctgcttccagaaaatattgtgacattcctcatacagcatccaggtgatgtgactcttctgctcattttctacttacaggagacatgcccaaaaaagggattgtggcatatctctgagcccaacacccaaatgttgtgactctcctgcctgagctgtgcctagagaaaatattataatatgtcaccggaccctgcatgcaagtgatccaattctccagtctgggccttgcccatagaggagattgagacatattccaggtgaagaattcaggtcatgcaaatggaggcggattttgacatatcataaagccaacataatacacagtctgcaggtggaattgggactctcatgcatggatccagttcatcattgatactgtgactcatgtacttggatgcaactcacaggaggtgttgacgcttttacctgaagctgggacatgtgtggaattgtgaatcctagccctagatcttcccacaggtgggattttgacatataactgcacccagcacacaggtgaagcatctcgtatgctcatcctgccaaaagttatgagtgtcaccctcacacatggacagagacctctggttaggtcttgaatcttgtacatggacacagtccgcagttggaatgtcatatgtagatccagccacaggtgtgatgttgacctatttataaagttagctcacaggcacattgataactctcatacctggatccagccaataaaagatatgttgactattat

SEQ ID NO: 462783 - DNA, 4507 bp, Homo sapiens
tcccttgcgccctgcggtagcccggggctgcccagggctgcgggctccaggcacccagagcgctgcgaccacatgaaaggcccggcgctcagcacccgccagccacctccagctggtttctaactacaccgccggggcctccatgcttctcagagaccagccttcgaagtgccgccttacacccggggcctggccaccgggcgggcgcggatggagctctggtccacatttgggagctcacagttgttcctgccaggaaccagccagaacaggaggcagccagggagaggggagccagggagaacgcagcctcagtcctggaaggagagggcctgctgggaagaacagaacccagctgtcttggccccagatgtggaagctgagacttaaagaagctatgaaacttgatcaggtcatgcagcgccagaggacccaaggtgggatctcaacccagactgtttggctccaaagctgaactgctacattacgttgcttcagcaaacagtcattcagagacaatgggctttagaggagtttagtgatgttactaacaaacataagtaccttgtactaacctcctggtgcccaagtgtttgaggtgagaaaaactgaaacatgaaaagcccagagaggtaaagtgactggctcaagcaaatacaggctccagctgcagccactttgaagataaagtttcctccatagaaattctgcaatacagatgtccttccgcggtcccagttcagtcctgcaccagttccttttcccactgggaaatttctttcctcttcctacttccatgcaactgcgaggcaaggctcaagcccacttccttctccttttcctgtgcctccctgtggagggagctccctcttcttcacagctccaggctcttccctactctggcccaaccttatgggcattttgctccataactctcctcgatctgaactgcttctgatttctctcaagtcatatggtagaagcccagcaggtagttctctaacagcagtcgtgatggacagtttcataatgaacagctatcacaatagccagtcagccctagacaatgtagcctctcaagttgctgcctttgctcccccgcaaaggagaggagcacaggagcttgcaggcagccacatttcaagtcataatagccatgtgggaccagaggctaccataaaggatgtggtacctctgagagctcgctgcccctggatgccaaatgaggtcctgagtggccatcctctaccactccctgggaacaaacaggccatgatcccttctggacgatgcagcttctgccctggtcccagactgctggggtgctgggctctcacctgcctcaccaggggcaagttcagcggtacaaaagcacatggctgccctctcttctttttcttcctcttcctcctcctcctcttcctcctcctcctcctccttctcctattcctcctccttctcctcctccagctgctctcccctcctcctcctcctcctgctttccttctccatgtgccaagcctgacagctttcaccaggagaactgagaagcctctcccgagggtggacataacctcctccgaagcagcagcagggctgcaggaccaggtgcacaggcggcggcttggagggcccttgcacagaccactgtgttttgcaaccaggagcggaagggaggctcagaaaacatccccaggagcaatgaccctggtggcctgagggctatttctcccatcacataagcaactactgtctggggtttcaaaatcctttttcaggcttcatcactaaaaagtgttttactcccaaatgacctgttgtcatcctcctgatcttctagagcttttttttttttaaataaacccctccccttgctcaagtaggacatgaatgatgtgatttaaggaaaagagaggggcagagagccccagtgcctagaaataaccacagccagtagcccttacacctgtaagtgttacttttcttctcattttatgtatgaaaaaaattaagtccagagagcacatgccccttctaacctgctgtataagttacttatttgtttcacttactacgtgcctttcccaaccataagctgcacgagggcacaacttcatacctcctctgtgcatcgctgtatcccaaaagccttacacggtgcctggagcacagtgggccctcaataaatattggtcatgtatggatggcggtgttcagattgtgaaaattcatgattggtgcacttttctataatgtatattacacttttctgtacatatgtgtattgtacttaataaaactgggttttaaaagacttgtcatgttaccaactcctgcttcaatcaatatttgtttattcatctgtaaaatgggtatgatgatggcaatatgacagtgcccatctcctacggttaataggataattaaaccagttaatatatgtaaagcacttagaacacagcctggcatgctgtcagcattatataagagcctgtgattccatccacgagttgggcaatgtatgcaagcacttaagttttgtcacatgcaaaaatatctttgctgagttgtgatttgatgttataccctagtttttatagagggtggatgtgacaaatagttattgaagaatgtgtcagtgtcactgacgaagctgaggacattgttcaccatgttgcacaacgccctttatctcaacattcccatgctcgctctgttcctcccggagctgaacatcaggaaagaccatgtctctccagaccagcacgtgtgatgtctgggagcagcacaagacccctttggctgtcaggaatttggaaataaaatgaaaggtgctgttcattggcttaagctgaggtcctaggacattctccttttcctgttgtttgttttctttatcaaaaacattgttttaactttgatgtttttgaaatggaaattgttttatagattatttctgattttaaaacatatgtatcttgattgtaaagaaaaatattaatattttgatgtatccccttatagatgtttgtatatacatttgggtatgtataatgtacgtgtgtgttatgtatattatatgcatctgtatgtgtaaacatggatatgtgtgtgcatatgtttttggaaacaaaattttagaaaagggaaaatggtgccatactgttttgaaacctaccatttgcttttagcttactgcagacattttaaggagttacaatacctcagggtatgcttgttgaaaaagaaaagaagttacaataatagcagtcataactttattcattcatttagcaaaatatgtatgatacccccaactgtggatggaaaatatttcttaaaaatacaataacaagtgggcggccgacaagatggctgaataggaacagctccagtctgcagctcccagcaagatcaacacagaaggcagtgatttctccatttccaactgaggtacccagctcatctcattggtactgattagacagttgatgcagcccacggaagctaagggaagccatgaaggactgtgccttgaggaacggtgcattccagcccagatactacgcttttcccatggtcttcgcaacccatggatcaggagattccctcgggtgtctgcatcaccagggctctggttttcaagcaaaaaactggatggccgtttgggcagacactgagctagctgcaggagttttttttcataccgcagtggtgcctggaatgccagcaagacagaaccattcactcccctggaaaggggactaaagccagggagccaagtggtctagctcagtggatcccacccccatggagcccagcaagctaagatccactgtcttgaaattctcgctgccagcacagcagcctgaagtcgacctgggacactcgagtttggttgggggagaggcatccgccataactgaggcttgagtaggcggttttcccctcacagtgtaaacaacgcctctgggaagtttgaactaggtggagcccactacagctcagcaaagccactgtggccagactgcctctctagattcctcctctctggtcaggacatctttgaaagaaaggcagcacccccagtcaggcgcttatagataaaactccctgggacagagcatctgggggaaggggtggctctgggcgcagtttcagcagacctaaacgttcctgcctgctggctctgaagagagcagtggatctcccagcacagtgctcgagctctgctaagaaacagactacctcctcaagtgggtcccggacccccatgcctcctgactgggagacacctcccagcagggatcaacagacacttcatacgggagagctctggctggcatctggcaggtgcccctctgagacaaagcttccagaggaaggaacaggcagcattctttgctgttctgcagcctctgctggtgatacccaggcaaacagggtctagagtggacctccagcaaactccagcagacctgcagcagaagggcctgactattttaac

SEQ ID NO: 462784 - DNA, 2433 bp, Homo sapiens
tgcacaggaacgagcaaagacagctagcctgtgaggctagaaccaagatggagtcagccatgtcagatttctctgattgtcataattttgcaaagcgcccgcctggcaggacgactgagcaaggctttggaaaaccagagagattagagcgaagcccccagaaactccgcggtcggcgacccagcccgagccgcctgaggtcccaaggggaagctgaacgcctggtgggctcccgggatggttcttcccgttctttgtgccgccttcacccagtgaaggagcctgtatccaccctgctcagtcgcttttgggctgctgcggagcttccgctgccatcttcggatcctgtgttccccaccggggctccaccagggcagggatggtgcagaatggggaaatggagagagaacctgaaagagccccaaactcgaggacctattgctccccaagaataacatcttccagaactagacagaaactaagcgtctggaaaccctgaaatccttggaggagtagcatcatcctgaccctctgtgctccttttggcaaaggacttgcttccattgtttgtttgttcaattgtctgtttgttaaataaataaaactcttttcatatatctttaaaagtacgttggttctattattttatgattacaaacaatgctgcagtcatcattcttctacacttgtcattggccactggtatatttccatagggtggaggcctggagagcagttgttccagcatagtgcttacatagattttatttcattccgttttctttcctttgttgctttattagctataacccttttcttatttcagtggctgctttagggtttctgggatatgtctttaatttatcacagtctgctttcaggtgtcattatgtctccctttctggcctttatcctagtgttatgtaattttactttatacattataatccttgtgattcattattattacttttatttattacaccaaatattttttaaaagatttaaattctaagaaaatgtgtagtacatgctttctaaatgccatttccagtattcgtttctttgtataggcccacatttttatctggtatccttttgcctctgcctggaggacttttaataagatttcttgtaacgtgggttggtgaattgttttagcttttgtatgtttttcgatgtccttatttcactcacagttttgaaattttatttttgcatagaattccaggttaactttttttctctgggtactttaaaaatgttaccatttatgaagcattgccattataatatcatctttctttcctgtgtttgtaagaatggcataaagccggtttcttgcggtggttatataattttcagaatgtgtacttaaatttaaaatattaaattttactaaaatactaaaaatattaatcatgaacatcctagattcatcttaaattccaccaacagtgcacttaaaatgtgcccaacctgagggtcaaacctacctgctgacgtgtaatttgtgtttgtgagacattctcaacagcatttgctttccctagctgagtgattttcctcacatctgaatgtcttcagtacaaaaggaaacctttgtctttgcaaaaatactttcaaatattcttacttcaagtaagtgcattaaaaacaaacttctcagttgcatccctggaatccgtggaaagcccgggagagacagtcaagtggttcaggatcaagagctaaacaagggaagacaaagcgtggcttcttcactaggagtccagccaaagtcaactgatttggtctccagtggaggtcggaactcggttcaccagcgacgtgaggacccggcccagaggaggcggactttctcttcctggtgccttcagataggaaatctagaatttctttctttccctttgatctacttctaactctcccgttctatttcttcaagacctttttcggatccctactgcgaaggacctaaggggccgatgcccttccctaacggtccctccctggctgagtgtcttcggagcccaagctcacctgtaaggttactgccctccggagacagcgagaggaccaaggagggcggcgggtgcggtgggaaccacagagtcaccgcgcacctgcgcctcgcgggctcctagcaaattgaataaatgatccctgaagcttctctgcaggtcacagggaaggggagggtaggggtcgacccgcggaagaagcttcaagaagcatcgggaggacctggccctgcctctgggccttgaaaacaggcctggccaggctgattttgtcgcgtaggcccaaagaaaagtgtcaagggcggcccaaaccctgacctcgagattaaggctcttaaatgtctgacggttttgagactcgtctgtagaatcgatcccgcctgtatccggagaccggagactcctttgc

SEQ ID NO: 462785 - DNA, 2199 bp, Homo sapiens
tgcacaggaacgagcaaagacagctagcctgtgaggctagaaccaagatggagtcagccatgtcagatttctctgattgtcataattttgcaaagcgcccgcctggcaggacgactgagcaaggctttggaaaaccagagagattagagcgcagaatggggaaatggagagagaacctgaaagagccccaaactcgaggacctattgctccccaagaataacatcttccagaactagacagaaactaagcgtctggaaaccctgaaatccttggaggagtagcatcatcctgaccctctgtgctccttttggcaaaggacttgcttccattgtttgtttgttcaattgtctgtttgttaaataaataaaactcttttcatatatctttaaaagtacgttggttctattattttatgattacaaacaatgctgcagtcatcattcttctacacttgtcattggccactggtatatttccatagggtggaggcctggagagcagttgttccagcatagtgcttacatagattttatttcattccgttttctttcctttgttgctttattagctataacccttttcttatttcagtggctgctttagggtttctgggatatgtctttaatttatcacagtctgctttcaggtgtcattatgtctccctttctggcctttatcctagtgttatgtaattttactttatacattataatccttgtgattcattattattacttttatttattacaccaaatattttttaaaagatttaaattctaagaaaatgtgtagtacatgctttctaaatgccatttccagtattcgtttctttgtataggcccacatttttatctggtatccttttgcctctgcctggaggacttttaataagatttcttgtaacgtgggttggtgaattgttttagcttttgtatgtttttcgatgtccttatttcactcacagttttgaaattttatttttgcatagaattccaggttaactttttttctctgggtactttaaaaatgttaccatttatgaagcattgccattataatatcatctttctttcctgtgtttgtaagaatggcataaagccggtttcttgcggtggttatataattttcagaatgtgtacttaaatttaaaatattaaattttactaaaatactaaaaatattaatcatgaacatcctagattcatcttaaattccaccaacagtgcacttaaaatgtgcccaacctgagggtcaaacctacctgctgacgtgtaatttgtgtttgtgagacattctcaacagcatttgctttccctagctgagtgattttcctcacatctgaatgtcttcagtacaaaaggaaacctttgtctttgcaaaaatactttcaaatattcttacttcaagtaagtgcattaaaaacaaacttctcagttgcatccctggaatccgtggaaagcccgggagagacagtcaagtggttcaggatcaagagctaaacaagggaagacaaagcgtggcttcttcactaggagtccagccaaagtcaactgatttggtctccagtggaggtcggaactcggttcaccagcgacgtgaggacccggcccagaggaggcggactttctcttcctggtgccttcagataggaaatctagaatttctttctttccctttgatctacttctaactctcccgttctatttcttcaagacctttttcggatccctactgcgaaggacctaaggggccgatgcccttccctaacggtccctccctggctgagtgtcttcggagcccaagctcacctgtaaggttactgccctccggagacagcgagaggaccaaggagggcggcgggtgcggtgggaaccacagagtcaccgcgcacctgcgcctcgcgggctcctagcaaattgaataaatgatccctgaagcttctctgcaggtcacagggaaggggagggtaggggtcgacccgcggaagaagcttcaagaagcatcgggaggacctggccctgcctctgggccttgaaaacaggcctggccaggctgattttgtcgcgtaggcccaaagaaaagtgtcaagggcggcccaaaccctgacctcgagattaaggctcttaaatgtctgacggttttgagactcgtctgtagaatcgatcccgcctgtatccggagaccggagactcctttgc

SEQ ID NO: 462786 - DNA, 438 bp, Homo sapiens
gctgcgtctaataccacctccacccctcatccctcacaatgcgcggaaaaccacaggcggctgtgcgcgcagcgtcggctcagccaccgcagctcctcccctgggatgaaaaagcactctgacgtcttgaaagctggcagctctctgtttggaaaatctctgcccagtgaaaaaatgtaccgacaagattactaagtaacacagtcttctgggaatgccttatcaatgccagctatttgaagagcacccaaagtcaaactagtgctccgcgctggcagtctggaaaaggcagatgtatgtgagtagagaaactgatagacaactagttgctggccagttggcctgttttcgtgctacaagccttcagaaaacagtcgcctccttttaccacgtttctatttctaaaccaaaatgaaaaggacgtttgttcaaaagata

SEQ ID NO: 462787 - DNA, 667 bp, Homo sapiens
gctgcgtctaataccacctccacccctcatccctcacaatgcgcggaaaaccacaggcggctgtgcgcgcagcgtcggctcagccaccgcagctcctcccctgggatgaaaaagcactctgacgtcttgaaagctggcagctctctgtttggaaaatctctgcccagtgaaaaaatgtaccgacaagattactaagtaacacagtcttctgggaatgccttatcaatgccagctatttgaagagcacccaaagtcaaactagtgctccgcgctggcagtctggaaaaggcagatgtatatttcagtcagtaatggatattaccaccagcatttaatcaaggaagcaggaagtgatccatcactgctagctgctatctacaggaattctgtctacaggcagggcagaccagtcagccagtatcttcccgaagtaccttggtcttccaccatccatcccactgagagagccgttcctctaatgaggcatttctaagcagctgtccattgaactctaccccttgagatatcctgagaaataggaatctatggttcctattgtttggaaagtagtatatcttccttgaagattcacaatgcgtattaatatgcttagggctctgataagtcctgtattaaaaatgcttgttaaactttaaaaagaacctag

SEQ ID NO: 462788 - DNA, 954 bp, Homo sapiens
gctgcgtctaataccacctccacccctcatccctcacaatgcgcggaaaaccacaggcggctgtgcgcgcagcgtcggctcagccaccgcagctcctcccctgggatgaaaaagcactctgacgtcttgaaagctggcagctctctgtttggaaaatctctgcccagtgaaaaaatgtaccgacaagattactaagtaacacagtcttctgggaatgccttatcaatgccagctatttgaagagcacccaaagtcaaactagtgctccgcgctggcagtctggaaaaggcagatgtattgttaaacaggaaatggagaaacaggcaccaagaagaaaggagagagatgaggcgttctatgaacatctgtccctgatgaattccaaggaaagacgggcccactcatgagagatctactaccccccgcaacccatgtattctaggatccacgcagctcttttcagaagtttcatcagttatacctgcttccctgagagctgaatgttctgactaaaggcaagttttgctctcctatagccacaatgtgggcattcattagctatgccaatcagttgctcagactcggactttgaaccggggctaacattacaaagaagtggaagccatgaagaatctattctgtgggaggcctagggtcacaacagcagcaacatcaagttttcaagaacagaagcagtgctctgagctgatatactctataaatgatgtccttctgctccacatgcatgcggaatcttttcactttttcaaagatggctttggcctgttcaccctccttcttgtccaggacactggaagttgggctttctatgccagctgactccaaacctggctgtgggtagggcaatgactgtttgccggaatctatgtcagctgaacaccctgaggacgaaagcaaaatcttggacttggagagtttcagaggcctcactga

SEQ ID NO: 462789 - DNA, 468 bp, Homo sapiens
cagtcctcatttgaaaatgagaggattgggaaagatgtcttcttagggcttgtttggtgtgagaattttatacatagatattaaaattatacatgtttatcctccttagatttcagtcagtaatggatattaccaccagcatttaatcaaggaagcaggaagtgatccatcactgctagctgctatctacaggaattctgtctacaggcagggcagaccagtcagccagtatcttcccgaagtaccttggtcttccaccatccatcccactgagagagccgttcctctaatgaggcatttctaagcagctgtccattgaactctaccccttgagatatcctgagaaataggaatctatggttcctattgtttggaaagtagtatatcttccttgaagattcacaatgcgtattaatatgcttagggctctgataagtcctgtattaaaaatgcttgttaaactttaaa

SEQ ID NO: 462790 - DNA, 1528 bp, Homo sapiens
gctgcgtctaataccacctccacccctcatccctcacaatgcgcggaaaaccacaggcggctgtgcgcgcagcgtcggctcagccaccgcagctcctcccctgggatgaaaaagcactctgacgtcttgaaagctggcagctctctgtttggaaaatctctgcccagtgaaaaaatgtaccgacaagattactaagtaacacagtcttctgggaatgccttatcaatgccagctatttgaagagcacccaaagtcaaactagtgctccgcgctggcagtctggaaaaggcagatgtataaaccaaaaaggatggagttcagagaccttccatgttgatgaacaagaacacattcacctgctgtaggggtaggtgtaccccaaaactccactgatacagaagcttctatactcaagacccttctatactcaagaccctggatcttaccctatatatctcttcatctggctatttatttgcatcttttaatatatcctttgtaataaactagtaatctagaaagcaaacttttcctagctctgtaggccattctagtaaatgattaaacctgaggaggagttatgggaacctttgatttgtagacaagttggacaaaagtggtatatatcctaatataacatgggaacctgccacttatgattggcgtgtgaaattgggggatggggaagcagtcttgtgggactgagcccttagcctgtggggtctaatgctatcttcaggtaatatcagaactgagttaaattataggataccagtcagtgtccattggagaattgaattattgtgaggagaaacccacacatttggtggctaaaagtattgatgtgagtagtagcatataggagttttttgctatatacatatgtagtgtaagtttaaagtaaaaagttttgtattgtcaggagtgacttctttgcacctaaatatcactgctataactgcgttactaaggaatagttgcttgcttttatgtatttggcacctgcagctactgttctaaaaagtttgcatgtgttaacctattaattaaatctacaaatgactggctgtacccatgaagtgagttattctaaagacaatggaacatttaaatggtttagaaattttttgattaaaaatacattaataatatctcctaaagaatgtggagcagggaagtgtcctcgctgtgaagaggccgtcgaaaaaagacctgaaggaggtgtgagggtgggcctgtggctactggagaaagaacattttgggagaggccctaaggttgggagactccctggtgttttggaggaacagcaaggagtccgagcagccgctgccattgcactggctgcagccaggcgggacccactcccaggcccagagcctctgccactctgttaccctggccccgtgtcatctctcttgcctaccgcctctgtggggaggtgtggggaggaggtggatagtccccggaggagcctgcccctgggagccccctggagcctgctgccctgggagcctccacgatgagg

SEQ ID NO: 462791 - DNA, 2780 bp, Homo sapiens
tttgttacaagtgtatccaatgtccccagaacgagggacttgtggggcgcggctcatcccagcgccacttgctctgcagctcccagaggtggtggttgtgttacgaaggctgaccctgccaatggccgacaaaatggtgcgcacccccaagtgctcgagatgcaggaaccatggcttcctggtgcccgtcaagggacacgcgggcaaatgccgctggaagcagtgcctctgcgagaagtgctacctgatctccgagcgccagaagatcatggccgcgcagaaggtgctcaagacgcaggccgccgaggaggagcaggaggcggccctgtgtgcgcaggggcccaagcaggcctccggggctgcggccgccgcccccgcccccgtccccgtcccggccgcgagcctccgcccgctgtccccggggactccctccggagacgccgacccgggacccgagggccgcgcggccgcttgcttcttcgagcagcccccgcggggccggaaccccggcccgagagccctccagccggttctgggcggccgcagccacgtggagccgagcgagcgagccgccgtggcgatgcccagccttgcgggacccccttttggggcggaggccgcaggcagtggctaccctggccccctagacctgcgcaggccgatgcggaccgtgcccggcccactgttcaccgactttggtaagtcgtggccttggtcccgcggtcgactcccggagctggcagcccaggccagcccggatggggagctggcataggggttcggggtggagagaagtttttccacgggtaacggaccttccgctttgagaaacccttcttcgaacagggatttggattgggtaacttttcgcaaaaaggaaacgagaaacagaaaggaatgggcggttcagagggcttttaacatttagctgtagtttgtgccattccggcatgcaagaacaaaatggcgtccagtcgacttagcagtgcttcctcctccgggggaggcttcgaggagccgagtcctactgctcttgcgcacctcttcccgccatttccttgggctggaggctcctcctccagaataacagaattttcctgccggcacgttagcgcaaggacgcctgcgcactcttccctcccggttcgcggtcgggaggctcctcccctcagctccgccctggcccagtgcgcctgcgcacctcttccctccgtttccccacgtgcagtgcgccctctgaacatcaacccggaccgtgcactgggccctgagtaccctggtggctccagcatgcacccctactgcccgttcccgctgggctacctggacgcccctcctggcgtccccctgcagcagggcttccggcatgtgtcccgcagccagtaccaaggcggaggcttggtgtcagaaccaggaggagacttccagccaagctactacctgccgccgccgccgccgccactgccgccccttccaccgcttccaccgcagccccagttcctcccgccaggctacctctctgcgctccacttcctccccccgccaccgccaccaccacctccatcatctttctcactgaccgtcctgtttgatactgacaaggagaacactgatgaccaggatgcagaggtactgtcgggtgagcccagccagccatcgtctcaggagcagtccgactaggccccaggcccgccctcctggccagcagagtggggcactggggggcaacagcaacagttttcttgtcttcattcagtgatatgtagggaggaaggaggttgatagcatagatggcaactgattcccagtttaagataggaggaaggagagcaatttctaagtttcaatcctgcgctgtacagttgaagaagagtgtggaggaagctattaccaggggagggccagggctctgaggagtgggcgctgggagaagctcccatttaggaatgaatttaactgtccttgggttacactaccatttattggaacaagccccagaggcagtatttgatttcctcaggccccactctaggacaggaggcaccatctatttcagccttctgctgcctttgcctggtcctccaggttgctgggggcaccacagacatcaagattccagttcatccaggtggctggagccagcagccaggaccagggtcgttgacagcaggttctgcagcatcctgccttgctgctctgtcccccacatcttcctggccacagccccttgcccctcctctaaggggttttactagcaagcatcctggctgctggggctacttcattccccctccataaagtttcagccattatgggcactggttttaaaaaatttattagtttgactatttgatgtttttatagtgattgccaactttaaaaagtaggctgttcataagcactgatgcagtccctagggaatagaatggtgcttctgatcacctgtgacatgaacagtttcttctgtgaggacagttggctattgaaataaaatgagcaatggaaatccttgtggaaggcttattctccctttgatcctggtggaagctgtgtattgttgggctcatcatgtaatttttccaagccttactttgtcctctggtaacattggttcagtggtgctctgaggatgcaggagtgcttgtgtgaaacaccttctttgatggcacctgtgtcattggatgcttgaaggcagtgacctttttgagaccacgtcagaggctagaaatgaccaaggctctttacttcctggtgctccccacattccaggcactgtgctg

SEQ ID NO: 462792 - DNA, 2250 bp, Homo sapiens
tttgttacaagtgtatccaatgtccccagaacgagggacttgtggggcgcggctcatcccagcgccacttgctctgcagctcccagaggtggtggttgtgttacgaaggctgaccctgccaatggccgacaaaatggtgcgcacccccaagtgctcgagatgcaggaaccatggcttcctggtgcccgtcaagggacacgcgggcaaatgccgctggaagcagtgcctctgcgagaagtgctacctgatctccgagcgccagaagatcatggccgcgcagaaggtgctcaagacgcaggccgccgaggaggagcaggaggcggccctgtgtgcgcaggggcccaagcaggcctccggggctgcggccgccgcccccgcccccgtccccgtcccggccgcgagcctccgcccgctgtccccggggactccctccggagacgccgacccgggacccgagggccgcgcggccgcttgcttcttcgagcagcccccgcggggccggaaccccggcccgagagccctccagccggttctgggcggccgcagccacgtggagccgagcgagcgagccgccgtggcgatgcccagccttgcgggacccccttttggggcggaggccgcaggcagtggctaccctggccccctagacctgcgcaggccgatgcggaccgtgcccggcccactgttcaccgactttgtgcgccctctgaacatcaacccggaccgtgcactgggccctgagtaccctggtggctccagcatgcacccctactgcccgttcccgctgggctacctggacgcccctcctggcgtccccctgcagcagggcttccggcatgtgtcccgcagccagtaccaaggcggaggcttggtgtcagaaccaggaggagacttccagccaagctactacctgccgccgccgccgccgccactgccgccccttccaccgcttccaccgcagccccagttcctcccgccaggctacctctctgcgctccacttcctccccccgccaccgccaccaccacctccatcatctttctcactgaccgtcctgtttgatactgacaaggagaacactgatgaccaggatgcagaggtactgtcgggtgagcccagccagccatcgtctcaggagcagtccgactaggccccaggcccgccctcctggccagcagagtggggcactggggggcaacagcaacagttttcttgtcttcattcagtgatatgtagggaggaaggaggttgatagcatagatggcaactgattcccagtttaagataggaggaaggagagcaatttctaagtttcaatcctgcgctgtacagttgaagaagagtgtggaggaagctattaccaggggagggccagggctctgaggagtgggcgctgggagaagctcccatttaggaatgaatttaactgtccttgggttacactaccatttattggaacaagccccagaggcagtatttgatttcctcaggccccactctaggacaggaggcaccatctatttcagccttctgctgcctttgcctggtcctccaggttgctgggggcaccacagacatcaagattccagttcatccaggtggctggagccagcagccaggaccagggtcgttgacagcaggttctgcagcatcctgccttgctgctctgtcccccacatcttcctggccacagccccttgcccctcctctaaggggttttactagcaagcatcctggctgctggggctacttcattccccctccataaagtttcagccattatgggcactggttttaaaaaatttattagtttgactatttgatgtttttatagtgattgccaactttaaaaagtaggctgttcataagcactgatgcagtccctagggaatagaatggtgcttctgatcacctgtgacatgaacagtttcttctgtgaggacagttggctattgaaataaaatgagcaatggaaatccttgtggaaggcttattctccctttgatcctggtggaagctgtgtattgttgggctcatcatgtaatttttccaagccttactttgtcctctggtaacattggttcagtggtgctctgaggatgcaggagtgcttgtgtgaaacaccttctttgatggcacctgtgtcattggatgcttgaaggcagtgacctttttgagaccacgtcagaggctagaaatgaccaaggctctttacttcctggtgctccccacattccaggcactgtgctg

SEQ ID NO: 462793 - DNA, 1046 bp, Homo sapiens
gtgagtctagaagtggactctgccccagagacaccttggttgccacctttcagagccctgagacagaggatgccaaagttaagccacatctggattcctgacccacagaaactttctggaatctatgttccagaattcggcttcccaagacccacagcccagaatccaggctccagaattcaggctccccgagatccaggcttcagaatccgagctccctcagacccaagctccgaatccgggctccctgagatccaggttccggaatccgggctcctggagatccaggctccggaatccgagctccctcagatccaggttccggaatccgggctccccgagatccaggctccggaatccgagctccctcagaaccaggctctggaatccgggctcctccagatccaggttccggaatccgggctccaggctcgcattccgggctgggagccagccacagccgttaggctgagatttttaaaatctggcgccaaaatccactccccgggtgggagtggcggtgccgggtggagctcccgggggaaagagggtcccgcgttcgaatcccgcctccgctacgcccctggtgcggattccccgaccgcgcctcccaaactgcgcgctgggagggggaaagccccgggccccacccacgggaagcgcggggctttctgggacttggagtccagtccctgggggtcccgcggggatggctctgggcacccgaagcccctccccagcgccgagacaggagggctggggtagattcgagaccccggtttgcagagcgcaagactgaggcccagggccgcgcagtcaggcaggaaacggcgctcctggcggatggaacagcacgggcaaaggctgggtatggggggtctcgctccgttgcccacactggagtgcagtggcgcaatcatggctgactgcagacttgaactcctggatgcaagccattctcctgcctcagcctcccgaggagctgggactacaggtgtgtgccagcacatgtggctaattattaaaaatttttttggctgggtgcc

SEQ ID NO: 462794 - DNA, 932 bp, Homo sapiens
  misc_feature (5)..(5): n is a, c, g, or t
  misc_feature (7)..(11): n is a, c, g, or t
  misc_feature (14)..(16): n is a, c, g, or t
tcctntnnnnnatnnnagctctagtttgccagtcttccgctgagcacctaatcttctccaggcctctgataatggaagccaaggacccagcacagaccagctggcggccccatccaggaagtgccaaccccacgggtcactcttggggacccttggtggcccagccattgcagccatgcagagatgcattaactccccataaggactcaggattgtcatcaagaagtacaggtgggattctgaaggcagacctcaagctggaagaggctagctgcatcccacaggtaggcgtggacatcaagcaagcacctgcctgcctgtctagcatggcgctagacatgaaggaagcaaaagaatggagcacagaccctgatgaggagcctgcactgagtgccaaccatgagctggacagcccactaggcaagtgcaatgacaaaagaaacaagcgttaatcctgtctagccagagcactaaggaacctgcttattctgcgaatgcctcagcaaggtcctaaaggagagcttccactgcctcctagtttgcaaatgatttccaaatataatttctcatcggaatctcacaaccaccaaatacgaccaggcattattcatctgattttacagatgaggaaatcaagggtcagagaagtgatgtgacttgcccaaggcccacagatggtaggtggcaaagccaggacttggaatccaagataaagaaaactcagtgggaaggagaagtttgtgattaaatccaattaaaggaatagagtaaaataaagaacacagtaaatttctcaccaggaatgtgttccgttttcctcttggcttttgaaaatgaggctgcttctgctatattatctggtggaaaacacatcatcaaagtcaatgggacatcagcccttctcttgggtatttgttgaggctcctctgcac

SEQ ID NO: 462795 - DNA, 887 bp, Homo sapiens
gattgagtcctgtgtcttggataaaacgagaggaggacagcctgatcctggacactcaggggggcgtggccacgggaggcgggcttctttggaagctgcggggccgagggcgccatactcctgtctgtccagacccccgatcgcccaccgcccctgtcgccctagcccaggcccacgcgcggccgcatgcggatccactcactggagaacgtggacaaggcgctgcagtttctgaaggagcagcgcgtgcacctggagaacgtgggttcgcatgacatcgtggatgggaatcaccggctgacgctggggctggtctggaccatcatcctgcgcttccagattcaagtcatcaaaattgagactgaggacaacagagagacacgctcagccaaggatgctctgctcttgtggtgtcagatgaagacagctggttaccctgaggtaaacatccagaatttcaccaccagctggcgggatggcttggccttcaatgccctcattcaccggcacaggcctgatctcgtggacttcagcaaactcaccaagtccaatgccaactacaacctgcagagagccttccgcacagctgagcagcacctggggctggcgcggctgctggatcctgaagtctatccctaatcccatccctgacttcagcctcagccccaaaccaggatcagccctgacacccatctcccatcccaaattaaagctgctcccttcctctgagctctactgtgtgccagacacatgtctgggaaccttatcagagctgttcactttcatcttcacactgacctggttagagagaatttatcaaccctgttttattttattttatttatttatttatttatttatttatttatttatttatttattttttt

SEQ ID NO: 462796 - DNA, 1606 bp, Homo sapiens
  misc_feature (1)..(1): n is a, c, g, or t
  misc_feature (4)..(5): n is a, c, g, or t
  misc_feature (7)..(8): n is a, c, g, or t
  misc_feature (10)..(10): n is a, c, g, or t
  misc_feature (12)..(13): n is a, c, g, or t
  misc_feature (15)..(15): n is a, c, g, or t
  misc_feature (19)..(19): n is a, c, g, or t
ncanntnntntnntncaanatgatgattattccccaccttctaagagacaaagaccaacgagccaccacagccaccagtcccagaacccgccaatgctggggaacggaaaatgagggagttcaactctggccctcacaatccagtggaggagacgaaactcatctgcctctgtccctctgggcacgcctcatgccaggtgcatctgtggacaggggccatgctcctgggcttccaaagttggagaaagctgccaggctcaggtctgaaggccagaattctacagtaagtcctactgagtcaaggtgggagcagggtcggtagcttccgaggctctgcgggagaatccgtttcctggccgtagaggtggcctgcactcctcagcttgtgctgcccgtctcgaatgactggagtttcctgcttctgtcactacacctcccaccctctccatcacctgctctgctcttacaaggatccgaagaaatggaatcatcgtatcgctgatctacgtaaacaaactgaagaattgtctgaaagaaaatatggtatgtctaaactggaaaagtcttgtaatcttatgttcatgggcgtttacacagtggagttactgttcatcatgggggtaccgtggacaagcccagggctgccggcgagtcatgccatccttacatgtttctccttgtaaggtgctttgtagtgtctacacactttgtttctagattgctgcaaagctgaggaaaagtttctcgaactcctgacgtcaagtgatcttcccgcctcgactcctgatatcaagtgatcttcccgcctcggcctcccagagtgctgagattacagacgtgaacccatgcctggccaggaattttgttttttaggaaggctttctactaatggaattcctggccttgagaggatgttactttagaaggaaaggatttttttgttattaaaagctggacctaccatgaaagacttctgaatccaggaagagaaactgactgggcaacatgttattcagatggggtcttcttatgttgcccaggttggtctcaaattcctaggctcaagtgattccgcccacctctgcctcccaaagtgctgggattacgggcatgagccagtgcatctggccaccttattttctattactggctcaatgtaatggctccatctcaggaacagccaatgaaagagatgcacaggacaaggtgatggagctggccaaggtgctgagggaagagcattgtaggctgagtcaacaggataaaggcattaggaggaaactctctggtgtgtctgaggctctggaaggaggccagtggagcaaagagatggagcgaagtcagcgaggaggccagggagttgctgggctgggatcggtacagatcgtggccacagagctggaggtgagcagcaggcgagtgaagggaaacttcatctgtatttctagcccctcccatcgcttgcatgaccacctgagctccatgtcctgtcagatcagcagcagcattagattctcacaggagcacaaactctgttgtgaagtgtgcatgcgagggatctaggttgtgtactccttatgagaatctaatgcctgatattctgtta

SEQ ID NO: 462797 - DNA, 348 bp, Homo sapiens
tttgaggtggagtcttgctctgtcatccaggctggcagtggcgtgatcttggctcactgcaatgtctgcctcctgggttcaggtgattctcctgcctcagcctcctgagtagctgggactacaggcgcccgccaccatgccctgctgttttgtatttttgagaaatggaatcatcgtatcgctgatctacgtaaacaaactgaagaattgtctgaaagaaaatatgacatgaacttatgaattcaacaggtgaagatttacaacttgataaatcaactttgtcagctcgagctgtaaaagccaaaggtccggtgatgatcccatacccttttttccagtctcatgttg

SEQ ID NO: 462798 - DNA, 1671 bp, Homo sapiens
gggagagcaccgcgagggcggagctgcgttctcctctgcacagatttcggtggtactgcgaaggcggagcagagttctcctcagatgatgattattccccaccttctaagagacaaagaccaacgagccaccacagccaccagtcccagaacccgccaatgctggggaacggaaaatgagggagttcaactctggccctcacaatccagtggaggagacgaaactcatctgcctctgtccctctgggcacgcctcatgccaggtgcatctgtggacaggggccatgctcctgggcttccaaagttggagaaagctgccaggctcaggtctgaaggccagaattctacagtaagtcctactgagtcaaggtgggagcagggtcggtagcttccgaggctctgcgggagaatccgtttcctggccgtagaggtggcctgcactcctcagcttgtgctgcccgtctcgaatgactggagtttcctgcttctgtcactacacctcccaccctctccatcacctgctctgctcttacaaggatccgaagaaatggaatcatcgtatcgctgatctacgtaaacaaactgaagaattgtctgaaagaaaatatggtatgtctaaactggaaaagtcttgtaatcttatgttcatgggcgtttacacagtggagttactgttcatcatgggggtaccgtggacaagcccagggctgccggcgagtcatgccatccttacatgtttctccttgtaaggtgctttgtagtgtctacacactttgtttctagattgctgcaaagctgaggaaaagtttctcgaactcctgacgtcaagtgatcttcccgcctcgactcctgatatcaagtgatcttcccgcctcggcctcccagagtgctgagattacagacgtgaacccatgcctggccaggaattttgttttttaggaaggctttctactaatggaattcctggccttgagaggatgttactttagaaggaaaggatttttttgttattaaaagctggacctaccatgaaagacttctgaatccaggaagagaaactgactgggcaacatgttattcagatggggtcttcttatgttgcccaggttggtctcaaattcctaggctcaagtgattccgcccacctctgcctcccaaagtgctgggattacgggcatgagccagtgcatctggccaccttattttctattactggctcaatgtaatggctccatctcaggaacagccaatgaaagagatgcacaggacaaggtgatggagctggccaaggtgctgagggaagagcattgtaggctgagtcaacaggataaaggcattaggaggaaactctctggtgtgtctgaggctctggaaggaggccagtggagcaaagagatggagcgaagtcagcgaggaggccagggagttgctgggctgggatcggtacagatcgtggccacagagctggaggtgagcagcaggcgagtgaagggaaacttcatctgtatttctagcccctcccatcgcttgcatgaccacctgagctccatgtcctgtcagatcagcagcagcattagattctcacaggagcacaaactctgttgtgaagtgtgcatgcgagggatctaggttgtgtactccttatgagaatctaatgcctgatattctgtta

SEQ ID NO: 462799 - DNA, 7995 bp, Homo sapiens
gaggagccgcggtgaaagatgggggatgctgcagaccccagggagatgagaaagacgttcattgttccagccatcaagccttttgaccactatgatttctccagggccaaaatcgcctgcaatctggcctggctggtggccaaagcctttgggacagataaggtaactggctcacagattaatttgcacaagattaaacatctggcaagtgatgtgttctgcatgtctgactctgaagcctttgcttattactctataccgttctgcagagtaaccgttttatctgcagaaaatgtgccagaggaacttcaagaaccattttacacagatcagtatgaccaggaacacatcaaaccacctgttgttaatttgcttctatcggctgaactatactgtcgtgctgggagtctcattctcaagagtgatgctgcaaaaccccttttgggccatgatgctgtaatccaggctttagcacagaaaggtctttatgtcactgaccaggaaaaattggtaactgaacgagatctccacaagaaacccatacagatggaggacaacaagccagggcacaaaagcttgaaaactggtagcagattggagaaggaaatggtagattctaaggctagactaacaaagcagctaataagaaagaaagaaagaaactttacctcttttaaggagtttagacttcgttatgtagaaaatgagagtgcacatttggccatgatcgataccctcatgatggcttatactgtagaaatggtcagtatagaaaaagtaattgcgtgtgctcagcagtattcagctttttttcaagccacagatctgccctatgatattgaggacgctgtcatgtactggataaataaggtaaatgaacatttgaaagacataatggaacaagaacaaaaactgaaagaacatcacacagttgaagctccaggaggtcaaaaggctcgttatcggaaagagcaaacattgcttaagcaactgccttgcattccattggtagaaaatttgttgaaggatgggacagatggctgtgcattagctgcccttattcatttttactgtcctgatgttgtcagattagaggatatttgtttgaaagaaactatgtctttggctgatagcctgtataatctgcagctgattcaagaattttgccaagaatacttgaaccagtgttgccatttcactctggaagatatgctctatgctgcttcatccataaagagtaattatttggtgttcatggcggaactgttctggtggtttgaagtggtgaagccgtcttttgtacagcctcgtgttgttcgtccacaaggagctgaacctgtaaaagatatgccttcaattcctgtcttgaatgctgccaaaagaaatgtcttagatagtagttctgacttcccttcaagtggggaaggagctacatttacacagtctcatcatcatttgccttctaggtattcacgtccccaggctcattcttcagcctcaggaggaattagaaggtcttcatctatgtcttatgttgatggcttcatagggacatggcccaaagagaaaagatcatcagtgcatggcgtatcatttgatatttcttttgataaagaagatagtgtacagagatccactccaaaccgaggaatcactcgttctattagtaatgaaggacttactctgaacaacagtcatgtatctaaacacattaggaaaaatttgtccttcaagccaataaatggagaagaggaagcagagagcattgaagaagaacttaatatagattctcacagtgacctcaaatcttgtgtgccccttaacacaaatgaactaaattctaatgagaatattcattacaagcttccaaatggagctttacaaaatagaatacttcttgacgagtttggcaatcagatcgagacaccaagcattgaagaagcattacaaataattcatgatactgaaaaatctcctcatacacctcagccagaccaaattgctaatggcttctttcttcatagtcaagaaatgagtatcttaaattcaaatatcaagttaaatcaatctagtcctgataatgtaactgatacgaaaggtgccttgagtcccataactgacaatactgaagtagacactggaattcacgttccttcagaagatattcctgaaactatggacgaagattcttcgttgagagattatactgtaagcttggactctgacatggatgatgcatctaaatttcttcaggattatgatattcgaactggcaacaccagggaagctttgagtccttgtccaagtactgtaagtaccaagtctcagccaggcagcagtgcttcttctagttctggagttaaaatgaccagctttgctgaacaaaaattcaggaaactgaatcataccgatggaaaaagtagtggaagcagttctcaaaaaactacaccagaaggctctgaacttaatattcctcatgtggttgcttgggcacaaattccagaagaaacagggcttccacagggacgggacactacccagctgttggcctctgaaatggtgcatcttaggatgaaactagaagaaaagaggcgtgctatagaagcccagaaaaagaaaatggaagctgcttttaccaaacagagacagaaaatgggaaggacagcattccttactgtagtgaaaaagaaaggggatgggatatctcctctacgagaggaagcggcgggtgcagaagatgagaaagtatatactgatcgagcaaaagaaaaggaatcacaaaaaactgatggacaaaggagcaagtcactggcagatataaaagagagcatggagaatcctcaagccaaatggctaaagtctccaactacacctattgatcctgagaagcagtggaacctggcaagcccctcagaagaaactttaaatgaaggagagattttagaatataccaaatccattgaaaagttaaattcatccctgcattttctacaacaagaaatgcaacgcttgtcacttcagcaggagatgttaatgcagatgagagagcaacaatcttgggtgatttcacctccacaaccctctccacagaaacagattcgagattttaagccttctaagcaggcaggcctgtcatcagccattgcaccattctcctcagactcccctcgtcctactcacccatctccacagtcttctaacaggaaaagtgcatctttttctgttaaaagtcaaaggactcctaggccaaatgagttaaaaataacacctttgaatcgaaccttgacacctcctcggtctgtggatagccttcctcggttaaggaggttttcaccaagtcaagttcctattcaaactaggtcatttgtatgttttggggatgatggagaacctcagttaaaggaatccaaacctaaagaggaagttaaaaaggaggaattggaatccaaagggactttggaacagcgtggacataatccagaagaaaaggaaatcaaaccttttgagtcaacagtctctgaagtcctatcactgcctgtcacagagactgtatgtctgacaccaaatgaggaccaattgaatcaacccacagaaccccctcctaaacccgttttcccacccactgctccaaaaaatgttaatctgattgaagtttccctctcagatttgaaaccccctgaaaaggctgatgtacctgttgaaaaatatgatggagaaagtgataaagaacaatttgatgatgaccagaaagtatgctgtggattcttttttaaggatgatcaaaaagcagaaaatgatatggcaatgaaacgggcagctttgttggagaaaagattaagaagggaaaaggaaactcagctccggaaacaacagttggaagcagaaatggagcataagaaggaggaaacaaggcgtaaaactgaggaagaacgtcagaagaaagaagatgagagagcacgcagagaatttattaggcaagaatatatgaggcggaaacaactgaaactaatggaagatatggatacagtaattaaaccccgtcctcaagtagtaaaacaaaaaaaacagcgaccaaaatctattcacagagatcatattgaatcccccaaaacaccaataaagggtcctccagtctctagcctttctttggcatcgctgaacacgggtgataacgagagtgtacattcaggcaagaggacgccaagatcagagtctgtagaaggcttcttatctccaagtcgttgtggcagtcgaaatggagaaaaagactgggagaatgcatcaacaacttcttcagtggcttctggaacagaatatacaggaccaaagctctacaaagaacccagtgcaaaatccaataagcacataatacaaaatgctttagctcattgctgtttggctggaaaagtaaatgaaggtcagaagaaaaaaatactggaggaaatggagaaatcagatgccaacaacttcttaatcttgttccgggattcaggatgccagttcagatctttatacacttattgcccagaaactgaagaaatcaataaactgactgggataggccctaaatctatcactaaaaaaatgattgaaggactttacaaatataattctgacaggaaacagtttagccacatacccgctaaaactttatctgccagtgttgatgcaattaccattcatagccatttatggcagaccaaaagaccagtaacacccaaaaaacttttacccactaaggcatagaagttgggaaatacttgcttcagaacattcatggtaaatttgcacttcatctttcctgcctatagaaaatctttctaattgccaacaagacttttattaattaaaactggacattaagctctgttgtcatgaacaactggaatgtaaaccacagtattttggagtgcagaacattctcaattaagtgataagtccaaatgatgaaggaaatgttttaattcacaaatggagatttgtatgtgttatcaggttcacctgcttgatattagatacattaaagcactgaattttcatggatattagttggatttatcattgaaatatggttaagattacaaattatgtgttttatttgttgcttttttttaaccttttaatgtatattcttgtcttcagatggtttgctatttttctctcctgggggtttattctaagatacctttgtattttatttcatgtggagatcatgaaagtaggaaatatacctttagaagtaactcgcacctttcttatgatgttaagagaaacactagtgtttagttttacagtaaccctcatattttaatggtgttacagcatttgcaaaaattattctgctaagtatttacaactctatttattattcactcaagtattaacattctctattaaataagaggaggtgttgtaaagagctgctagtaggttcgctttaaaccacatgagcttaaccaagaatatgttatgagaagttgctgattaaatcagtgctgtttttacaccacttctggccaactcagaataatttagattgttcttttaacaaaaaaggctttctatctcttttaaagtaagtcactttataagttggcagaagtgaatgacactttgagagtagtctttcaatctgaagatgtaagacttcctgaaacaagttctcaagaagtctttacattatatttataactcatataaaaattatatttagaatttttaaacatgtacaaagggctacattttaattttaaaatagcttcacattattttacttatattgggtttttcttcattttaatccttttcaagtggaatggcttagaataagtatacacttgaaatctcctctacatgatctttgttctttaacagtgtataccagagggttagttggggaaaaacttcattctcaggaaaagacttgaatgattatgtgaccctgttatatttcagtgttgtgacaaatgtgtaaactagcgggggaagacagtattgtatcataaatgagatgcgtagtttgttttctttcatgggaagtagagataaaaatatatacatttctctaattgagttgtttagagaaagaactaatgtctcatatgatgtatttacttattttaaaaaaaagaataggaatgagatgtccctgagctgtacttttctattattataaggcctttaggcatcagtgcatctgggttatcaacattttctcaaatgctgtcaatattttactgtaatttatgttcttatatttatgtatatttgttaaaactgtaaaaaaatttcacagatttttttccaatacctgtgcaagatacatgtgtagctcaaaactatttgtgatctactgtttgcatgtaagagaccaggatatgtaactcttatattttaagtgtatacatattgtgtatataacatatggatattaaaaatggggaattgcacattttaccttttggacagtaatttctatcacagttagaaggaaatgatagtcaaatacacgtttagattaaaactagtttaaaaaattataaatgaatctaatcaaaatgtgaatagtagtcaaaaggataatttaataagcattttacgttactaaatttgttcatttcaatattaactaaatttccctcatcaaagcaatctttgtgatattacttcgctattaaataaagaaaattggatgcaagacaatggagaaactttaaaactaaacaggaccaccctttattcttaaatttgtgtgtgtccaacagttgaattgaatgtctataaggtctaaaggtagaatgtgaatattgccacagagttcattgctctcagtataagattttactttattaatgcagaaggaatatggatatatttctttaagtctgcagatttttttattatggtgcagcttttttttaattatgtttttaaaattatacagttgaaaaatatgccatttcataaagtctgaggattttcgtcaaccttactgaaacacactggtgctttcatcatcagaggtcaaattattatgataactattccattaagtttgccaaacatttgtcgtggttaccagtgcagcctgtcaaattctgctatttgacacagctttggaaagatttagttcttggtttttccgttttgtattagaatgactgttacagttttatttggctgtttaaagccaaattcagctatttaattatggtttcatggacactgttgagcaatgtacagtgtatggtgtgcttacctgtccactctagagcattgcttacaggttttttgttttttaagatgctgtgctgtaaaatactgtcatacttgctatttcctggtacagtgtagtttttcccctttcatttgaataaaagcatggcaccaaatgactccttttctgtttcttgaataaaatgtagtttttggtaaaattatttgaacttgagataactcatacagtttttctatcccctaacctatgtttaaatttaataacttgaatattcataacaggcaacttgaaataattagccttttaaaaatactaacttagggcaatgttaaaaagtcggtaactttctatgcttagcacagacggtctacatagtatgatttataaatgtgcttatcttatgttaatcttgctcatactaattcactatcttttggtgaattgatagttatattgtaccagaactagtgctctatgtctttgaaactgaatggccagtgaactcactgatctggagtagccatgagaagctagttcttgaccattattttgtaagtttcactttgattttgctgattctacttactcagaacagagtaaagaaaaaggtgttttttaagaaaaaagagatctgataacaaaactataaaataatcgtcatgcctaattatatacctgaagaaatatctggttagtagacataaatgtggttttctagcttgggacctttttgataggttctgtaacttcagagcaca

SEQ ID NO: 462800 - DNA, 6532 bp, Homo sapiens
tattactggtacattagaatttacagtactgatttttttcctatgcgttatttggtacttatttattttcatgtattttttttatatcgtaggctcgttatcggaaagagcaaacattgcttaagcaactgccttgcattccattggtagaaaatttgttgaaggatgggacagatggctgtgcattagctgcccttattcatttttactgtcctgatgttgtcagattagaggatatttgtttgaaagaaactatgtctttggctgatagcctgtataatctgcagctgattcaagaattttgccaagaatacttgaaccagtgttgccatttcactctggaagatatgctctatgctgcttcatccataaagagtaattatttggtgttcatggcggaactgttctggtggtttgaagtggtgaagccgtcttttgtacagcctcgtgttgttcgtccacaaggagctgaacctgtaaaagatatgccttcaattcctgtcttgaatgctgccaaaagaaatgtcttagatagtagttctgacttcccttcaagtggggaaggagctacatttacacagtctcatcatcatttgccttctaggtattcacgtccccaggctcattcttcagcctcaggaggaattagaaggtcttcatctatgtcttatgttgatggcttcatagggacatggcccaaagagaaaagatcatcagtgcatggcgtatcatttgatatttcttttgataaagaagatagtgtacagagatccactccaaaccgaggaatcactcgttctattagtaatgaaggacttactctgaacaacagtcatgtatctaaacacattaggaaaaatttgtccttcaagccaataaatggagaagaggaagcagagagcattgaagaagaacttaatatagattctcacagtgacctcaaatcttgtgtgccccttaacacaaatgaactaaattctaatgagaatattcattacaagcttccaaatggagctttacaaaatagaatacttcttgacgagtttggcaatcagatcgagacaccaagcattgaagaagcattacaaataattcatgatactgaaaaatctcctcatacacctcagccagaccaaattgctaatggcttctttcttcatagtcaagaaatgagtatcttaaattcaaatatcaagttaaatcaatctagtcctgataatgtaactgatacgaaaggtgccttgagtcccataactgacaatactgaagtagacactggaattcacgttccttcagaagatattcctgaaactatggacgaagattcttcgttgagagattatactgtaagcttggactctgacatggatgatgcatctaaatttcttcaggattatgatattcgaactggcaacaccagggaagctttgagtccttgtccaagtactgtaagtaccaagtctcagccaggcagcagtgcttcttctagttctggagttaaaatgaccagctttgctgaacaaaaattcaggaaactgaatcataccgatggaaaaagtagtggaagcagttctcaaaaaactacaccagaaggctctgaacttaatattcctcatgtggttgcttgggcacaaattccagaagaaacagggcttccacagggacgggacactacccagctgttggcctctgaaatggtgcatcttaggatgaaactagaagaaaagaggcgtgctatagaagcccagaaaaagaaaatggaagctgcttttaccaaacagagacagaaaatgggaaggacagcattccttactgtagtgaaaaagaaaggggatgggatatctcctctacgagaggaagcggcgggtgcagaagatgagaaagtatatactgatcgagcaaaagaaaaggaatcacaaaaaactgatggacaaaggagcaagtcactggcagatataaaagagagcatggagaatcctcaagccaaatggctaaagtctccaactacacctattgatcctgagaagcagtggaacctggcaagcccctcagaagaaactttaaatgaaggagagattttagaatataccaaatccattgaaaagttaaattcatccctgcattttctacaacaagaaatgcaacgcttgtcacttcagcaggagatgttaatgcagatgagagagcaacaatcttgggtgatttcacctccacaaccctctccacagaaacagattcgagattttaagccttctaagcaggcaggcctgtcatcagccattgcaccattctcctcagactcccctcgtcctactcacccatctccacagtcttctaacaggaaaagtgcatctttttctgttaaaagtcaaaggactcctaggccaaatgagttaaaaataacacctttgaatcgaaccttgacacctcctcggtctgtggatagccttcctcggttaaggaggttttcaccaagtcaagttcctattcaaactaggtcatttgtatgttttggggatgatggagaacctcagttaaaggaatccaaacctaaagaggaagttaaaaaggaggaattggaatccaaagggactttggaacagcgtggacataatccagaagaaaaggaaatcaaaccttttgagtcaacagtctctgaagtcctatcactgcctgtcacagagactgtatgtctgacaccaaatgaggaccaattgaatcaacccacagaaccccctcctaaacccgttttcccacccactgctccaaaaaatgttaatctgattgaagtttccctctcagatttgaaaccccctgaaaaggctgatgtacctgttgaaaaatatgatggagaaagtgataaagaacaatttgatgatgaccagaaagtatgctgtggattcttttttaaggatgatcaaaaagcagaaaatgatatggcaatgaaacgggcagctttgttggagaaaagattaagaagggaaaaggaaactcagctccggaaacaacagttggaagcagaaatggagcataagaaggaggaaacaaggcgtaaaactgaggaagaacgtcagaagaaagaagatgagagagcacgcagagaatttattaggcaagaatatatgaggcggaaacaactgaaactaatggaagatatggatacagtaattaaaccccgtcctcaagtagtaaaacaaaaaaaacagcgaccaaaatctattcacagagatcatattgaatcccccaaaacaccaataaagggtcctccagtctctagcctttctttggcatcgctgaacacgggtgataacgagagtgtacattcaggcaagaggacgccaagatcagagtctgtagaaggcttcttatctccaagtcgttgtggcagtcgaaatggagaaaaagactgggagaatgcatcaacaacttcttcagtggcttctggaacagaatatacaggaccaaagctctacaaagaacccagtgcaaaatccaataagcacataatacaaaatgctttagctcattgctgtttggctggaaaagtaaatgaaggtcagaagaaaaaaatactggaggaaatggagaaatcagatgccaacaacttcttaatcttgttccgggattcaggatgccagttcagatctttatacacttattgcccagaaactgaagaaatcaataaactgactgggataggccctaaatctatcactaaaaaaatgattgaaggactttacaaatataattctgacaggaaacagtttagccacatacccgctaaaactttatctgccagtgttgatgcaattaccattcatagccatttatggcagaccaaaagaccagtaacacccaaaaaacttttacccactaaggcatagaagttgggaaatacttgcttcagaacattcatggtaaatttgcacttcatctttcctgcctatagaaaatctttctaattgccaacaagacttttattaattaaaactggacattaagctctgttgtcatgaacaactggaatgtaaaccacagtattttggagtgcagaacattctcaattaagtgataagtccaaatgatgaaggaaatgttttaattcacaaatggagatttgtatgtgttatcaggttcacctgcttgatattagatacattaaagcactgaattttcatggatattagttggatttatcattgaaatatggttaagattacaaattatgtgttttatttgttgcttttttttaaccttttaatgtatattcttgtcttcagatggtttgctatttttctctcctgggggtttattctaagatacctttgtattttatttcatgtggagatcatgaaagtaggaaatatacctttagaagtaactcgcacctttcttatgatgttaagagaaacactagtgtttagttttacagtaaccctcatattttaatggtgttacagcatttgcaaaaattattctgctaagtatttacaactctatttattattcactcaagtattaacattctctattaaataagaggaggtgttgtaaagagctgctagtaggttcgctttaaaccacatgagcttaaccaagaatatgttatgagaagttgctgattaaatcagtgctgtttttacaccacttctggccaactcagaataatttagattgttcttttaacaaaaaaggctttctatctcttttaaagtaagtcactttataagttggcagaagtgaatgacactttgagagtagtctttcaatctgaagatgtaagacttcctgaaacaagttctcaagaagtctttacattatatttataactcatataaaaattatatttagaatttttaaacatgtacaaagggctacattttaattttaaaatagcttcacattattttacttatattgggtttttcttcattttaatccttttcaagtggaatggcttagaataagtatacacttgaaatctcctctacatgatctttgttctttaacagtgtataccagagggttagttggggaaaaacttcattctcaggaaaagacttgaatgattatgtgaccctgttatatttcagtgttgtgacaaatgtgtaaactagcgggggaagacagtattgtatcataaatgagatgcgtagtttgttttctttcatgggaagtagagataaaaatatatacatttctctaattgagttgtttagagaaagaactaatgtctcatatgatgtatttacttattttaaaaaaaagaataggaatgagatgtccctgagctgtacttttctattattataaggcctttaggcatcagtgcatctgggttatcaacattttctcaaatgctgtcaatattttactgtaatttatgttcttatatttatgtatatttgttaaaactgtaaaaaaatttcacagatttttttccaatacctgtgcaagatacatgtgtagctcaaaactatttgtgatctactgtttgcatgtaagagaccaggatatgtaactcttatattttaagtgtatacatattgtgtatataacatatggatattaaaaatggggaattgcacattttaccttttggacagtaatttctatcacagttagaaggaaatgatagtcaaatacacgtttagattaaaactagtttaaaaaattataaatgaatctaatcaaaatgtgaatagtagtcaaaaggataatttaataagcattttacgttactaaatttgttcatttcaatattaactaaatttccctcatcaaagcaatctttgtgatattacttcgctattaaataaagaaaattggatgcaagacaatggagaaactttaaaactaaacaggaccaccctttattcttaaatttgtgtgtgtccaacagttgaattgaatgtctataaggtctaaaggtagaatgtgaatattgccacagagttcattgctctcagtataagattttactttattaatgcagaaggaatatggatatatttctttaagtctgcagatttttttattatggtgcagcttttttttaattatgtttttaaaattatacagttgaaaaatatgccatttcataaagtctgaggattttcgtcaaccttactgaaacacactggtgctttcatcatcagaggtcaaattattatgataactattccattaagtttgccaaacatttgtcgtggttaccagtgcagcctgtcaaattctgctatttgacacagctttggaaagatttagttcttggtttttccgttttgtattagaatgactgttacagttttatttggctgtttaaagccaaattcagctatttaattatggtttcatggacactgttgagcaatgtacagtgtatggtgtgcttacctgtccactctagagcattgcttacaggttttttgttttttaagatgctgtgctgtaaaatactgtcatacttgctatttcctggtacagtgtagtttttcccctttcatttgaataaaagcatggcaccaaatga

SEQ ID NO: 462801 - DNA, 7340 bp, Homo sapiens
gaggagccgcggtgaaagatgggggatgctgcagaccccagggagatgagaaagacgttcattgttccagccatcaagccttttgaccactatgatttctccagggccaaaatcgcctgcaatctggcctggctggtggccaaagcctttgggacagataaggtaactggctcacagattaatttgcacaagattaaacatctggcaagtgatgtgttctgcatgtctgactctgaagcctttgcttattactctataccgttctgcagagtaaccgttttatctgcagaaaatgtgccagaggaacttcaagaaccattttacacagatcagtatgaccaggaacacatcaaaccacctgttgttaatttgcttctatcggctgaactatactgtcgtgctgggagtctcattctcaagagtgatgctgcaaaaccccttttgggccatgatgctgtaatccaggctttagcacagaaaggtctttatgtcactgaccaggaaaaattggtaactgaacgagatctccacaagaaacccatacagatggaggacaacaagccagggcacaaaagcttgaaaactggtagcagattggagaaggaaatggtagattctaaggctagactaacaaagcagctaataagaaagaaagaaagaaactttacctcttttaaggagtttagacttcgttatgtagaaaatgagagtgcacatttggccatgatcgataccctcatgatggcttatactgtagaaatggtcagtatagaaaaagtaattgcgtgtgctcagcagtattcagctttttttcaagccacagatctgccctatgatattgaggacgctgtcatgtactggataaataaggtaaatgaacatttgaaagacataatggaacaagaacaaaaactgaaagaacatcacacagttgaagctccaggaggtcaaaaggctcgttatcggaaagagcaaacattgcttaagcaactgccttgcattccattggtagaaaatttgttgaaggatgggacagatggctgtgcattagctgcccttattcatttttactgtcctgatgttgtcagattagaggatatttgtttgaaagaaactatgtctttggctgatagcctgtataatctgcagctgattcaagaattttgccaagaatacttgaaccagtgttgccatttcactctggaagatatgctctatgctgcttcatccataaagagtaattatttggtgttcatggcggaactgttctggtggtttgaagtggtgaagccgtcttttgtacagcctcgtgttgttcgtccacaaggagctgaacctgtaaaagatatgccttcaattcctgtcttgaatgctgccaaaagaaatgtcttagatagtagttctgacttcccttcaagtggggaaggagctacatttacacagtctcatcatcatttgccttctaggtattcacgtccccaggctcattcttcagcctcaggaggaattagaaggtcttcatctatgtcttatgttgatggcttcatagggacatggcccaaagagaaaagatcatcagtgcatggcgtatcatttgatatttcttttgataaagaagatagtgtacagagatccactccaaaccgaggaatcactcgttctattagtaatgaaggacttactctgaacaacagtcatgtatctaaacacattaggaaaaatttgtccttcaagccaataaatggagaagaggaagcagagagcattgaagaagaacttaatatagattctcacagtgacctcaaatcttgtgtgccccttaacacaaatgaactaaattctaatgagaatattcattacaagcttccaaatggagctttacaaaatagaatacttcttgacgagtttggcaatcagatcgagacaccaagcattgaagaagcattacaaataattcatgatactgaaaaatctcctcatacacctcagccagaccaaattgctaatggcttctttcttcatagtcaagaaatgagtatcttaaattcaaatatcaagttaaatcaatctagtcctgataatgtaactgatacgaaaggtgccttgagtcccataactgacaatactgaagtagacactggaattcacgttccttcagaagatattcctgaaactatggacgaagattcttcgttgagagattatactgtaagcttggactctgacatggatgatgcatctaaatttcttcaggattatgatattcgaactggcaacaccagggaagctttgagtccttgtccaagtactgtaagtaccaagtctcagccaggcagcagtgcttcttctagttctggagttaaaatgaccagctttgctgaacaaaaattcaggaaactgaatcataccgatggaaaaagtagtggaagcagttctcaaaaaactacaccagaaggctctgaacttaatattcctcatgtggttgcttgggcacaaattccagaagaaacagggcttccacagggacgggacactacccagctgttggcctctgaaatggtgcatcttaggatgaaactaaccaaacagagacagaaaatgggaaggacagcattccttactgtagtgaaaaagaaaggggatgggatatctcctctacgagaggaagcggcgggtgcagaagatgagaaagtatatactgatcgagcaaaagaaaaggaatcacaaaaaactgatggacaaaggagcaagtcactggcagatataaaagagagcatggagaatcctcaagccaaatggctaaagtctccaactacacctattgatcctgagaagcagtggaacctggcaagcccctcagaagaaactttaaatgaaggagagattttagaatataccaaatccattgaaaagttaaattcatccctgcattttctacaacaagaaatgcaacgcttgtcacttcagcaggagatgttaatgcagatgagagagcaacaatcttgggtgatttcacctccacaaccctctccacagaaacagattcgagattttaagccttctaagcaggcaggcctgtcatcagccattgcaccattctcctcagactcccctcgtcctactcacccatctccacagtcttctaacaggaaaagtgcatctttttctgttaaaagtcaaaggactcctaggccaaatgagttaaaaataacacctttgaatcgaaccttgacacctcctcggtctgtggatagccttcctcggttaaggaggttttcaccaagtcaagttcctattcaaactaggtcatttgtatgttttggggatgatggagaacctcagttaaaggaatccaaacctaaagaggaagttaaaaaggaggaattggaatccaaagggactttggaacagcgtggacataatccagaagaaaaggaaatcaaaccttttgagtcaacagtctctgaagtcctatcactgcctgtcacagagactgtatgtctgacaccaaatgaggaccaattgaatcaacccacagaaccccctcctaaacccgttttcccacccactgctccaaaaaatgttaatctgattgaagtttccctctcagatttgaaaccccctgaaaaggctgatgtacctgttgaaaaatatgatggagaaagtgataaagaacaatttgatgatgaccagaaagtatgctgtggattcttttttaaggatgatcaaaaagcagaaaatgatatggcaatgaaacgggcagctttgttggagaaaagattaagaagggaaaaggaaactcagctccggaaacaacagttggaagcagaaatggagcataagaaggaggaaacaaggcgtaaaactgaggaagaacgtcagaagaaagaagatgagagagcacgcagagaatttattaggcaagaatatatgaggcggaaacaactgaaactaatggaagatatggatacagtaattaaaccccgtcctcaagtagtaaaacaaaaaaaacagcgaccaaaatctattcacagagatcatattgaatcccccaaaacaccaataaagggtcctccagtctctagcctttctttggcatcgctgaacacgggtgataacgagagtgtacattcaggcaagaggacgccaagatcagagtctgtagaaggcttcttatctccaagtcgttgtggcagtcgaaatggagaaaaagactgggagaatgcatcaacaacttcttcagtggcttctggaacagaatatacaggaccaaagctctacaaagaacccagtgcaaaatccaataagcacataatacaaaatgctttagctcattgctgtttggctggaaaagtaaatgaaggtcagaagaaaaaaatactggaggaaatggagaaatcagatgccaacaacttcttaatcttgttccgggattcaggatgccagttcagatctttatacacttattgcccagaaactgaagaaatcaataaactgactgggataggccctaaatctatcactaaaaaaatgattgaaggactttacaaatataattctgacaggaaacagtttagccacatacccgctaaaactttatctgccagtgttgatgcaattaccattcatagccatttatggcagaccaaaagaccagtaacacccaaaaaacttttacccactaaggcatagaagttgggaaatacttgcttcagaacattcatggtaaatttgcacttcatctttcctgcctatagaaaatctttctaattgccaacaagacttttattaattaaaactggacattaagctctgttgtcatgaacaactggaatgtaaaccacagtattttggagtgcagaacattctcaattaagtgataagtccaaatgatgaaggaaatgttttaattcacaaatggagatttgtatgtgttatcaggttcacctgcttgatattagatacattaaagcactgaattttcatggatattagttggatttatcattgaaatatggttaagattacaaattatgtgttttatttgttgcttttttttaaccttttaatgtatattcttgtcttcagatggtttgctatttttctctcctgggggtttattctaagatacctttgtattttatttcatgtggagatcatgaaagtaggaaatatacctttagaagtaactcgcacctttcttatgatgttaagagaaacactagtgtttagttttacagtaaccctcatattttaatggtgttacagcatttgcaaaaattattctgctaagtatttacaactctatttattattcactcaagtattaacattctctattaaataagaggaggtgttgtaaagagctgctagtaggttcgctttaaaccacatgagcttaaccaagaatatgttatgagaagttgctgattaaatcagtgctgtttttacaccacttctggccaactcagaataatttagattgttcttttaacaaaaaaggctttctatctcttttaaagtaagtcactttataagttggcagaagtgaatgacactttgagagtagtctttcaatctgaagatgtaagacttcctgaaacaagttctcaagaagtctttacattatatttataactcatataaaaattatatttagaatttttaaacatgtacaaagggctacattttaattttaaaatagcttcacattattttacttatattgggtttttcttcattttaatccttttcaagtggaatggcttagaataagtatacacttgaaatctcctctacatgatctttgttctttaacagtgtataccagagggttagttggggaaaaacttcattctcaggaaaagacttgaatgattatgtgaccctgttatatttcagtgttgtgacaaatgtgtaaactagcgggggaagacagtattgtatcataaatgagatgcgtagtttgttttctttcatgggaagtagagataaaaatatatacatttctctaattgagttgtttagagaaagaactaatgtctcatatgatgtatttacttattttaaaaaaaagaataggaatgagatgtccctgagctgtacttttctattattataaggcctttaggcatcagtgcatctgggttatcaacattttctcaaatgctgtcaatattttactgtaatttatgttcttatatttatgtatatttgttaaaactgtaaaaaaatttcacagatttttttccaatacctgtgcaagatacatgtgtagctcaaaactatttgtgatctactgtttgcatgtaagagaccaggatatgtaactcttatattttaagtgtatacatattgtgtatataacatatggatattaaaaatggggaattgcacattttaccttttggacagtaatttctatcacagttagaaggaaatgatagtcaaatacacgtttagattaaaactagtttaaaaaattataaatgaatctaatcaaaatgtgaatagtagtcaaaaggataatttaataagcattttacgttactaaatttgttcatttcaatattaactaaatttccctcatcaaagcaatctttgtgatattacttcgctattaaataaagaaaattggatgcaagacaatggagaaactttaaaactaaacaggaccaccctttattcttaaatttgtgtgtgtccaacagttgaattgaatgtctataaggtctaaaggtagaatgtgaatattgccacagagttcattgctctcagtataagattttactttattaatgcagaaggaatatggatatatttctttaagtctgcagatttttttattatggtgcagcttttttttaattatgtttttaaaattatacagttgaaaaatatgccatttcataaagtctgaggattttcgtcaaccttactgaaacacactggtgctttcatcatcagaggtcaaattattatgataactattccattaagtttgccaaacatttgtcgtggttaccagtgcagcctgtcaaattctgctatttgacacagctttggaaagatttagttcttggtttttccgttttgtattagaatgactgttacagttttatttggctgtttaaagccaaattcagctatttaattatggtttcatggacactgttgagcaatgtacagtgtatggtgtgcttacctgtccactctagagcattgcttacaggttttttgttttttaagatgctgtgctgtaaaatactgtcatacttgctatttcctggtacagtgtagtttttcccctttcatttgaataaaagcatggcaccaaatga

SEQ ID NO: 462802 - DNA, 3035 bp, Homo sapiens
actaatggctgtcactcgccatatacaaatgctcagcccttgtgttgctggaaagtaatgaaggcagaagaaaaatactgagaaatggagaaatcagatgccaacaacttcttaatcttgttccgggattcaggatgccagttcagatctttatacacttattgcccagaaactgaagaaatcaataaactgactgggataggccctaaatctatcactaaaaaaatgattgaaggactttacaaatataattctgacaggaaacagtttagccacatacccgctaaaactttatctgccagtgttgatgcaattaccattcatagccatttatggcagaccaaaagaccagtaacacccaaaaaacttttacccactaaggcatagaagttgggaaatacttgcttcagaacattcatggtaaatttgcacttcatctttcctgcctatagaaaatctttctaattgccaacaagacttttattaattaaaactggacattaagctctgttgtcatgaacaactggaatgtaaaccacagtattttggagtgcagaacattctcaattaagtgataagtccaaatgatgaaggaaatgttttaattcacaaatggagatttgtatgtgttatcaggttcacctgcttgatattagatacattaaagcactgaattttcatggatattagttggatttatcattgaaatatggttaagattacaaattatgtgttttatttgttgcttttttttaaccttttaatgtatattcttgtcttcagatggtttgctatttttctctcctgggggtttattctaagatacctttgtattttatttcatgtggagatcatgaaagtaggaaatatacctttagaagtaactcgcacctttcttatgatgttaagagaaacactagtgtttagttttacagtaaccctcatattttaatggtgttacagcatttgcaaaaattattctgctaagtatttacaactctatttattattcactcaagtattaacattctctattaaataagaggaggtgttgtaaagagctgctagtaggttcgctttaaaccacatgagcttaaccaagaatatgttatgagaagttgctgattaaatcagtgctgtttttacaccacttctggccaactcagaataatttagattgttcttttaacaaaaaaggctttctatctcttttaaagtaagtcactttataagttggcagaagtgaatgacactttgagagtagtctttcaatctgaagatgtaagacttcctgaaacaagttctcaagaagtctttacattatatttataactcatataaaaattatatttagaatttttaaacatgtacaaagggctacattttaattttaaaatagcttcacattattttacttatattgggtttttcttcattttaatccttttcaagtggaatggcttagaataagtatacacttgaaatctcctctacatgatctttgttctttaacagtgtataccagagggttagttggggaaaaacttcattctcaggaaaagacttgaatgattatgtgaccctgttatatttcagtgttgtgacaaatgtgtaaactagcgggggaagacagtattgtatcataaatgagatgcgtagtttgttttctttcatgggaagtagagataaaaatatatacatttctctaattgagttgtttagagaaagaactaatgtctcatatgatgtatttacttattttaaaaaaaagaataggaatgagatgtccctgagctgtacttttctattattataaggcctttaggcatcagtgcatctgggttatcaacattttctcaaatgctgtcaatattttactgtaatttatgttcttatatttatgtatatttgttaaaactgtaaaaaaatttcacagatttttttccaatacctgtgcaagatacatgtgtagctcaaaactatttgtgatctactgtttgcatgtaagagaccaggatatgtaactcttatattttaagtgtatacatattgtgtatataacatatggatattaaaaatggggaattgcacattttaccttttggacagtaatttctatcacagttagaaggaaatgatagtcaaatacacgtttagattaaaactagtttaaaaaattataaatgaatctaatcaaaatgtgaatagtagtcaaaaggataatttaataagcattttacgttactaaatttgttcatttcaatattaactaaatttccctcatcaaagcaatctttgtgatattacttcgctattaaataaagaaaattggatgcaagacaatggagaaactttaaaactaaacaggaccaccctttattcttaaatttgtgtgtgtccaacagttgaattgaatgtctataaggtctaaaggtagaatgtgaatattgccacagagttcattgctctcagtataagattttactttattaatgcagaaggaatatggatatatttctttaagtctgcagatttttttattatggtgcagcttttttttaattatgtttttaaaattatacagttgaaaaatatgccatttcataaagtctgaggattttcgtcaaccttactgaaacacactggtgctttcatcatcagaggtcaaattattatgataactattccattaagtttgccaaacatttgtcgtggttaccagtgcagcctgtcaaattctgctatttgacacagctttggaaagatttagttcttggtttttccgttttgtattagaatgactgttacagttttatttggctgtttaaagccaaattcagctatttaattatggtttcatggacactgttgagcaatgtacagtgtatggtgtgcttacctgtccactctagagcattgcttacaggttttttgttttttaagatgctgtgctgtaaaatactgtcatacttgctatttcctggtacagtgtagtttttcccctttcatttgaataaaagcatggcaccaaatga

SEQ ID NO: 462803 - DNA, 1410 bp, Homo sapiens
ctccttgagtatccccccccaatggaatgcgtagtttgttttctttcatgggaagtagagataaaaatatatacatttctctaattgagttgtttagagaaagaactaatgtctcatatgatgtatttacttattttaaaaaaaagaataggaatgagatgtccctgagctgtacttttctattattataaggcctttaggcatcagtgcatctgggttatcaacattttctcaaatgctgtcaatattttactgtaatttatgttcttatatttatgtatatttgttaaaactgtaaaaaaatttcacagatttttttccaatacctgtgcaagatacatgtgtagctcaaaactatttgtgatctactgtttgcatgtaagagaccaggatatgtaactcttatattttaagtgtatacatattgtgtatataacatatggatattaaaaatggggaattgcacattttaccttttggacagtaatttctatcacagttagaaggaaatgatagtcaaatacacgtttagattaaaactagtttaaaaaattataaatgaatctaatcaaaatgtgaatagtagtcaaaaggataatttaataagcattttacgttactaaatttgttcatttcaatattaactaaatttccctcatcaaagcaatctttgtgatattacttcgctattaaataaagaaaattggatgcaagacaatggagaaactttaaaactaaacaggaccaccctttattcttaaatttgtgtgtgtccaacagttgaattgaatgtctataaggtctaaaggtagaatgtgaatattgccacagagttcattgctctcagtataagattttactttattaatgcagaaggaatatggatatatttctttaagtctgcagatttttttattatggtgcagcttttttttaattatgtttttaaaattatacagttgaaaaatatgccatttcataaagtctgaggattttcgtcaaccttactgaaacacactggtgctttcatcatcagaggtcaaattattatgataactattccattaagtttgccaaacatttgtcgtggttaccagtgcagcctgtcaaattctgctatttgacacagctttggaaagatttagttcttggtttttccgttttgtattagaatgactgttacagttttatttggctgtttaaagccaaattcagctatttaattatggtttcatggacactgttgagcaatgtacagtgtatggtgtgcttacctgtccactctagagcattgcttacaggttttttgttttttaagatgctgtgctgtaaaatactgtcatacttgctatttcctggtacagtgtagtttttcccctttcatttgaataaaagcatggcaccaaatga

SEQ ID NO: 462804 - DNA, 4691 bp, Homo sapiens
gaggagccgcggtgaaagatgggggatgctgcagaccccagggagatgagaaagacgttcattgttccagccatcaagccttttgaccactatgatttctccagggccaaaatcgcctgcaatctggcctggctggtggccaaagcctttgggacagataaggtaactggctcacagattaatttgcacaagattaaacatctggcaagtgatgtgttctgcatgtctgactctgaagcctttgcttattactctataccgttctgcagagtaaccgttttatctgcagaaaatgtgccagaggaacttcaagaaccattttacacagatcagtatgaccaggaacacatcaaaccacctgttgttaatttgcttctatcggctgaactatactgtcgtgctgggagtctcattctcaagagtgatgctgcaaaaccccttttgggccatgatgctgtaatccaggctttagcacagaaaggtctttatgtcactgaccaggaaaaattggtaactgaacgagatctccacaagaaacccatacagatggaggacaacaagccagggcacaaaagcttgaaaactggtagcagattggagaaggaaatggtagattctaaggctagactaacaaagcagctaataagaaagaaagaaagaaactttacctcttttaaggagtttagacttcgttatgtagaaaatgagagtgcacatttggccatgatcgataccctcatgatggcttatactgtagaaatggtcagtatagaaaaagtaattgcgtgtgctcagcagtattcagctttttttcaagccacagatctgccctatgatattgaggacgctgtcatgtactggataaataaggtaaatgaacatttgaaagacataatggaacaagaacaaaaactgaaagaacatcacacagttgaagctccaggaggtcaaaaggctcgttatcggaaagagcaaacattgcttaagcaactgccttgcattccattggtagaaaatttgttgaaggatgggacagatggctgtgcattagctgcccttattcatttttactgtcctgatgttgtcagattagaggatatttgtttgaaagaaactatgtctttggctgatagcctgtataatctgcagctgattcaagaattttgccaagaatacttgaaccagtgttgccatttcactctggaagatatgctctatgctgcttcatccataaagagtaattatttggtgttcatggcggaactgttctggtggtttgaagtggtgaagccgtcttttgtacagcctcgtgttgttcgtccacaaggagctgaacctgtaaaagatatgccttcaattcctgtcttgaatgctgccaaaagaaatgtcttagatagtagttctgacttcccttcaagtggggaaggagctacatttacacagtctcatcatcatttgccttctaggtattcacgtccccaggctcattcttcagcctcaggaggaattagaaggtcttcatctatgtcttatgttgatggcttcatagggacatggcccaaagagaaaagatcatcagtgcatggcgtatcatttgatatttcttttgataaagaagatagtgtacagagatccactccaaaccgaggaatcactcgttctattagtaatgaaggacttactctgaacaacagtcatgtatctaaacacattaggaaaaatttgtccttcaagccaataaatggagaagaggaagcagagagcattgaagaagaacttaatatagattctcacagtgacctcaaatcttgtgtgccccttaacacaaatgaactaaattctaatgagaatattcattacaagcttccaaatggagctttacaaaatagaatacttcttgacgagtttggcaatcagatcgagacaccaagcattgaagaagcattacaaataattcatgatactgaaaaatctcctcatacacctcagccagaccaaattgctaatggcttctttcttcatagtcaagaaatgagtatcttaaattcaaatatcaagttaaatcaatctagtcctgataatgtaactgatacgaaaggtgccttgagtcccataactgacaatactgaagtagacactggaattcacgttccttcagaagatattcctgaaactatggacgaagattcttcgttgagagattatactgtaagcttggactctgacatggatgatgcatctaaatttcttcaggattatgatattcgaactggcaacaccagggaagctttgagtccttgtccaagtactgtaagtaccaagtctcagccaggcagcagtgcttcttctagttctggagttaaaatgaccagctttgctgaacaaaaattcaggaaactgaatcataccgatggaaaaagtagtggaagcagttctcaaaaaactacaccagaaggctctgaacttaatattcctcatgtggttgcttgggcacaaattccagaagaaacagggcttccacagggacgggacactacccagctgttggcctctgaaatggtgcatcttaggatgaaactaaccaaacagagacagaaaatgggaaggacagcattccttactgtagtgaaaaagaaaggggatgggatatctcctctacgagaggaagcggcgggtgcagaagatgagaaagtatatactgatcgagcaaaagaaaaggaatcacaaaaaactgatggacaaaggagcaagtcactggcagatataaaagagagcatggagaatcctcaagccaaatggctaaagtctccaactacacctattgatcctgagaagcagtggaacctggcaagcccctcagaagaaactttaaatgaaggagagattttagaatataccaaatccattgaaaagttaaattcatccctgcattttctacaacaagaaatgcaacgcttgtcacttcagcaggagatgttaatgcagatgagagagcaacaatcttgggtgatttcacctccacaaccctctccacagaaacagattcgagattttaagccttctaagcaggcaggcctgtcatcagccattgcaccattctcctcagactcccctcgtcctactcacccatctccacagtcttctaacaggaaaagtgcatctttttctgttaaaagtcaaaggactcctaggccaaatgagttaaaaataacacctttgaatcgaaccttgacacctcctcggtctgtggatagccttcctcggttaaggaggttttcaccaagtcaagttcctattcaaactaggtcatttgtatgttttggggatgatggagaacctcagttaaaggaatccaaacctaaagaggaagttaaaaaggaggaattggaatccaaagggactttggaacagcgtggacataatccagaagaaaaggaaatcaaaccttttgagtcaacagtctctgaagtcctatcactgcctgtcacagagactgtatgtctgacaccaaatgaggaccaattgaatcaacccacagaaccccctcctaaacccgttttcccacccactgctccaaaaaatgttaatctgattgaagtttccctctcagatttgaaaccccctgaaaaggctgatgtacctgttgaaaaatatgatggagaaagtgataaagaacaatttgatgatgaccagaaagtatgctgtggattcttttttaaggatgatcaaaaagcagaaaatgatatggcaatgaaacgggcagctttgttggagaaaagattaagaagggaaaaggaaactcagctccggaaacaacagttggaagcagaaatggagcataagaaggaggaaacaaggcgtaaaactgaggaagaacgtcagaagaaagaagatgagagagcacgcagagaatttattaggcaagaatatatgaggcggaaacaactgaaactaatggaagatatggatacagtaattaaaccccgtcctcaagtagtaaaacaaaaaaaacagcgaccaaaatctattcacagagatcatattgaatcccccaaaacaccaataaagggtcctccagtctctagcctttctttggcatcgctgaacacgggtgataacgagagtgtacattcaggcaagaggacgccaagatcagagtctgtagaaggcttcttatctccaagtcgttgtggcagtcgaaatggagaaaaagactgggagaatgcatcaacaacttcttcagtggcttctggaacagaatatacaggaccaaagctctacaaagaacccagtgcaaaatccaataagcacataatacaaaatgctttagctcattgctgtttggctggaaaagtaaatgaaggtcagaagaaaaaaatactggaggtaagcatgtttgcatgaaaattaaatttggcaaactgtagaagtcttttatccattcaagagaatgtactctcatgggcctagactttcaacagcatgtaaaaagatctgtagctagatgttttaattatcagatttagtttattttcacattaggttctggaagcctgcagattttattaaagactagcaataggctttaagatttgtcattgaaataatgttataaaatgtgactaagaaacgtaacataattatataaactttattcagcaaaataaagggtttttattcgtgttgttatg

SEQ ID NO: 462805 - DNA, 3998 bp, Homo sapiens
gaggagccgcggtgaaagatgggggatgctgcagaccccagggagatgagaaagacgttcattgttccagccatcaagccttttgaccactatgatttctccagggccaaaatcgcctgcaatctggcctggctggtggccaaagcctttgggacagataaggtaactggctcacagattaatttgcacaagattaaacatctggcaagtgatgtgttctgcatgtctgactctgaagcctttgcttattactctataccgttctgcagagtaaccgttttatctgcagaaaatgtgccagaggaacttcaagaaccattttacacagatcagtatgaccaggaacacatcaaaccacctgttgttaatttgcttctatcggctgaactatactgtcgtgctgggagtctcattctcaagagtgatgctgcaaaaccccttttgggccatgatgctgtaatccaggctttagcacagaaaggtctttatgtcactgaccaggaaaaattggtaactgaacgagatctccacaagaaacccatacagatggaggacaacaagccagggcacaaaagcttgaaaactggtagcagattggagaaggaaatggtagattctaaggctagactaacaaagcagctaataagaaagaaagaaagaaactttacctcttttaaggagtttagacttcgttatgtagaaaatgagagtgcacatttggccatgatcgataccctcatgatggcttatactgtagaaatggtcagtatagaaaaagtaattgcgtgtgctcagcagtattcagctttttttcaagccacagatctgccctatgatattgaggacgctgtcatgtactggataaataaggtaaatgaacatttgaaagacataatggaacaagaacaaaaactgaaagaacatcacacagttgaagctccaggaggtcaaaaggctcgttatcggaaagagcaaacattgcttaagcaactgccttgcattccattggtagaaaatttgttgaaggatgggacagatggctgtgcattagctgcccttattcatttttactgtcctgatgttgtcagattagaggatatttgtttgaaagaaactatgtctttggctgatagcctgtataatctgcagctgattcaagaattttgccaagaatacttgaaccagtgttgccatttcactctggaagatatgctctatgctgcttcatccataaagagtaattatttggtgttcatggcggaactgttctggtggtttgaagtggtgaagccgtcttttgtacagcctcgtgttgttcgtccacaaggagctgaacctgtaaaagatatgccttcaattcctgtcttgaatgctgccaaaagaaatgtcttagatagtagttctgacttcccttcaagtggggaaggagctacatttacacagtctcatcatcatttgccttctaggtattcacgtccccaggctcattcttcagcctcaggaggaattagaaggtcttcatctatgtcttatgttgatggcttcatagggacatggcccaaagagaaaagatcatcagtgcatggcgtatcatttgatatttcttttgataaagaagatagtgtacagagatccactccaaaccgaggaatcactcgttctattagtaatgaaggacttactctgaacaacagtcatgtatctaaacacattaggaaaaatttgtccttcaagccaataaatggagaagaggaagcagagagcattgaagaagaacttaatatagattctcacagtgacctcaaatcttgtgtgccccttaacacaaatgaactaaattctaatgagaatattcattacaagcttccaaatggagctttacaaaatagaatacttcttgacgagtttggcaatcagatcgagacaccaagcattgaagaagcattacaaataattcatgatactgaaaaatctcctcatacacctcagccagaccaaattgctaatggcttctttcttcatagtcaagaaatgagtatcttaaattcaaatatcaagttaaatcaatctagtcctgataatgtaactgatacgaaaggtgccttgagtcccataactgacaatactgaagtagacactggaattcacgttccttcagaagatattcctgaaactatggacgaagattcttcgttgagagattatactgtaagcttggactctgacatggatgatgcatctaaatttcttcaggattatgatattcgaactggcaacaccagggaagctttgagtccttgtccaagtactgtaagtaccaagtctcagccaggcagcagtgcttcttctagttctggagttaaaatgaccagctttgctgaacaaaaattcaggaaactgaatcataccgatggaaaaagtagtggaagcagttctcaaaaaactacaccagaaggctctgaacttaatattcctcatgtggttgcttgggcacaaattccagaagaaacagggcttccacagggacgggacactacccagctgttggcctctgaaatggtgcatcttaggatgaaactaaccaaacagagacagaaaatgggaaggacagcattccttactgtagtgaaaaagaaaggggatgggatatctcctctacgagaggaagcggcgggtgcagaagatgagaaagtatatactgatcgagcaaaagaaaaggaatcacaaaaaactgatggacaaaggagcaagtcactggcagatataaaagagagcatggagaatcctcaagccaaatggctaaagtctccaactacacctattgatcctgagaagcagtggaacctggcaagcccctcagaagaaactttaaatgaaggagagattttagaatataccaaatccattgaaaagttaaattcatccctgcattttctacaacaagaaatgcaacgcttgtcacttcagcaggagatgttaatgcagatgagagagcaacaatcttgggtgatttcacctccacaaccctctccacagaaacagattcgagattttaagccttctaagcaggcaggcctgtcatcagccattgcaccattctcctcagactcccctcgtcctactcacccatctccacagtcttctaacaggaaaagtgcatctttttctgttaaaagtcaaaggactcctaggccaaatgagttaaaaataacacctttgaatcgaaccttgacacctcctcggtctgtggatagccttcctcggttaaggaggttttcaccaagtcaagttcctattcaaactaggtcatttgtatgttttggggatgatggagaacctcagttaaaggaatccaaacctaaagaggaagttaaaaaggaggaattggaatccaaagggactttggaacagcgtggacataatccagaagaaaaggaaatcaaaccttttgagtcaacagtctctgaagtcctatcactgcctgtcacagagactgtatgtctgacaccaaatgaggaccaattgaatcaacccacagaaccccctcctaaacccgttttcccacccactgctccaaaaaatgttaatctgattgaagtttccctctcagatttgaaaccccctgaaaaggctgatgtacctgttgaaaaatatgatggagaaagtgataaagaacaatttgatgatgaccagaaagtatgctgtggattcttttttaaggatgatcaaaaagcagaaaatgatatggcaatgaaacgggcagctttgttggagaaaagattaagaagggaaaaggaaactcagctccggaaacaacagttggaagcagaaatggagcataagaaggaggaaacaaggcgtaaaactgaggaagaacgtcagaagaaagaagatgagagagcacgcagagaatttattaggcaagaatatatgaggcggaaacaactgaaactaatggaagatatggatacagtaattaaaccccgtcctcaagtagt

SEQ ID NO: 462806 - DNA, 1779 bp, Homo sapiens
gaggagccgcggtgaaagatgggggatgctgcagaccccagggagatgagaaagacgttcattgttccagccatcaagccttttgaccactatgatttctccagggccaaaatcgcctgcaatctggcctggctggtggccaaagcctttgggacagataaggtaactggctcacagattaatttgcacaagattaaacatctggcaagtgatgtgttctgcatgtctgactctgaagcctttgcttattactctataccgttctgcagagtaaccgttttatctgcagaaaatgtgccagaggaacttcaagaaccattttacacagatcagtatgaccaggaacacatcaaaccacctgttgttaatttgcttctatcggctgaactatactgtcgtgctgggagtctcattctcaagagtgatgctgcaaaaccccttttgggccatgatgctgtaatccaggctttagcacagaaaggtctttatgtcactgaccaggaaaaattggtaactgaacgagatctccacaagaaacccatacagatggaggacaacaagccagggcacaaaagcttgaaaactggtagcagattggagaaggaaatggtagattctaaggctagactaacaaagcagctaataagaaagaaagaaagaaactttacctcttttaaggagtttagacttcgttatgtagaaaatgagagtgcacatttggccatgatcgataccctcatgatggcttatactgtagaaatggtcagtatagaaaaagtaattgcgtgtgctcagcagtattcagctttttttcaagccacagatctgccctatgatattgaggacgctgtcatgtactggataaataaggtaaatgaacatttgaaagacataatggaacaagaacaaaaactgaaagaacatcacacagttgaagctccaggaggtcaaaaggctcgttatcggaaagagcaaacattgcttaagcaactgccttgcattccattggtagaaaatttgttgaaggatgggacagatggctgtgcattagctgcccttattcatttttactgtcctgatgttgtcagattagaggatatttgtttgaaagaaactatgtctttggctgatagcctgtataatctgcagctgattcaagaattttgccaagaatacttgaaccagtgttgccatttcactctggaagatatgctctatgctgcttcatccataaagagtaattatttggtgttcatggcggaactgttctggtggtttgaagtggtgaagccgtcttttgtacagcctcgtgttgttcgtccacaaggagctgaacctgtaaaagatatgccttcaattcctgtcttgaatgctgccaaaagaaatgtcttagatagtagttctgacttcccttcaagtggggaaggagctacatttacacagtctcatcatcatttgccttctaggtattcacgtccccaggctcattcttcagcctcaggatgatcaaaaagcagaaaatgatatggcaatgaaacgggcagctttgttggagaaaagattaagaagggaaaaggaaactcagctccggaaacaacagttggaagcagaaatggagcataagaaggaggaaacaaggcgtaaaactgaggaagaacgtcagaagaaagaagatgagagagcacgcagagaatttattaggcaagaatatatgaggcggaaacaactgaaactaatggaagatatggatacagtaattaaaccccgtcctcaagtagt

SEQ ID NO: 462807 - DNA, 417 bp, Homo sapiens
ggaaaaggaaactcagctccggaaacaacagttggaagcagaaatggagcataagaaggaggaaacaaggtaaaggaaattgctggcccagtgctagatctgaactttaatgatgcatgggcatatttagaaaaagttggtaagtactcaaagaggtggtctctcattaatttttattaacagatttctttcagagaagtttgtagtatagatagacagctggatcaatgctattttttggtgctttgtagaaatcaatttattttcccaaagtattgcctaattttatatttttatcttaagtttaaggcatctcatgggaaagttctctagaaacattaatttaaataattatatgtttaaaaaacattaaaataactttcctgggagatacacacacacacacacacacacaca

SEQ ID NO: 462808 - DNA, 519 bp, Homo sapiens
ggtttaaacaatatgtttccatatttttaaaatttaggttgtagaatgagaggtggtagtgttgtttctaacttaagacattctacctaaatttatattaaacagctaaaatataacattttaaatttattttccattgcagtggggaaggagctacatttacacagtctcatcatcatttgccttctaggtattcacgtccccaggctcattcttcagcctcaggtaatatatttgaaaaagcctaggaaaatactcttttaagtaggttacctgggaaatgattgacagtaaatataaataaacaaatatccagggtttttttgtgtgtgtgtgtgtgtgtttttttgtttgtttgtttgttttctgaaaaatggctattataacacactaaaagcatggtcagtttcactgtggttgcttttcttgataaaattatctctaattctccttatgtacctatttaatttgtattgctattaatgaatcctcaaatacatgaaatctcctaagttgcta

SEQ ID NO: 462809 - DNA, 761 bp, Homo sapiens
tgagacggagtctttctccattgcccaggctagagtgcagtgacacgatctcggctcactgcaacccctgcctcctggcttcaagtgattcttctgcctcagcctcctgagtagctgggattacaggcgcgtaccaccatgcccagctaatttttgtatttttggtagagacgggctttcaccatattggccaggctgatctcgaacttctgaccttgtgatctacctgcctcggcctcccaaagtgctgggattacaggcatgagccaccgcgcccggccttatcatattatttttaggcctttaggttgattttgattgttactttcacgtataccctctgggccccattttttctctgtttgagacataaaacatattttattttctaattagatcagagtctgtagaaggcttcttatctccaagtcgttgtggcagtcgaaatggagaaaaagactgggagaatgcatcaacaacttcttcagtggcttctggaacagaatatacaggttagtgtctatacatttttagagaaacatttgaatttaacacactcataaatggagggtgtactaaagaaaattttattggctcacctttgggtcttaaacataggcaactaataaacagtgaatgcaggtggtcactttcaggtagttcagtaagtttctaaacaaaattagtgatgctacttatatctcatccctctaaccaatgctggccatttctgtgtgtagtttgggtccgaagaagtttta

SEQ ID NO: 462810 - DNA, 7394 bp, Homo sapiens
gaggagccgcggtgaaagatgggggatgctgcagaccccagggagatgagaaagacgttcattgttccagccatcaagccttttgaccactatgatttctccagggccaaaatcgcctgcaatctggcctggctggtggccaaagcctttgggacagataaggtaactggctcacagattaatttgcacaagattaaacatctggcaagtgatgtgttctgcatgtctgactctgaagcctttgcttattactctataccgttctgcagagtaaccgttttatctgcagaaaatgtgccagaggaacttcaagaaccattttacacagatcagtatgaccaggaacacatcaaaccacctgttgttaatttgcttctatcggctgaactatactgtcgtgctgggagtctcattctcaagagtgatgctgcaaaaccccttttgggccatgatgctgtaatccaggctttagcacagaaaggtctttatgtcactgaccaggaaaaattggtaactgaacgagatctccacaagaaacccatacagatggaggacaacaagccagggcacaaaagcttgaaaactggtagcagattggagaaggaaatggtagattctaaggctagactaacaaagcagctaataagaaagaaagaaagaaactttacctcttttaaggagtttagacttcgttatgtagaaaatgagagtgcacatttggccatgatcgataccctcatgatggcttatactgtagaaatggtcagtatagaaaaagtaattgcgtgtgctcagcagtattcagctttttttcaagccacagatctgccctatgatattgaggacgctgtcatgtactggataaataaggtaaatgaacatttgaaagacataatggaacaagaacaaaaactgaaagaacatcacacagttgaagctccaggaggtcaaaaggctcgttatcggaaagagcaaacattgcttaagcaactgccttgcattccattggtagaaaatttgttgaaggatgggacagatggctgtgcattagctgcccttattcatttttactgtcctgatgttgtcagattagaggatatttgtttgaaagaaactatgtctttggctgatagcctgtataatctgcagctgattcaagaattttgccaagaatacttgaaccagtgttgccatttcactctggaagatatgctctatgctgcttcatccataaagagtaattatttggtgttcatggcggaactgttctggtggtttgaagtggtgaagccgtcttttgtacagcctcgtgttgttcgtccacaaggagctgaacctgtaaaagatatgccttcaattcctgtcttgaatgctgccaaaagaaatgtcttagatagtagttctgacttcccttcaagtggggaaggagctacatttacacagtctcatcatcatttgccttctaggtattcacgtccccaggctcattcttcagcctcaggaggaattagaaggtcttcatctatgtcttatgttgatggcttcatagggacatggcccaaagagaaaagatcatcagtgcatggcgtatcatttgatatttcttttgataaagaagatagtgtacagagatccactccaaaccgaggaatcactcgttctattagtaatgaaggacttactctgaacaacagtcatgtatctaaacacattaggaaaaatttgtccttcaagccaataaatggagaagaggaagcagagagcattgaagaagaacttaatatagattctcacagtgacctcaaatcttgtgtgccccttaacacaaatgaactaaattctaatgagaatattcattacaagcttccaaatggagctttacaaaatagaatacttcttgacgagtttggcaatcagatcgagacaccaagcattgaagaagcattacaaataattcatgatactgaaaaatctcctcatacacctcagccagaccaaattgctaatggcttctttcttcatagtcaagaaatgagtatcttaaattcaaatatcaagttaaatcaatctagtcctgataatgtaactgatacgaaaggtgccttgagtcccataactgacaatactgaagtagacactggaattcacgttccttcagaagatattcctgaaactatggacgaagattcttcgttgagagattatactgtaagcttggactctgacatggatgatgcatctaaatttcttcaggattatgatattcgaactggcaacaccagggaagctttgagtccttgtccaagtactgtaagtaccaagtctcagccaggcagcagtgcttcttctagttctggagttaaaatgaccagctttgctgaacaaaaattcaggaaactgaatcataccgatggaaaaagtagtggaagcagttctcaaaaaactacaccagaaggctctgaacttaatattcctcatgtggttgcttgggcacaaattccagaagaaacagggcttccacagggacgggacactacccagctgttggcctctgaaatggtgcatcttaggatgaaactagaagaaaagaggcgtgctatagaagcccagaaaaagaaaatggaagctgcttttaccaaacagagacagaaaatgggaaggacagcattccttactgtagtgaaaaagaaaggggatgggatatctcctctacgagaggaagcggcgggtgcagaagatgagaaagtatatactgatcgagcaaaagaaaaggaatcacaaaaaactgatggacaaaggagcaagtcactggcagatataaaagagagcatggagaatcctcaagccaaatggctaaagtctccaactacacctattgatcctgagaagcagtggaacctggcaagcccctcagaagaaactttaaatgaaggagagattttagaatataccaaatccattgaaaagttaaattcatccctgcattttctacaacaagaaatgcaacgcttgtcacttcagcaggagatgttaatgcagatgagagagcaacaatcttgggtgatttcacctccacaaccctctccacagaaacagattcgagattttaagccttctaagcaggcaggcctgtcatcagccattgcaccattctcctcagactcccctcgtcctactcacccatctccacagtcttctaacaggaaaagtgcatctttttctgttaaaagtcaaaggactcctaggccaaatgagttaaaaataacacctttgaatcgaaccttgacacctcctcggtctgtggatagccttcctcggttaaggaggttttcaccaagtcaagttcctattcaaactaggtcatttgtatgttttggggatgatggagaacctcagttaaaggaatccaaacctaaagaggaagttaaaaaggaggaattggaatccaaagggactttggaacagcgtggacataatccagaagaaaaggaaatcaaaccttttgagtcaacagtctctgaagtcctatcactgcctgtcacagagactgtatgtctgacaccaaatgaggaccaattgaatcaacccacagaaccccctcctaaacccgttttcccacccactgctccaaaaaatgttaatctgattgaagtttccctctcagatttgaaaccccctgaaaaggctgatgtacctgttgaaaaatatgatggagaaagtgataaagaacaatttgatgatgaccagaaagtatgctgtggattcttttttaaggatgatcaaaaagcagaaaatgatatggcaatgaaacgggcagctttgttggagaaaagattaagaagggaaaaggaaactcagctccggaaacaacagttggaagcagaaatggagcataagaaggaggaaacaaggcgtaaaactgaggaagaacgtcagaagaaagaagatgagagagcacgcagagaatttattaggcaagaatatatgaggcggaaacaactgaaactaatggaagatatggatacagtaattaaaccccgtcctcaagtagtaaaacaaaaaaaacagcgaccaaaatctattcacagagatcatattgaatcccccaaaacaccaataaagggtcctccagtctctagcctttctttggcatcgctgaacacgggtgataacgagagtgtacattcaggcaagaggacgccaagatcagagtctgtagaaggcttcttatctccaagtcgttgtggcagtcgaaatggagaaaaagactgggagaatgcatcaacaacttcttcagtggcttctggaacagaatatacaggaccaaagctctacaaagaacccagtgcaaaatccaataagcacataatacaaaatgctttagctcattgctgtttggctggaaaagtaaatgaaggtcagaagaaaaaaatactggaggaaatggagaaatcagatgccaacaacttcttaatcttgttccgggattcaggatgccagttcagatctttatacacttattgcccagaaactgaagaaatcaataaactgactgggataggccctaaatctatcactaaaaaaatgattgaaggactttacaaatataattctgacaggaaacagtttagccacatacccgctaaaactttatctgccagtgttgatgcaattaccattcatagccatttatggcagaccaaaagaccagtaacacccaaaaaacttttacccactaaggcatagaagttgggaaatacttgcttcagaacattcatggtaaatttgcacttcatctttcctgcctatagaaaatctttctaattgccaacaagacttttattaattaaaactggacattaagctctgttgtcatgaacaactggaatgtaaaccacagtattttggagtgcagaacattctcaattaagtgataagtccaaatgatgaaggaaatgttttaattcacaaatggagatttgtatgtgttatcaggttcacctgcttgatattagatacattaaagcactgaattttcatggatattagttggatttatcattgaaatatggttaagattacaaattatgtgttttatttgttgcttttttttaaccttttaatgtatattcttgtcttcagatggtttgctatttttctctcctgggggtttattctaagatacctttgtattttatttcatgtggagatcatgaaagtaggaaatatacctttagaagtaactcgcacctttcttatgatgttaagagaaacactagtgtttagttttacagtaaccctcatattttaatggtgttacagcatttgcaaaaattattctgctaagtatttacaactctatttattattcactcaagtattaacattctctattaaataagaggaggtgttgtaaagagctgctagtaggttcgctttaaaccacatgagcttaaccaagaatatgttatgagaagttgctgattaaatcagtgctgtttttacaccacttctggccaactcagaataatttagattgttcttttaacaaaaaaggctttctatctcttttaaagtaagtcactttataagttggcagaagtgaatgacactttgagagtagtctttcaatctgaagatgtaagacttcctgaaacaagttctcaagaagtctttacattatatttataactcatataaaaattatatttagaatttttaaacatgtacaaagggctacattttaattttaaaatagcttcacattattttacttatattgggtttttcttcattttaatccttttcaagtggaatggcttagaataagtatacacttgaaatctcctctacatgatctttgttctttaacagtgtataccagagggttagttggggaaaaacttcattctcaggaaaagacttgaatgattatgtgaccctgttatatttcagtgttgtgacaaatgtgtaaactagcgggggaagacagtattgtatcataaatgagatgcgtagtttgttttctttcatgggaagtagagataaaaatatatacatttctctaattgagttgtttagagaaagaactaatgtctcatatgatgtatttacttattttaaaaaaaagaataggaatgagatgtccctgagctgtacttttctattattataaggcctttaggcatcagtgcatctgggttatcaacattttctcaaatgctgtcaatattttactgtaatttatgttcttatatttatgtatatttgttaaaactgtaaaaaaatttcacagatttttttccaatacctgtgcaagatacatgtgtagctcaaaactatttgtgatctactgtttgcatgtaagagaccaggatatgtaactcttatattttaagtgtatacatattgtgtatataacatatggatattaaaaatggggaattgcacattttaccttttggacagtaatttctatcacagttagaaggaaatgatagtcaaatacacgtttagattaaaactagtttaaaaaattataaatgaatctaatcaaaatgtgaatagtagtcaaaaggataatttaataagcattttacgttactaaatttgttcatttcaatattaactaaatttccctcatcaaagcaatctttgtgatattacttcgctattaaataaagaaaattggatgcaagacaatggagaaactttaaaactaaacaggaccaccctttattcttaaatttgtgtgtgtccaacagttgaattgaatgtctataaggtctaaaggtagaatgtgaatattgccacagagttcattgctctcagtataagattttactttattaatgcagaaggaatatggatatatttctttaagtctgcagatttttttattatggtgcagcttttttttaattatgtttttaaaattatacagttgaaaaatatgccatttcataaagtctgaggattttcgtcaaccttactgaaacacactggtgctttcatcatcagaggtcaaattattatgataactattccattaagtttgccaaacatttgtcgtggttaccagtgcagcctgtcaaattctgctatttgacacagctttggaaagatttagttcttggtttttccgttttgtattagaatgactgttacagttttatttggctgtttaaagccaaattcagctatttaattatggtttcatggacactgttgagcaatgtacagtgtatggtgtgcttacctgtccactctagagcattgcttacaggttttttgttttttaagatgctgtgctgtaaaatactgtcatacttgctatttcctggtacagtgtagtttttcccctttcatttgaataaaagcatggcaccaaatga

SEQ ID NO: 462811 - DNA, 6067 bp, Homo sapiens
ttcggtacccgagctttctccttcagcctcgtgttgttcgtccacaaggagctgaacctgtaaaagatatgccttcaattcctgtcttgaatgctgccaaaagaaatgtcttagatagtagttctgacttcccttcaaggtattcacgtccccaggctcattcttcagcctcaggaggaattagaaggtcttcatctatgtcttatgttgatggcttcatagggacatggcccaaagagaaaagatcatcagtgcatggcgtatcatttgatatttcttttgataaagaagatagtgtacagagatccactccaaaccgaggaatcactcgttctattagtaatgaaggacttactctgaacaacagtcatgtatctaaacacattaggaaaaatttgtccttcaagccaataaatggagaagaggaagcagagagcattgaagaagaacttaatatagattctcacagtgacctcaaatcttgtgtgccccttaacacaaatgaactaaattctaatgagaatattcattacaagcttccaaatggagctttacaaaatagaatacttcttgacgagtttggcaatcagatcgagacaccaagcattgaagaagcattacaaataattcatgatactgaaaaatctcctcatacacctcagccagaccaaattgctaatggcttctttcttcatagtcaagaaatgagtatcttaaattcaaatatcaagttaaatcaatctagtcctgataatgtaactgatacgaaaggtgccttgagtcccataactgacaatactgaagtagacactggaattcacgttccttcagaagatattcctgaaactatggacgaagattcttcgttgagagattatactgtaagcttggactctgacatggatgatgcatctaaatttcttcaggattatgatattcgaactggcaacaccagggaagctttgagtccttgtccaagtactgtaagtaccaagtctcagccaggcagcagtgcttcttctagttctggagttaaaatgaccagctttgctgaacaaaaattcaggaaactgaatcataccgatggaaaaagtagtggaagcagttctcaaaaaactacaccagaaggctctgaacttaatattcctcatgtggttgcttgggcacaaattccagaagaaacagggcttccacagggacgggacactacccagctgttggcctctgaaatggtgcatcttaggatgaaactagaagaaaagaggcgtgctatagaagcccagaaaaagaaaatggaagctgcttttaccaaacagagacagaaaatgggaaggacagcattccttactgtagtgaaaaagaaaggggatgggatatctcctctacgagaggaagcggcgggtgcagaagatgagaaagtatatactgatcgagcaaaagaaaaggaatcacaaaaaactgatggacaaaggagcaagtcactggcagatataaaagagagcatggagaatcctcaagccaaatggctaaagtctccaactacacctattgatcctgagaagcagtggaacctggcaagcccctcagaagaaactttaaatgaaggagagattttagaatataccaaatccattgaaaagttaaattcatccctgcattttctacaacaagaaatgcaacgcttgtcacttcagcaggagatgttaatgcagatgagagagcaacaatcttgggtgatttcacctccacaaccctctccacagaaacagattcgagattttaagccttctaagcaggcaggcctgtcatcagccattgcaccattctcctcagactcccctcgtcctactcacccatctccacagtcttctaacaggaaaagtgcatctttttctgttaaaagtcaaaggactcctaggccaaatgagttaaaaataacacctttgaatcgaaccttgacacctcctcggtctgtggatagccttcctcggttaaggaggttttcaccaagtcaagttcctattcaaactaggtcatttgtatgttttggggatgatggagaacctcagttaaaggaatccaaacctaaagaggaagttaaaaaggaggaattggaatccaaagggactttggaacagcgtggacataatccagaagaaaaggaaatcaaaccttttgagtcaacagtctctgaagtcctatcactgcctgtcacagagactgtatgtctgacaccaaatgaggaccaattgaatcaacccacagaaccccctcctaaacccgttttcccacccactgctccaaaaaatgttaatctgattgaagtttccctctcagatttgaaaccccctgaaaaggctgatgtacctgttgaaaaatatgatggagaaagtgataaagaacaatttgatgatgaccagaaagtatgctgtggattcttttttaaggatgatcaaaaagcagaaaatgatatggcaatgaaacgggcagctttgttggagaaaagattaagaagggaaaaggaaactcagctccggaaacaacagttggaagcagaaatggagcataagaaggaggaaacaaggcgtaaaactgaggaagaacgtcagaagaaagaagatgagagagcacgcagagaatttattaggcaagaatatatgaggcggaaacaactgaaactaatggaagatatggatacagtaattaaaccccgtcctcaagtagtaaaacaaaaaaaacagcgaccaaaatctattcacagagatcatattgaatcccccaaaacaccaataaagggtcctccagtctctagcctttctttggcatcgctgaacacgggtgataacgagagtgtacattcaggcaagaggacgccaagatcagagtctgtagaaggcttcttatctccaagtcgttgtggcagtcgaaatggagaaaaagactgggagaatgcatcaacaacttcttcagtggcttctggaacagaatatacaggaccaaagctctacaaagaacccagtgcaaaatccaataagcacataatacaaaatgctttagctcattgctgtttggctggaaaagtaaatgaaggtcagaagaaaaaaatactggaggaaatggagaaatcagatgccaacaacttcttaatcttgttccgggattcaggatgccagttcagatctttatacacttattgcccagaaactgaagaaatcaataaactgactgggataggccctaaatctatcactaaaaaaatgattgaaggactttacaaatataattctgacaggaaacagtttagccacatacccgctaaaactttatctgccagtgttgatgcaattaccattcatagccatttatggcagaccaaaagaccagtaacacccaaaaaacttttacccactaaggcatagaagttgggaaatacttgcttcagaacattcatggtaaatttgcacttcatctttcctgcctatagaaaatctttctaattgccaacaagacttttattaattaaaactggacattaagctctgttgtcatgaacaactggaatgtaaaccacagtattttggagtgcagaacattctcaattaagtgataagtccaaatgatgaaggaaatgttttaattcacaaatggagatttgtatgtgttatcaggttcacctgcttgatattagatacattaaagcactgaattttcatggatattagttggatttatcattgaaatatggttaagattacaaattatgtgttttatttgttgcttttttttaaccttttaatgtatattcttgtcttcagatggtttgctatttttctctcctgggggtttattctaagatacctttgtattttatttcatgtggagatcatgaaagtaggaaatatacctttagaagtaactcgcacctttcttatgatgttaagagaaacactagtgtttagttttacagtaaccctcatattttaatggtgttacagcatttgcaaaaattattctgctaagtatttacaactctatttattattcactcaagtattaacattctctattaaataagaggaggtgttgtaaagagctgctagtaggttcgctttaaaccacatgagcttaaccaagaatatgttatgagaagttgctgattaaatcagtgctgtttttacaccacttctggccaactcagaataatttagattgttcttttaacaaaaaaggctttctatctcttttaaagtaagtcactttataagttggcagaagtgaatgacactttgagagtagtctttcaatctgaagatgtaagacttcctgaaacaagttctcaagaagtctttacattatatttataactcatataaaaattatatttagaatttttaaacatgtacaaagggctacattttaattttaaaatagcttcacattattttacttatattgggtttttcttcattttaatccttttcaagtggaatggcttagaataagtatacacttgaaatctcctctacatgatctttgttctttaacagtgtataccagagggttagttggggaaaaacttcattctcaggaaaagacttgaatgattatgtgaccctgttatatttcagtgttgtgacaaatgtgtaaactagcgggggaagacagtattgtatcataaatgagatgcgtagtttgttttctttcatgggaagtagagataaaaatatatacatttctctaattgagttgtttagagaaagaactaatgtctcatatgatgtatttacttattttaaaaaaaagaataggaatgagatgtccctgagctgtacttttctattattataaggcctttaggcatcagtgcatctgggttatcaacattttctcaaatgctgtcaatattttactgtaatttatgttcttatatttatgtatatttgttaaaactgtaaaaaaatttcacagatttttttccaatacctgtgcaagatacatgtgtagctcaaaactatttgtgatctactgtttgcatgtaagagaccaggatatgtaactcttatattttaagtgtatacatattgtgtatataacatatggatattaaaaatggggaattgcacattttaccttttggacagtaatttctatcacagttagaaggaaatgatagtcaaatacacgtttagattaaaactagtttaaaaaattataaatgaatctaatcaaaatgtgaatagtagtcaaaaggataatttaataagcattttacgttactaaatttgttcatttcaatattaactaaatttccctcatcaaagcaatctttgtgatattacttcgctattaaataaagaaaattggatgcaagacaatggagaaactttaaaactaaacaggaccaccctttattcttaaatttgtgtgtgtccaacagttgaattgaatgtctataaggtctaaaggtagaatgtgaatattgccacagagttcattgctctcagtataagattttactttattaatgcagaaggaatatggatatatttctttaagtctgcagatttttttattatggtgcagcttttttttaattatgtttttaaaattatacagttgaaaaatatgccatttcataaagtctgaggattttcgtcaaccttactgaaacacactggtgctttcatcatcagaggtcaaattattatgataactattccattaagtttgccaaacatttgtcgtggttaccagtgcagcctgtcaaattctgctatttgacacagctttggaaagatttagttcttggtttttccgttttgtattagaatgactgttacagttttatttggctgtttaaagccaaattcagctatttaattatggtttcatggacactgttgagcaatgtacagtgtatggtgtgcttacctgtccactctagagcattgcttacaggttttttgttttttaagatgctgtgctgtaaaatactgtcatacttgctatttcctggtacagtgtagtttttcccctttcatttgaataaaagcatggcaccaaatga

SEQ ID NO: 462812 - DNA, 6401 bp, Homo sapiens
gaggagccgcggtgaaagatgggggatgctgcagaccccagggagatgagaaagacgttcattgttccagccatcaagccttttgaccactatgatttctccagggccaaaatcgcctgcaatctggcctggctggtggccaaagcctttgggacagataaggtaactggctcacagattaatttgcacaagattaaacatctggcaagtgatgtgttctgcatgtctgactctgaagcctttgcttattactctataccgttctgcagagtaaccgttttatctgcagaaaatgtgccagaggaacttcaagaaccattttacacagatcagtatgaccaggaacacatcaaaccacctgttgttaatttgcttctatcggctgaactatactgtcgtgctgggagtctcattctcaagagtgatgctgcaaaaccccttttgggccatgatgctgtaatccaggctttagcacagaaaggtctttatgtcactgaccaggaaaaattggtaactgaacgagatctccacaagaaacccatacagatggaggacaacaagccagggcacaaaagcttgaaaactggtagcagattggagaaggaaatggtagattctaaggctagactaacaaagcagctaataagaaagaaagaaagaaactttacctcttttaaggagtttagacttcgttatgtagaaaatgagagtgcacatttggccatgatcgataccctcatgatggcttatactgtagaaatggtcagtatagaaaaagtaattgcgtgtgctcagcagtattcagctttttttcaagccacagatctgccctatgatattgaggacgctgtcatgtactggataaataaggtaaatgaacatttgaaagacataatggaacaagaacaaaaactgaaagaacatcacacagttgaagctccaggaggtcaaaaggctcgttatcggaaagagcaaacattgcttaagcaactgccttgcattccattggtagaaaatttgttgaaggatgggacagatggctgtgcattagctgcccttattcatttttactgtcctgatgttgtcagattagaggatatttgtttgaaagaaactatgtctttggctgatagcctgtataatctgcagctgattcaagaattttgccaagaatacttgaaccagtgttgccatttcactctggaagatatgctctatgctgcttcatccataaagagtaattatttggtgttcatggcggaactgttctggtggtttgaagtggtgaagccgtcttttgtacagcctcgtgttgttcgtccacaaggagctgaacctgtaaaagatatgccttcaattcctgtcttgaatgctgccaaaagaaatgtcttagatagtagttctgacttcccttcaagtggggaaggagctacatttacacagtctcatcatcatttgccttctaggtattcacgtccccaggctcattcttcagcctcaggaggaattagaaggtcttcatctatgtcttatgttgatggcttcatagggacatggcccaaagagaaaagatcatcagtgcatggcgtatcatttgatatttcttttgataaagaagatagtgtacagagatccactccaaaccgaggaatcactcgttctattagtaatgaaggacttactctgaacaacagtcatgtatctaaacacattaggaaaaatttgtccttcaagccaataaatggagaagaggaagcagagagcattgaagaagaacttaatatagattctcacagtgacctcaaatcttgtgtgccccttaacacaaatgaactaaattctaatgagaatattcattacaagcttccaaatggagctttacaaaatagaatacttcttgacgagtttggcaatcagatcgagacaccaagcattgaagaagcattacaaataattcatgatactgaaaaatctcctcatacacctcagccagaccaaattgctaatggcttctttcttcatagtcaagaaatgagtatcttaaattcaaatatcaagttaaatcaatctagtcctgataatgtaactgatacgaaaggtgccttgagtcccataactgacaatactgaagtagacactggaattcacgttccttcagaagatattcctgaaactatggacgaagattcttcgttgagagattatactgtaagcttggactctgacatggatgatgcatctaaatttcttcaggattatgatattcgaactggcaacaccagggaagctttgagtccttgtccaagtactgtaagtaccaagtctcagccaggcagcagtgcttcttctagttctggagttaaaatgaccagctttgctgaacaaaaattcaggaaactgaatcataccgatggaaaaagtagtggaagcagttctcaaaaaactacaccagaaggctctgaacttaatattcctcatgtggttgcttgggcacaaattccagaagaaacagggcttccacagggacgggacactacccagctgttggcctctgaaatggtgcatcttaggatgaaactaaccaaacagagacagaaaatgggaaggacagcattccttactgtagtgaaaaagaaaggggatgggatatctcctctacgagaggaagcggcgggtgcagaagatgagaaagtatatactgatcgagcaaaagaaaaggaatcacaaaaaactgatggacaaaggagcaagtcactggcagatataaaagagagcatggagaatcctcaagccaaatggctaaagtctccaactacacctattgatcctgagaagcagtggaacctggcaagcccctcagaagaaactttaaatgaaggagagattttagaatataccaaatccattgaaaagttaaattcatccctgcattttctacaacaagaaatgcaacgcttgtcacttcagcaggagatgttaatgcagatgagagagcaacaatcttgggtgatttcacctccacaaccctctccacagaaacagattcgagattttaagccttctaagcaggcaggcctgtcatcagccattgcaccattctcctcagactcccctcgtcctactcacccatctccacagtcttctaacaggaaaagtgcatctttttctgttaaaagtcaaaggactcctaggccaaatgagttaaaaataacacctttgaatcgaaccttgacacctcctcggtctgtggatagccttcctcggttaaggaggttttcaccaagtcaagttcctattcaaactaggtcatttgtatgttttggggatgatggagaacctcagttaaaggaatccaaacctaaagaggaagttaaaaaggaggaattggaatccaaagggactttggaacagcgtggacataatccagaagaaaaggaaatcaaaccttttgagtcaacagtctctgaagtcctatcactgcctgtcacagagactgtatgtctgacaccaaatgaggaccaattgaatcaacccacagaaccccctcctaaacccgttttcccacccactgctccaaaaaatgttaatctgattgaagtttccctctcagatttgaaaccccctgaaaaggctgatgtacctgttgaaaaatatgatggagaaagtgataaagaacaatttgatgatgaccagaaagtatgctgtggattcttttttaaggatgatcaaaaagcagaaaatgatatggcaatgaaacgggcagctttgttggagaaaagattaagaagggaaaaggaaactcagctccggaaacaacagttggaagcagaaatggagcataagaaggaggaaacaaggcgtaaaactgaggaagaacgtcagaagaaagaagatgagagagcacgcagagaatttattaggcaagaatatatgaggcggaaacaactgaaactaatggaagatatggatacagtaattaaaccccgtcctcaagtagtaaaacaaaaaaaacagcgaccaaaatctattcacagagatcatattgaatcccccaaaacaccaataaagggtcctccagtctctagcctttctttggcatcgctgaacacgggtgataacgagagtgtacattcaggcaagaggacgccaagatcagagtctgtagaaggcttcttatctccaagtcgttgtggcagtcgaaatggagaaaaagactgggagaatgcatcaacaacttcttcagtggcttctggaacagaatatacaggaccaaagctctacaaagaacccagtgcaaaatccaataagcacataatacaaaatgctttagctcattgctgtttggctggaaaagtaaatgaaggtcagaagaaaaaaatactggaggaaatggagaaatcagatgccaacaacttcttaatcttgttccgggattcaggatgccagttcagatctttatacacttattgcccagaaactgaagaaatcaataaactgactgggataggccctaaatctatcactaaaaaaatgattgaaggactttacaaatataattctgacaggaaacagtttagccacatacccgctaaaactttatctgccagtgttgatgcaattaccattcatagccatttatggcagaccaaaagaccagtaacacccaaaaaacttttacccactaaggcatagaagttgggaaatacttgcttcagaacattcatggtaaatttgcacttcatctttcctgcctatagaaaatctttctaattgccaacaagacttttattaattaaaactggacattaagctctgttgtcatgaacaactggaatgtaaaccacagtattttggagtgcagaacattctcaattaagtgataagtccaaatgatgaaggaaatgttttaattcacaaatggagatttgtatgtgttatcaggttcacctgcttgatattagatacattaaagcactgaattttcatggatattagttggatttatcattgaaatatggttaagattacaaattatgtgttttatttgttgcttttttttaaccttttaatgtatattcttgtcttcagatggtttgctatttttctctcctgggggtttattctaagatacctttgtattttatttcatgtggagatcatgaaagtaggaaatatacctttagaagtaactcgcacctttcttatgatgttaagagaaacactagtgtttagttttacagtaaccctcatattttaatggtgttacagcatttgcaaaaattattctgctaagtatttacaactctatttattattcactcaagtattaacattctctattaaataagaggaggtgttgtaaagagctgctagtaggttcgctttaaaccacatgagcttaaccaagaatatgttatgagaagttgctgattaaatcagtgctgtttttacaccacttctggccaactcagaataatttagattgttcttttaacaaaaaaggctttctatctcttttaaagtaagtcactttataagttggcagaagtgaatgacactttgagagtagtctttcaatctgaagatgtaagacttcctgaaacaagttctcaagaagtctttacattatatttataactcatataaaaattatatttagaatttttaaacatgtacaaagggctacattttaattttaaaatagcttcacattattttacttatattgggtttttcttcattttaatccttttcaagtggaatggcttagaataagtatacacttgaaatctcctctacatgatctttgttctttaacagtgtataccagagggttagttggggaaaaacttcattctcaggaaaagacttgaatgattatgtgaccctgttatatttcagtgttgtgacaaatgtgtaaactagcgggggaagacagtattgtatcataaatgagatgcgtagtttgttttctttcatgggaagtagagataaaaatatatacatttctctaattgagttgtttagagaaagaactaatgtctcatatgatgtatttacttattttaaaaaaaagaataggaatgagatgtccctgagctgtacttttctattattataaggcctttaggcatcagtgcatctgggttatcaacattttctcaaatgctgtcaatattttactgtaatttatgttcttatatttatgtatatttgttaaaactgtaaaaaaatttcacagatttttttccaatacctgtgcaagatacatgtgtagctcaaaactatttgtgatctactgtttgcatgtaagagaccaggatatgtaactcttatattttaagtgtatacatattgtgtatataacatatggatattaaaaatggggaattgcacatttt

SEQ ID NO: 462813 - DNA, 3924 bp, Homo sapiens
gaggagccgcggtgaaagatgggggatgctgcagaccccagggagatgagaaagacgttcattgttccagccatcaagccttttgaccactatgatttctccagggccaaaatcgcctgcaatctggcctggctggtggccaaagcctttgggacagataaggtaactggctcacagattaatttgcacaagattaaacatctggcaagtgatgtgttctgcatgtctgactctgaagcctttgcttattactctataccgttctgcagagtaaccgttttatctgcagaaaatgtgccagaggaacttcaagaaccattttacacagatcagtatgaccaggaacacatcaaaccacctgttgttaatttgcttctatcggctgaactatactgtcgtgctgggagtctcattctcaagagtgatgctgcaaaaccccttttgggccatgatgctgtaatccaggctttagcacagaaaggtctttatgtcactgaccaggaaaaattggtaactgaacgagatctccacaagaaacccatacagatggaggacaacaagccagggcacaaaagcttgaaaactggtagcagattggagaaggaaatggtagattctaaggctagactaacaaagcagctaataagaaagaaagaaagaaactttacctcttttaaggagtttagacttcgttatgtagaaaatgagagtgcacatttggccatgatcgataccctcatgatggcttatactgtagaaatggtcagtatagaaaaagtaattgcgtgtgctcagcagtattcagctttttttcaagccacagatctgccctatgatattgaggacgctgtcatgtactggataaataaggtaaatgaacatttgaaagacataatggaacaagaacaaaaactgaaagaacatcacacagttgaagctccaggaggtcaaaaggctcgttatcggaaagagcaaacattgcttaagcaactgccttgcattccattggtagaaaatttgttgaaggatgggacagatggctgtgcattagctgcccttattcatttttactgtcctgatgttgtcagattagaggatatttgtttgaaagaaactatgtctttggctgatagcctgtataatctgcagctgattcaagaattttgccaagaatacttgaaccagtgttgccatttcactctggaagatatgctctatgctgcttcatccataaagagtaattatttggtgttcatggcggaactgttctggtggtttgaagtggtgaagccgtcttttgtacagcctcgtgttgttcgtccacaaggagctgaacctgtaaaagatatgccttcaattcctgtcttgaatgctgccaaaagaaatgtcttagatagtagttctgacttcccttcaagtggggaaggagctacatttacacagtctcatcatcatttgccttctaggtattcacgtccccaggctcattcttcagcctcaggaggaattagaaggtcttcatctatgtcttatgttgatggcttcatagggacatggcccaaagagaaaagatcatcagtgcatggcgtatcatttgatatttcttttgataaagaagatagtgtacagagatccactccaaaccgaggaatcactcgttctattagtaatgaaggacttactctgaacaacagtcatgtatctaaacacattaggaaaaatttgtccttcaagccaataaatggagaagaggaagcagagagcattgaagaagaacttaatatagattctcacagtgacctcaaatcttgtgtgccccttaacacaaatgaactaaattctaatgagaatattcattacaagcttccaaatggagctttacaaaatagaatacttcttgacgagtttggcaatcagatcgagacaccaagcattgaagaagcattacaaataattcatgatactgaaaaatctcctcatacacctcagccagaccaaattgctaatggcttctttcttcatagtcaagaaatgagtatcttaaattcaaatatcaagttaaatcaatctagtcctgataatgtaactgatacgaaaggtgccttgagtcccataactgacaatactgaagtagacactggaattcacgttccttcagaagatattcctgaaactatggacgaagattcttcgttgagagattatactgtaagcttggactctgacatggatgatgcatctaaatttcttcaggattatgatattcgaactggcaacaccagggaagctttgagtccttgtccaagtactgtaagtaccaagtctcagccaggcagcagtgcttcttctagttctggagttaaaatgaccagctttgctgaacaaaaattcaggaaactgaatcataccgatggaaaaagtagtggaagcagttctcaaaaaactacaccagaaggctctgaacttaatattcctcatgtggttgcttgggcacaaattccagaagaaacagggcttccacagggacgggacactacccagctgttggcctctgaaatggtgcatcttaggatgaaactaaccaaacagagacagaaaatgggaaggacagcattccttactgtagtgaaaaagaaaggggatgggatatctcctctacgagaggaagcggcgggtgcagaagatgagaaagtatatactgatcgagcaaaagaaaaggaatcacaaaaaactgatggacaaaggagcaagtcactggcagatataaaagagagcatggagaatcctcaagccaaatggctaaagtctccaactacacctattgatcctgagaagcagtggaacctggcaagcccctcagaagaaactttaaatgaaggagagattttagaatataccaaatccattgaaaagttaaattcatccctgcattttctacaacaagaaatgcaacgcttgtcacttcagcaggagatgttaatgcagatgagagagcaacaatcttgggtgatttcacctccacaaccctctccacagaaacagattcgagattttaagccttctaagcaggcaggcctgtcatcagccattgcaccattctcctcagactcccctcgtcctactcacccatctccacagtcttctaacaggaaaagtgcatctttttctgttaaaagtcaaaggactcctaggccaaatgagttaaaaataacacctttgaatcgaaccttgacacctcctcggtctgtggatagccttcctcggttaaggaggttttcaccaagtcaagttcctattcaaactaggtcatttgtatgttttggggatgatggagaacctcagttaaaggaatccaaacctaaagaggaagttaaaaaggaggaattggaatccaaagggactttggaacagcgtggacataatccagaagaaaaggaaatcaaaccttttgagtcaacagtctctgaagtcctatcactgcctgtcacagagactgtatgtctgacaccaaatgaggaccaattgaatcaacccacagaaccccctcctaaacccgttttcccacccactgctccaaaaaatgttaatctgattgaagtttccctctcagatttgaaaccccctgaaaaggctgatgtacctgttgaaaaatatgatggagaaagtgataaagaacaatttgatgatgaccagaaagtatgctgtggattcttttttaaggtgtagtattaatctgcatagttttgggcatcttcattagatgagtgtggttgtgttggatatttttttttcagttgacatgcttgcttctttcagtagcagtcccttttgatacaagttcatccccattaactatagtaacattcaagcacactgtggtttccagtatggactcaaagctgtaataaatccttttatcacatg

SEQ ID NO: 462814 - DNA, 2985 bp, Homo sapiens
gtgacactgagaagatatgaaaaatagcaaaatatttcaatgtgataaatatatgaaaatctttcataaattttcaaatttaaatggacataaggtaagacacaccagaaaaaaaccttttaaatataaagaatttggcaaatcattttgcatattttcaaacctaactcaacataaaataatttgtactagagtaaatttctacaaatgtgaagactgtggaaaagcctttaatggatcctcaatctttactaaacataaaagaattcatattggagagaaatcgtacatatgtgaagaatgtggcaaagcctgtaaccagttcacaaaccttactacacataagataatttatactagagacaaactctacaaacgtgaagaatgtagcaaagcctttaacctgtcgtcacacattacaacacatacaataattcatactggagagaatccctacaaacgtgaagaatgtgacaaagcctttaatcagtccttaacccttactacacataagataattcataccagagagaaactcaatgaatataaggaatgtggcaaagctttcaaccagtcctcacaccttaccagacataagataattcatactggagagaaaccctacaaatgtgaagaatgtggcaaagcctttaaccagtcctcacaccttaccagacataagataattcatactggagagaagccctacagatgtgaagaatgtggcaaagcctttaggcagtcctcacaccttactacacataagataattcatactggagagaaaccctacaaatgtgaagaatgtggcaaagcttttaacaagtcctcacaccttactagacataagagcattcatactggagaaaaaccctaccagtgtgaaaaatgtggcaaagcttctaaccaatcctcaaaccttactgaacataagaatattcatactgaagagaaaccatacaaatgtgaagaatgtgggaaagcctttaaccagttctcaaaccttactacacataaaagaattcatactggagagaaaccctacaaatgtgaagaatgtggcaaagcttttaaccagtcctcaatccttactacacataagagaattcatactggagagaaatcctacaaatgtgaagaatgtggcaaagctttctatcgatcctcaaaacttactgaacataagaaaattcatactggagagaaaccctacacatgtgaagaatgtggcaaagcctttaaccattcctcacatcttgctacacataaggtaattcatactggagagaaaccctaccaatgtgaagaatgtggtaaagcctttaaccagtcctcacaccttactagacataagagaattcatactggagagaaaccctaccaatgtgaaaaatgtggcaaagcttttaaccagtcctcaaaccttactggacataagaaaattcatactggtgagaaactctacaaacctaaaagatgtaacagtgattttgaaaacacttcaaagttttctaaacataaaagaaattatgctggtgagaaatcttagaaatgtgaagaatgtaacaaaacctttaaaagttgtcacacttgattgtgcataagataattcatactaaaaaaaaacctacaagtgtgaagaatgtggcaaaacttttaaccaatgctcacaccttattgcacaggaaagcatttgtactagaaaaaaatttcaaatatacagaatgtgaaaaagccattaatatctgttcacatcttactcaacatcagagatttcatacttaataaaagcattatacatgcaattactgtcaaaaatctttcagaaaatataagcctctaaagtgaagagtattcattttgaagacacacattatgaacataaggagggttgtggtacctttacttgtatcacagatctcattgtacacattttgtgctagaggaaaaccatggagcagttgcttaaactttgtgcaacataaggaaatttatattggagaaaaaccctgcaaatgtaataaatttgggaaaacattttttcaaaaacgacagcttagaaaacactagagggttcatactaaaatctatttttgcagatgcagtaaatatgaaaaaatatttaatccaaaattctatgtaaatatcagataattcacagtagaaatagttaaggcactgacacttcaggcattacactaaatcagattgctgagtatagaaaagaatctaaaactaaagttggtaaatgaattatttgtatataacattataagaagtagaaaatttttgcagagttgtaactacattcaaactatcctttgaaaaaaattaggttttatgaaaagtgaataatgtcatttaactcaagttatgctcttcattcctattgtattcacatgtgaaagcatgtgacttaattgttgctgcatcaaagatgagagattctttgttattaggtgtgcattatttacgaccttttttagtgaaagagttaaggacattaaaatgtaagatgcaagatgaaaattttttataatgaaaataagtaaatattgattgagcccatttatttagcctgggcgacagagggagactccatctcaaaaaaaaaaaaaaaaaaaaactagcaagctgagttcataagcaaatcaaaaagttattttgccactatcatgtgagctttattttatgaatgcaaaaatgttcatatacaagtcaataagtgctgagtgcagtggctcacgcctgtaatcccaacgctttgggaggccgaggcgggtggatcatgaggtcaagagatcgagaccatcctggccaacatggtgaaacgccttctctacaaaaaataccaaaattagctgggcgtggtggtggatgcctgcagtctcagctacttgggaggctgaggcaggagactcgcttgaacctgggaggttgaagttgcagtgagccactgcactccagcctggtgactgcgagacc

SEQ ID NO: 462815 - DNA, 379 bp, Homo sapiens
catttactccatggccggtacacttaccgggagtatttagaggcacatctaaaatttctagcgtttttcttgcaagaagctactctgtatctgggctggaatcgtgccaaggagatctgggagtgtcttgtaactggccaggatgtttgtgaattagatagagagatgtgttttgaatggtttacaaaaggacagcatgatcttgagagtgatgttcagcagcagctcttcaaggagaaaattcttaaattggagtcatatgaaatcactatgaatggttttaacttatttaaaactttttttgaaaatgtgaatctttgtgatcatcgattgaaaagacaaggagctcagttggtaagtacgttattctcaaatctag

SEQ ID NO: 462816 - DNA, 3315 bp, Homo sapiens
tggctttgatcagagacctcaaacgtgacttgctcctccttgccttctgccatgattgtaaggcttccccagccacgtggaactattctgtggggatgggattcagacagcagtttatctctgctccatgatactgagaacctcagctggaagactaagtctggggatgacttgatgactgtaggctggactcatgtgaaggctcctcctctggccttcaggggctggttgtccaatgagaccttaaagaatgatgagaatggaaactgctcaggggaaggaattgaattccctacaacaaatttatatgaactggaaagccgtgttttgactgatcattggtccatcccttacaagcgagaagaatcactaggcaaatgcctgttggcatctacctacctagcaagacttggatgtagccctttagttccagctttgcgttgcatttccttcttgagtcaccctgtcccacctggggttgatgtccttttctcctgcaaatggacacttacggtcaccagggctctgcagctgcctgtgggtgaatctggcttcagagccttcctgcctgtctcacaggattcctgctttctcttctttggagaattaggtggatttgcagcaatccaagccaagctccattcagaagatatagaacttgggagattggttagcatccctgagctcttgtctgccgttaagttactttgcatgcgcttccaaccggatctggtgacaattgtggatgaccttcgactagatattctattgcgcatgctgaaatcaccacatttcagtgctaagatgaattctctcaaagaagtaaccaaactaatagaagatagcactttatccaaatctgtgaagaatgctatagatacagacagattattagattggctagttgaaaactcagttctgtcgattgcactggaaggcaacatagaccaagcacaatactgtgaccgtataaagggaattattgaactcttgggtagtaaattgtcgttagatgaactcactaaaatttggaagatacagtcaggacaatcatctactgtgattgagaacattcatactattattgctgcagcggctgtgaaatttaattcagatcagcttaatcatttgtttgttctcattcagaagcaggccttggaggagcacctgacaatccttagtgatgcatatgcagtgaaagaagcaatcaagaggagctacatcatcaagtgcatagaagatattaagaggcttaataatccccagtttgtatgggtggtaccagctttgcgtcagctccatgaaattactcgctcattcataaaacaaacctatcaaaagcaagacaagagcattattcaagacttgaagaagaattttgaaatagtgaaattggtaacgggaagtttgatcgcttgtcatcggcttgcagctgctgtggccgggcctggaggcttaagtggctcgacactagtggatggccggtacacttaccgggagtatttagaggcacatctaaaatttctagcgtttttcttgcaagaagctactctgtatctgggctggaatcgtgccaaggagatctgggagtgtcttgtaactggccaggatgtttgtgaattagatagagagatgtgttttgaatggtttacaaaaggacagcatgatcttgagagtgatgttcagcagcagctcttcaaggagaaaattcttaaattggagtcatatgaaatcactatgaatgacaaggagctcagttgtatgtagaaaagctggaattgataggaatggatttcatttggaaaatagccatggaatcacctgatgaagaaattgctaatgaagctattcagctaatcataaactatagttacattaatctaaatcctagattaaagaaggattcagtatctttacataagaaattcattgctgattgctacacaagattagaagtgagtagcaaattttatttaacatctctttgaggtattttatataagcactgcttctttttttgtttttcttcatgtttcacctagttataccataaatgttattaaaggccacagcaagacagttagtagtaggtggtattggttgtctttgtccattagaagcctgctgtgtaatgctagctcacatgtatctcttttatttccagcatgacggttaaagccttaaacattcatattcagttgatatgcttaagttttacatctaagcaaaaatgttccaaaagcataaaatgctactgcctcccaattccaataagttaagctttctggtgataaatatgtgctagaatatgtacggtatttccctaattgtgacttctatccaaatatgtcattataaaaaaaattcaagtattcgaataccccttatgaggtcccattgctttttattcggaatcatttcatatttggtggactacagagaaaaccacataataattttaaaatattataaactctaaatagggttaataagaatatatagcttcaaagtcgaatttgaaccagaacattgtagtttatctcatttcactagtttggaaagaacttttcagtatccataattgttccaacttggggtggggggggtttctgtcatctgtacagtatttcataatactgtctgtgatttaattcattattgaggcataattaaaaaatagttcactcacttattatggacttagatattttctaaaaatttttcgtctgaatttcaagttctagttcttgcccatagactggaataatttagaactctgttaagtatatttaatagaactgctaaaatgtgtttaaccagctgtttttagagtgaaatttttggtactgctaatcagcataccagaccaattgttaaaaaatggtagtacctcttttcagttttagaaatatacctctttgaaatatctagactctctggaatagaaaatgtttaaattaaggggacttggattttcatttcttaatgttaatacatgtaatgttctttttagtaaagtatggggctatgactatataagctgatgaatattgcagtctgattatttcaaatgataagtaagattccataagtcttcaaccaaaagagacctcagatctcatttttagatagcaacttttgtttgtgtcgtacttactgatttgcatttgtcttctaattctcaggcagttcagaactttgtcagatttcatgtgttcacagaattgtatatcatattttagttataagataaagtcagactcactcatttcattcttgataaattaatggacagataggcctagaaacccaggt

SEQ ID NO: 462817 - DNA, 2961 bp, Homo sapiens
gggctgacccctcctctacattctgttcccttttcgtgaccttctgggtgcatgagcaatgcagtttgttacgtttgccgggtggctgccgagcaaagagataaaggtaaaaaaaagcttaaatgggtacaaaggaaagtttgcatggataacggcatggcagaggaaaataatggatggcatcttcagaatgctgtaattggactcaatgaatcatttccaattagtattcaaaatcaccggaatatcacactcaagagagcatttactaaatgtccttgggaatgtccagtaggtcacataactgagattgcagaattgtacttgaccgctggccttctcccatgcaggttcccatcaggaagccaattgcttgctgtccaagccaaaaattttaagatgatttgtcagaaagggcacaaagtcctatcacctaatattacaagagttggtaagcgctcatcattaattttattttgtggcagctaagttagtatgacagaggcagtgctcctgtggacaggagcattttgcatattttccatctgaaagtatcactcagttgatagtctggaatgcatgttatatattttaaaacttccaaaatatattataacaaacattctatatcggtatgtagcagaccaatctctaaaatagctaattcttcaataaaatctttctatatagccatttcagtgcaaacaagtaaaatcaaaaaagaccatcctttatttttccttacatgatatatgtaagatgcgatcaaataaagacaaaacaccagtgatgagaatatcttaagataagtaattatcaaattattgtgaatgttaaattatttctactataaagaagcaaaactacatttttgaaggaaaatgctgttactctaacattaatttacaggaatagtttgatggtttcactctttactaaagaaaggccatcaccttgaaagccattttacaggtttgatgaagttaccaatttcagtacacctaaatttctacaaatagtccccttttacaagttgtaacaacaaagaccctataataaaattagatacaagaaattttgcagtggttatacatatttgagatatctagtatgttgccctagcagggatggcttaaaaactgtgattttttttcttcaagtaaaacttagtcccaaagtacatcataaatcaattttaattagaaaaatgaatcttaaatgaggggacataagtatactctttccacaaaatggcaataataaggcataaagctagtaaatctactaactgtaataaatgtatgacattattttgattgatacattaaaaaagagtttttagaacaaatatggcatttaactttattatttatttgcttttaagaaatattctttgtggaattgttgaataaactataaaatattattttgtattgcagctttaaagtggcacactccataataatctacttactagaaatagtggtgctaccacaaaaaatgttaaccatcagtaccattgtttgggagaaagaaacagatcaagaatgcatattattcagtgaccgctttcctagagttaaaatacctcctctttgtaaggtttgtaggtaaattgaggtattcactatgtttttctgtatcacagcagcattcctagtccttaggccctcggacagagtgaaatcatgagtatttatgagttcaatattgtcaaataaggctacagtatttgcttttttgtgtgaatgtattgcatataatgttcaagtagatgattttacatttatggacatataaaatgtctgattaccccattttatcagtcctgactgtacaagattgttgcaatttcagaatagcagttttataaattgatttatcttttaatctataacaatttgtgttagctgttcatttcaggattatattttctacaagttccacttgtgggactccttttgttgcccctatttttttttaaagaaggaagaaagaaaaataagtagcagtttaaaaatgagaatggagagaaaagaaaaagaatgaaaaggaaaggcagtaaagagggaaaaaaaaggaaggatggaaggaatgaaggaaggaagggaggaaggggagaaggtaggaagaaagaaaggatgagagggaaggaagaatcagagtattagggtagttaacttacacatttgcattcttagtttaactgcaagtggtgtaactatgtttttcaatgatcgcatttgaaacataagtcctattataccattaagttcctattatgcagcaattatataataaaaagtactgcccaagttatagtaatgtgggtgtttttgagacactaaaagatttgagagggagaatttcaaacttaaagccacttttggggggtttataacttaactgaaaaattaatgcttcatcataacatttaagctatatctagaaagtagactggagaactgagaaaattacccaggtaattcagggaaaaaaaaaaatatatatatatataaatacccctacatttgaagtcagaaaactctgaaaaactgaattatcaaagtcaatcatctataatgatcaaatttactgaacaattgttaatttatccattgtgcttagctttgtgacacagccaaaagttacctatttaatcttttcaataaaaattgttttttgaaatccagaaatgatttaaaaagaggtcaggtttttaactatttattgaagtatgtggatgtacagtatttcaatagatatgaatatgaataaatggtatgccttaagattctttgaatatgtatttactttaaagactggaaaaagctcttcctgtcttttagtaaaacatccatatttcataacctgatgtaaaatatgttgtactgtttccaataggtgaatataaactcagtttatcaattaaaatatgtatttgactcattttaaaactct

SEQ ID NO: 462818 - DNA, 1068 bp, Homo sapiens
gcagactactactactaaaaatgtggccgcgtcgacattttctacaagttccacttgtgggactccttttgttgcccctatttttttttaaagaaggaagaaagaaaaataagtagcagtttaaaaatgagaatggagagaaaagaaaaagaatgaaaaggaaaggcagtaaagagggaaaaaaaaggaaggatggaaggaatgaaggaaggaagggaggaaggggagaaggtaggaagaaagaaaggatgagagggaaggaagaatcagagtattagggtagttaacttacacatttgcattcttagtttaactgcaagtggtgtaactatgtttttcaatgatcgcatttgaaacataagtcctattataccattaagttcctattatgcagcaattatataataaaaagtactgcccaagttatagtaatgtgggtgtttttgagacactaaaagatttgagagggagaatttcaaacttaaagccacttttggggggtttataacttaactgaaaaattaatgcttcatcataacatttaagctatatctagaaagtagactggagaactgagaaaattacccaggtaattcagggaaaaaaaaaaatatatatatatataaatacccctacatttgaagtcagaaaactctgaaaaactgaattatcaaagtcaatcatctataatgatcaaatttactgaacaattgttaatttatccattgtgcttagctttgtgacacagccaaaagttacctatttaatcttttcaataaaaattgttttttgaaatccagaaatgatttaaaaagaggtcaggtttttaactatttattgaagtatgtggatgtacagtatttcaatagatatgaatatgaataaatggtatgccttaagattctttgaatatgtatttactttaaagactggaaaaagctcttcctgtcttttagtaaaacatccatatttcataacctgatgtaaaatatgttgtactgtttccaataggtgaatataaactcagtttatcaattaaaatatgtatttgactcattttaaaactct

SEQ ID NO: 462819 - DNA, 3138 bp, Homo sapiens
gggctgacccctcctctacattctgttcccttttcgtgaccttctgggtgcatgagcaatgcagtttgttacgtttgccgggtggctgccgagcaaagagataaaggtaaaaaaaagcttaaatgggtacaaaggaaagtttgcatggataacggcatggcagaggaaaataatggatggcatcttcagaatgctgtaattggactcaatgaatcatttccaattagtattcaaaatcaccggaatatcacactcaagagagcatttactaaatgtccttgggaatgtccagtaggtcacataactgagattgcagaattgtacttgaccgctggccttctcccatgcaggttcccatcaggaagccaattgcttgctgtccaagccaaaaattttaagatgatttgtcagaaagggcacaaagtcctatcacctaatattacaagagttggtaagcgctcatcattaattttattttgtggcagctaagttagtatgacagaggcagtgctcctgtggacaggagcattttgcatattttccatctgaaagtatcactcagttgatagtctggaatgcatgttatatattttaaaacttccaaaatatattataacaaacattctatatcggtatgtagcagaccaatctctaaaatagctaattcttcaataaaatctttctatatagccatttcagtgcaaacaagtaaaatcaaaaaagaccatcctttatttttccttacatgatatatgtaagatgcgatcaaataaagacaaaacaccagtgatgagaatatcttaagataagtaattatcaaattattgtgaatgttaaattatttctactataaagaagcaaaactacatttttgaaggaaaatgctgttactctaacattaatttacaggaatagtttgatggtttcactctttactaaagaaaggccatcaccttgaaagccattttacaggtttgatgaagttaccaatttcagtacacctaaatttctacaaatagtccccttttacaagttgtaacaacaaagaccctataataaaattagatacaagaaattttgcagtggttatacatatttgagatatctagtatgttgccctagcagggatggcttaaaaactgtgattttttttcttcaagtaaaacttagtcccaaagtacatcataaatcaattttaattagaaaaatgaatcttaaatgaggggacataagtatactctttccacaaaatggcaataataaggcataaagctagtaaatctactaactgtaataaatgtatgacattattttgattgatacattaaaaaagagtttttagaacaaatatggcatttaactttattatttatttgcttttaagaaatattctttgtggaattgttgaataaactataaaatattattttgtattgcagctttaaagtggcacactccataataatctacttactagaaatagtggtgctaccacaaaaaatgttaaccatcagtaccattgtttgggagaaagaaacagatcaagaatgcatattattcagtgaccgctttcctagagttaaaatacctcctctttgtaaggtttgtaggtaaattgaggtataaactatggatgaaccaaataattagttcaaagtgttgtcatgattccaaatttgtggagtctggtgtttttaccatagaatgtgacagaagtacagtcatagctcagtagctatatgtatttgcctttatgttagaagagactttcttgagtgacatttttaaatagaggaggtattcactatgtttttctgtatcacagcagcattcctagtccttaggccctcggacagagtgaaatcatgagtatttatgagttcaatattgtcaaataaggctacagtatttgcttttttgtgtgaatgtattgcatataatgttcaagtagatgattttacatttatggacatataaaatgtctgattaccccattttatcagtcctgactgtacaagattgttgcaatttcagaatagcagttttataaattgatttatcttttaatctataacaatttgtgttagctgttcatttcaggattatattttctacaagttccacttgtgggactccttttgttgcccctatttttttttaaagaaggaagaaagaaaaataagtagcagtttaaaaatgagaatggagagaaaagaaaaagaatgaaaaggaaaggcagtaaagagggaaaaaaaaggaaggatggaaggaatgaaggaaggaagggaggaaggggagaaggtaggaagaaagaaaggatgagagggaaggaagaatcagagtattagggtagttaacttacacatttgcattcttagtttaactgcaagtggtgtaactatgtttttcaatgatcgcatttgaaacataagtcctattataccattaagttcctattatgcagcaattatataataaaaagtactgcccaagttatagtaatgtgggtgtttttgagacactaaaagatttgagagggagaatttcaaacttaaagccacttttggggggtttataacttaactgaaaaattaatgcttcatcataacatttaagctatatctagaaagtagactggagaactgagaaaattacccaggtaattcagggaaaaaaaaaaatatatatatatataaatacccctacatttgaagtcagaaaactctgaaaaactgaattatcaaagtcaatcatctataatgatcaaatttactgaacaattgttaatttatccattgtgcttagctttgtgacacagccaaaagttacctatttaatcttttcaataaaaattgttttttgaaatccagaaatgatttaaaaagaggtcaggtttttaactatttattgaagtatgtggatgtacagtatttcaatagatatgaatatgaataaatggtatgccttaagattctttgaatatgtatttactttaaagactggaaaaagctcttcctgtcttttagtaaaacatccatatttcataacctgatgtaaaatatgttgtactgtttccaataggtgaatataaactcagtttatcaattaaaatatgtatttgactcattttaaaactct

SEQ ID NO: 462820 - DNA, 503 bp, Homo sapiens
agcggccgcggctgggaggatggtgacacctgcagtgagtgcagctgcagagagtcaggtgccagcggctcctcttttgaggagctggacctggagggtgaggggcccttggaggaaccacggctggaccctgagactgagcccctgggggctaccaagtggccctgagagcccagtaccctgagaagggcaaggagtaacccatgaccagccccctcctgcggggcagggctgcggaaccgagcagactctccagccatcttcctccttcttctgggggcgaggggttcccaggggacgtaactccccctgctctaggcctcttgtgaagccttctcctcactgtcctttaggctcccagggccaaagcagccaaagactgtatcctgcaccagccctgtgggccgacactcctgttgtatctctttttcagactgtcactggagcttccaggacccagaataaagccaatgacttacttgtttcacctggatttgggctgc

SEQ ID NO: 462821 - DNA, 159 bp, Homo sapiens
gacttcaggtggattggctgttgtggggagaggcagtgagggagtcacagcgggctccacttctctctggcctgggcaggaactgacatgatgagtgacacgagttctggaagcttggaggtgagccctggtagccgggagacttcatttgctaccgtg

SEQ ID NO: 462822 - DNA, 1936 bp, Homo sapiens
ctcattgatgtaagagtttgagaggggctgctgcacttcctacactaacagacatgtgatgatgtgtgactctaaaccacacagtacccagttcctgcctacttagtgtctgtttttctacctctgcctctgctgaactcccagccctggcacccccagcaaggccctccgaggtggagcagcagctacaagaggaggctgagcacctgagggaggagctggagagtctggcaggacagctccaagcccaggagcacctggaagctgccagccagagaaccagcagctacaggcccagctgagcctcatggctctccctgaggaaggtacgggagatcactcagaggaagaggagggagcccaggaggaaggggggactgttagcagataggagtgaggagtttagaacagctggtcactatgccgaccgggtttctgcgttaagttcggcatcaaaacggtgacctgggagtagaggggccaccaggttgcctaaggatgggtgaactggcccaagtcagaaatgaagcaggtcagaactcccctgccgggcagtagtggaactgagcttgggcaacatagtgcgactttgactggacggagggtgggggagaaggaggggcgggggggggaggaggaggaggatgaggatgaggaggagaaggagaaggagaagaagaagaagaagaaggaggagaaggagaaggaggaggaggcgtctcggcccatgaagagcatcctgcaggacctggaaagccaggagtccatggtggcatttttaacatcagctgtagccagtgcagatggggagcaggctcggctccgtgggcagctgaaggagcaaaggctgcgctgccggtgcctggctcacctgctggcctgggcccagaagcagccagaggcagcagccccagccccagggactgggatggattctgtgtgtggggggacccaccgggccctgcagggtgccatggagaaactgcagagctgctttatgcagctgatgcaggaaaaggtggacctgaaagagcgggtggaggagctggaacatcgctgcatccagctctctggagagacagacaccatcgggggagctgcccagtgggtgaagggaacccagcgtctgagccctgtcctctcgcaggagtctacactgccctctctcagccagggggcagcgctgaaggagcagcaccgagaggaggaggagcacatccacaggctagcccaggacaaggaggagatgaaggcagggcgcatggcagctgaacaccctctcctccaggtgaagctgctggagttgcaggagctggtgttgcggcttgtgggcgacaggactgagggccatggcagattcctggcagctgcccagagccctgctcatgagccagctccaggggccccagccccccagagctcagggctgccgacaagcaggatctttgccaggtgaccctcaccagcagcgtggagcctgcacaaggagaggccggggagggttctcccctcgacaaccccagtgcacagcagatcatgcagctgtttggtgagatgcagaaccctcaggagcgcccaggcttgggcagcatcccctgcattctgttttcccaccaggctgacaaaaaccaccaggcacccagccacgtggtgacagccaccttcccctacaccaccatgctgtccatctgggtggctgcctgccatatccattctgccttggacacctacatcaaggtgatgcacaggcctggagtttgtgtgttggggacagccaggtcccttgggtggagctgagtaggattgcccagagtgggaggaagaggaactgacatgatgagtgacacgagttctggaagcttggagactgtcactggagcttccaggacccagaataaagccaatgacttacttgtttcacctggatttgggctgc

SEQ ID NO: 462823 - DNA, 2471 bp, Homo sapiens
gcctacttaaaccgtccttcacaccgcggactgcacaggcacaggctgaagcgctgtggtcccgcagggatcccctcgcctgggccgttgtgtgggcggactcgcgagggaggttcacgacgctctgccccgccccgcggcccctgacgtggccatggatgatcccctcgcggccgccgagcgctgcaggcgagaagcgtgggccaaggcgtcagcagaccctgggcggcggctgtggaggaggccagcgtggagtacggctcggcccggtacctgctgctgtgcggcctgggcgggatgctgagctgcggctgacacacacggccatcgtgtccctgcacctggtcaagtgccgcatgcaggtggaccccggctggtacaagggcgtcctcagcggcttcggcgtgacggtgcacagcgacgggctgtgcggcctggctcgcggctgcgctcagaccttcttcggctactccctgcagggcttcttcaagttcggcctttacgaggtcttcaagatccgctccgcggagctcctgggcccagagaaagcctacgggtggagagccggcctgtaccttttcgcctgggccagcgccgagttcttccccgatgtctcgctggagcccatggaggcggtcaagcaccctgcgagccacggcgtccaggatgtagggcgaggagggcctgtgggccttctacaagggcgtggcgccgctgtggctgaggcagatcccctacaccatgatgaagttcgcctgcttcgagcgcacggtagaggacctctacaggtatgccgtgcccaagccccagagccagtgcaccaaggccaagcagctgggcatcaccttcgtggcgtcttctgcgctgtcgtgtcccatcccgccgactccgtggtgtctgtgctgaacaaggagaagggcatcgcggccctgggcgtcctccgaagactggggttcacgggcgtgtggaagggcgtcgttgcgcgcatcggcctctttgcgcacatccccatgatcggcaccctcacggccctgcagtggtttatctatgacctggtcaaggtctatttcaagctgcctcgccctcccgtggctcaagcgcccgaacccctgaagaagaaaaagtaggtgtgaagttctgaaccgctctagccacagtgggtccacatttccgtcaagtggggaatcgcgtgcaaacaatgctagtgtgtaagatgttaacattttgggcagaggttacttaatatgcagtctgagttctctttaaatgactgcttctttttggcaactcaagaggattgcaaacatttcgtttgggggtttgaaccattatctttggggagttggcgtggttgctttaactcaatagcttttcagcaattaaaaggaaaaaatacttaacaggaagtaatgttaggtagtttagggtctctaggtgttatctcctttgattcgccctttctgtagagattatccaagcataactactgaatagcctgcaaatgaggttttaaggtcagcacaactatatggatggggaagaaagtgagattctggtacacggtgttcatctcaatagaaatcgggcacctattgaatagatgaatgactcatcgcatatttcctgttcatgtccattacaggtaaaaaattattaaaagttaaattgtgacttatactgcctgatagcttagaatgtattcactgttttcaaagagacatgagaagatctgcattttctccttttgctttgtcccttctcttcctgatgttgctgattagaacatagctctctccaggaagtgctacaattggatcaatgtggaaagccagaaagagatgaagggcaggctctgggaataaatatgtaaagaaaagcctctgttctccagagatttcttttgtataactcagctttcaacagccatacatccaaagaagaccataccaccctgacataaaaaaaaaaaaaggaagaaaaaacccaaaatcctgcaaattccaactactgtctgttgaatattaaagaatggttttggtgactttggagggaaaatctcactttaagtgtaataaatactcttaacttaatttggtagatgtttcagtgatctttacaatggttgagattcataaaatttattgaaattataaagcatgttttttgttctctgtagccttcacatctctgattggggaaattttacaatcagtgaaattctgtgaattagggatgtttgtaaaatatgaataagaaacaaacttcaataaggcatttgatataacttaccaaagtgtaaaatgattgccttaaaaacttgtattaaattagactacaaacttagaatatgttaatgtttaaactttgtaatagtaaactcttcagtggttaacggaagtttaaaagtgtctaggtttaagtatgtcagaactgtcttgaataataaagagataaaaaagtcgacttttgaa

SEQ ID NO: 462824 - DNA, 5420 bp, Homo sapiens
gctgcagagggctaatgcaacatccagaagagcatgcagctggagcggactggacggcttccgggtttggcggggtctttgtctctcgctgtagccggagctccaggttttgctctcacttctctgtgtcttctgctcctaggggcctagcctgtgtggccctctgacctgcagatattgggagatccacagctaagacgccaggaccccctagaagcctagaaatggtgagagtgcccggtccgacatcccgagagacggcgaaagggctggttggaactggtgggaagtagctgtggcgggactcaggcctctccgcagtcagcttcacaatctgcgccttgcccagctcggcctccgtccccttcggccataagatggcggctgcgctgacagccaggaccccaggcgtcctttctcttccctgcgtagtgactgtgccttggcctggagccctctcttggcagctctgcacccgcagcgccgcgtctctctcagattgtgcagggaccacgggagggtcgtcaggggaaaatcctgactcggggtgcgggttcatgaatgggaagatctttggatgacccgaggtatggaatgtgtcctctcaagggagcaagtggatgccctggggctgagaggagtcttctggtgcagtcttattttgaaaagaaaaagaaaaaatatgtgcagagattttaccgaaaagggtcccaatccaaaccccaagagagggtccttggatttcactcaagaatcaagtatttcttgccaaaaagccacaaaagtgtccacaagtctcctggcatatcccaacccccagacaatgaatctgcagcagcaacctgttttctccaccagcctagggtcctggactacctgttcataatcttctctgcctgcatggacccagaaataaatcagagtacagcgccacctgggccactgtctgtagaacaaacaatccacttacactgcattcttccccacccatggattttctttttctacacgtgtacatgtgcagggttgttatatgggtaaaattgtgtcatgggggtttggtgtagattattttgtcactgagagaggatggctttagagtgctgaataccaatgaagttgatcagcgctgaaagaccttcttacagctgctccacacaagtctttgtcttcacataatctagaaatagcctctaggttctgtgctctttctttgctaagaggagcaaatagaaaattcaggtggtcatctgctaaggagcgatggtcaaggtagtgtttggcataaacactagcaggaacattaatattaaactgaagaagctccgaaaaatgcctttccatttcattcatgtcctcaactgtaatgtccttgaggatctggcagtagtccacattccatacagcctgatcatcccaaaccttggaggcaagaagagtggctcccagaacaatccttttctagttagtggggcaaatgtcgatttcagcataagttaaaagcctttctaagtaaaccagagttactgttgcacattcagctgttagctgtgcagcactaaaaagagtatgaacaaatctgtaaataaatttgtgctcaggatcatgcttaaactattcctgtggaactttttctcgtgtgaggggatgtgatctctcatcaaaaatatccagggatctgtttgcatctctgttctttatgtggtaatatatttctaaggtcacattttactgtggttctaaggttaggctggctgactgttctgtcacctagaaatattgttgagcatgagctatactttttagtaagctgccctggagatagatgatttaagtggttgctcttcctcttgtctcacacatcggtttgagatttgctcaggaaacttgtgcttgcccttggatggtcagaagggtttgactccaaagctaaatcttagggcatctcgtggtcgctgatgtgctgcaggtggtggccctcgcccgctgcgaaatccaactggtaggctccacagaagcgggcgctaccgccaccgcatccccgggtgccgcctcgtagatgtcggttgcgcagtacagctctggcaccacgcaccggcccagcttgaggctggtactggggggacacgcaataggtcagcgtgttccccatggggcgtctctgctcctctgggccggggctggcgccttctctagccccctactcgccgccctcagcagccgcccctcccccaacaatggcgcagcccaggctgcacccgcgcaagcaggtgcctcctcgctggcagttcacccgcccaccccgcgacccgccccgggcagggctccggcctccctgcacgctcgccgcgctgccgctgcctccgcctccccaagctgactcatctggagataattatgtgtttttctctttcgttctctttatgtgatggattacatttattgatttacatatgttgaaccagccttgcatcccaggggccattgacgtttagggatgtggccatagaattctctctggaggagtggcaatgcctggacagtgctcagcagggtttgtataggaaagtgatgttagagaactacagaaacctggtcttcttgggtattgctctcactaagccagacctgatcacctgtctggagcaaggaaaagagccctggaatataaagagacatgagatggtagccaaacccccagttatatgttctcattttccccaagacctttgggcagagcaggacattaaagattcttttcaagaagcgattctgaaaaaatatggaaaatatggacatgacaatttacagttacaaaaaggctgtaaaagtgtggatgagtgtaaagtgcacaaagaacatgataacaaattaaaccagtgtttgataactacccagagcaacatatttcaatgtgatccatctgcaaaagtctttcatacattttcaaattcaaacagacataagataagacatactagaaagaaacctttcaaatgtaaaaaatgtgaaaaatcattttgcatgcttttacacctaactcaacataaaagatttcatattacagagaattcctaccaatgtaaagattgtggcaaagccttcaactggttctcaacccttactacacacaggagaattcatactggagagaaaccctacaaatgtgaagaatgtgggaaagcatttaaccggtcctcacaccttactacacataagataattcatactggagagaaaccatacagatgtgaagaatgtgggaaagcttttaaccggtcttcacaccttactacacataaaagaattcatactggagtgaaaccctacaaatgtacagaatgtggcaaagcttttaaccggtcctcacaccttactacacacaggataattcatactggagagaaaccctacaaatgtgaagaatgtggcaaagcctttaaccagtcctcaacccttactacacataagataactcatgctggagagaaaccttacaaatgtgaagaatgtggcaaagctttttaccgattctcataccttactaaacataagacaagtcatactggagagaaattctacaaatgtgaagaatgcggcaaaggctttaactggtcctcagccctcactaaacataagagaattcatactggagagaaaccctacaaatgtgaagaatgtggcaaagcttttaatgagtcctcaaaccttactacccataagatgattcatactggagagaaaccctacaaatgtgacgaatgtggcaaagcctttaaccggtcctcacaactaactgcacataagatgattcatactggagagaaaccctacaaatgtgaggaatgtggcaaagcttttaaccgatcctcaacccttactaaacataagataactcatactggagagaaatcttacaaatgggaagaatgtggtaaagactttaaccagtccctaagccttattaaacaaaataactcatactggagagaaaccctacaaatgtgaaaaatgtggcaaagccttttaccagtcctcaactcttactaaacataaaaaaattcatactggagggaactcctgtgactgtgaagaatatggcaaagcctttaataaattctcaattcctaacagacataagataattcatactagagagaaattctacaaaccagaaagatgtgacagtgctttgaaaacacctcaaacttttcaaaacataaatcatagtgttgagaaatcctagaaatgtgaagaatgtgataaagttttaaatggttgtcacacttgattgtaggtaaggtaagttatactggagaaaacttctacatgtgtgaacagtgtgacaaaacttttaactaatgctcacaccttcacaggaaagcatttatacttgagaaatattgtacaaatataaagactgtgaaaaagccattaatacatgctcacatcttactcaacatcagagagttcatactcaataaaaacataagtgcaactactgtcaaaatatctttaagaaaatataagcttttaaagtgaagagtattttgaagaagaacattgtagtagaattgtaatatgtttacttgtatcacagatcttactgtacacgttttgtattagaggaaacctctgaagcagttgctcaaactttgttcaatatcagggaatttatattgaaaaaaactgtgcgaatgtaataaagttggaaaaatactttttcaaaaactacagcttagaaaacaccagagagttcatactaaaacatatttttgcagatacaggaaaaattttttaaaaattttaatcattaagtctgtaaatatcagagaatttacagtagaaatatgtaaggcactgatgcttcaggtattttactaaatcagagtgctgagtatagaaaataatctaaaactaaaattggtaaaatatttgtatataactttaaaagtagaaattttttgcagttattgcattcaaagtatgcttaactttttgaaaaaattagattttttgaaaagtgagtaataatgtaattcaactcttaaattatttcctgccttttcttcactcctatttacatgtgaaagcatgtgatcaattgttgctgcatcagatatgagagattcttttttattaggtgagcattatttataaactttgctatgaaaaagacattaaaatatgagatgtatgatgaaaatctaagtgaagagacttttatggttaacttataatattaagcaatgtgtgcgttaggcattcagagtaatattctgcattatgagaaaacttaatttcatttataagtaaattaaaattagtatattttactaatacttttatataaaatgcagtatattttttaaatttcagattatatgtgatgttaatatattcaacctttttaacatgtt

SEQ ID NO: 462825 - DNA, 4918 bp, Homo sapiens
gctgcagagggctaatgcaacatccagaagagcatgcagctggagcggactggacggcttccgggtttggcggggtctttgtctctcgctgtagccggagctccaggttttgctctcacttctctgtgtcttctgctcctaggggcctagcctgtgtggccctctgacctgcagatattgggagatccacagctaagacgccaggaccccctagaagcctagaaatggtgagagtgcccggtccgacatcccgagagacggcgaaagggctggttggaactggtgggaagtagctgtggcgggactcaggcctctccgcagtcagcttcacaatctgcgccttgcccagctcggcctccgtccccttcggccataagatggcggctgcgctgacagccaggaccccaggcgtcctttctcttccctgcgtagtgactgtgccttggcctggagccctctcttggcagctctgcacccgcagcgccgcgtctctctcagattgtgcagggaccacgggagggtcgtcaggggaaaatcctgactcggggtgcgggttcatgaatgggaagatctttggatgacccgaggtatggaatgtgtcctctcaagggagcaagtggatgccctggggctgagaggagtcttctggtgcagtcttattttgaaaagaaaaagaaaaaatatgtgcagagattttaccgaaaagggtcccaatccaaaccccaagagagggtccttggatttcactcaagaatcaagtatttcttgccaaaaagccacaaaagtgtccacaagtctcctggcatatcccaacccccagacaatgaatctgcagcagcaacctgttttctccaccagcctagggtcctggactacctgttcataatcttctctgcctgcatggacccagaaataaatcagagtacagcgccacctgggccactgtctgtagaacaaacaatccacttacactgcattcttccccacccatggattttctttttctacacgtgtacatgtgcagggttgttatatgggtaaaattgtgtcatgggggtttggtgtagattattttgtcactgagagaggatggctttagagtgctgaataccaatgaagttgatcagcgctgaaagaccttcttacagctgctccacacaagtctttgtcttcacataatctagaaatagcctctaggttctgtgctctttctttgctaagaggagcaaatagaaaattcaggtggtcatctgctaaggagcgatggtcaaggtagtgtttggcataaacactagcaggaacattaatattaaactgaagaagctccgaaaaatgcctttccatttcattcatgtcctcaactgtaatgtccttgaggatctggcagtagtccacattccatacagcctgatcatcccaaaccttggaggcaagaagagtggctcccagaacaatccttttctagttagtggggcaaatgtcgatttcagcataagttaaaagcctttctaagtaaaccagagttactgttgcacattcagctgttagctgtgcagcactaaaaagagtatgaacaaatctgtaaataaatttgtgctcaggatcatgcttaaactattcctgtggaactttttctcgtgtgaggggatgtgatctctcatcaaaaatatccagggatctgtttgcatctctgttctttatgtggtaatatatttctaaggtcacattttactgtggttctaaggttaggctggctgactgttctgtcacctagaaatattgttgagcatgagctatactttttagtaagctgccctggagatagatgatttaagtggttgctcttcctcttgtctcacacatcggtttgagatttgctcaggaaacttgtgcttgcccttggatggtcagaagggtttgactccaaagctaaatcttagggcatctcgtggtcgctgatgtgctgcaggtggtggccctcgcccgctgcgaaatccaactggtaggctccacagaagcgggcgctaccgccaccgcatccccgggtgccgcctcgtagatgtcggttgcgcagtacagctctggcaccacgcaccggcccagcttgaggctggtactggggggacacgcaataggtcagcgtgttccccatggggcgtctctgctcctctgggccggggctggcgccttctctagccccctactcgccgccctcagcagccgcccctcccccaacaatggcgcagcccaggctgcacccgcgcaagcaggtgcctcctcgctggcagttcacccgcccaccccgcgacccgccccgggcagggctccggcctccctgcacgctcgccgcgctgccgctgcctccgcctccccaagctgactcatctggagataattatgtgtttttctctttcgttctctttatgtgatggattacatttattgatttacatatgttgaaccagccttgcatcccaggggccattgacgtttagggatgtggccatagaattctctctggaggagtggcaatgcctggacagtgctcagcagggtttgtataggaaagtgatgttagagaactacagaaacctggtcttcttgggtattgctctcactaagccagacctgatcacctgtctggagcaaggaaaagagccctggaatataaagagacatgagatggtagccaaacccccagttatatgttctcattttccccaagacctttgggcagagcaggacattaaagattcttttcaagaagcgattctgaaaaaatatggaaaatatggacatgacaatttacagttacaaaaaggctgtaaaagtgtggatgagtgtaaagtgcacaaagaacatgataacaaattaaaccagtgtttgataactacccagagcaacatatttcaatgtgatccatctgcaaaagtctttcatacattttcaaattcaaacagacataagataagacatactagaaagaaacctttcaaatgtaaaaaatgtgaaaaatcattttgcatgcttttacacctaactcaacataaaagatttcatattacagagaattcctaccaatgtaaagattgtggcaaagccttcaactggttctcaacccttactacacacaggagaattcatactggagagaaaccctacaaatgtgaagaatgtgggaaagcatttaaccggtcctcacaccttactacacataagataattcatactggagagaaaccatacagatgtgaagaatgtgggaaagcttttaaccggtcttcacaccttactacacataaaagaattcatactggagtgaaaccctacaaatgtacagaatgtggcaaagcttttaaccggtcctcacaccttactacacacaggataattcatactggagagaaaccctacaaatgtgaagaatgtggcaaagcctttaaccagtcctcaacccttactacacataagataactcatgctggagagaaaccttacaaatgtgaagaatgtggcaaagctttttaccgattctcataccttactaaacataagacaagtcatactggagagaaattctacaaatgtgaagaatgcggcaaaggctttaactggtcctcagccctcactaaacataagagaattcatactggagagaaaccctacaaatcagaaagatgtgacagtgctttgaaaacacctcaaacttttcaaaacataaatcatagtgttgagaaatcctagaaatgtgaagaatgtgataaagttttaaatggttgtcacacttgattgtaggtaaggtaagttatactggagaaaacttctacatgtgtgaacagtgtgacaaaacttttaactaatgctcacaccttcacaggaaagcatttatacttgagaaatattgtacaaatataaagactgtgaaaaagccattaatacatgctcacatcttactcaacatcagagagttcatactcaataaaaacataagtgcaactactgtcaaaatatctttaagaaaatataagcttttaaagtgaagagtattttgaagaagaacattgtagtagaattgtaatatgtttacttgtatcacagatcttactgtacacgttttgtattagaggaaacctctgaagcagttgctcaaactttgttcaatatcagggaatttatattgaaaaaaactgtgcgaatgtaataaagttggaaaaatactttttcaaaaactacagcttagaaaacaccagagagttcatactaaaacatatttttgcagatacaggaaaaattttttaaaaattttaatcattaagtctgtaaatatcagagaatttacagtagaaatatgtaaggcactgatgcttcaggtattttactaaatcagagtgctgagtatagaaaataatctaaaactaaaattggtaaaatatttgtatataactttaaaagtagaaattttttgcagttattgcattcaaagtatgcttaactttttgaaaaaattagattttttgaaaagtgagtaataatgtaattcaactcttaaattatttcctgccttttcttcactcctatttacatgtgaaagcatgtgatcaattgttgctgcatcagatatgagagattcttttttattaggtgagcattatttataaactttgctatgaaaaagacattaaaatatgagatgtatgatgaaaatctaagtgaagagacttttatggttaacttataatattaagcaatgtgtgcgttaggcattcagagtaatattctgcattatgagaaaacttaatttcatttataagtaaattaaaattagtatattttactaatacttttatataaaatgcagtatattttttaaatttcagattatatgtgatgttaatatattcaacctttttaacatgtt

SEQ ID NO: 462826 - DNA, 334 bp, Homo sapiens
acatttatatgtctataaaggaatgagggcctttggtattttcctatgccatcttatttatgtagtttgtatattagaggttagatttgtaaactatctgtgtctagtaagtaaagtaatttgttatttttatttctttcagttatatgttctcattttccccaagacctttgggcagagcaggacattaaagattcttttcaagaagcgattctgaaaaaatatggaaaatatggacatgacaatttacagttacaaaaaggctgtaaaagtgtggatgagtgtaaagtgcacaaagaacatgataacaaattaaaccagtgtttgataacta

SEQ ID NO: 462827 - DNA, 1699 bp, Homo sapiens
gccaaattccctgcctgtgcctgctgggaccagactccgctgtcatgagggtgacatccgccacctgtgctcttctgctggctctgatctgcagcgtccagctgggtaagaaagaggcgagcagggctgggaggaagcggtggccctgctccttcactctcatcaccatcccaaggtctcattggccatgggaggtttcgctgaattctgacctcctctgttttcttatctcacctcatcctccacaggggatgcctgcctggatatcgataaactgcttgcgaatgttgtgtttgatgtgtcccaagacctcctgaaggaggagcttgctcgttacaaccccagtcccctgacagaggagtccttcctcaatgtccagcaatgctttgccaatgtctccgtgacagaaagatttgctcattcagttgttattaagaagatccttcagagcaacgattgcatagaagcagccttctgatctgaggacccctgcagatcagatattggccctcctgccttccttggggctccccgcgttcctggcctggctctgttcatcactacagagaccccaatgaacacctgcagctcagttctgtgttctggcatctgtgtggggttggctgtgaccgcatatgcagagtgtgaccagggtcccagtgtgaaaatatgcgactgaggaaaaactctacaggtgaaggtctggggcagggaatgcggcatgatgagaaaggatttgttgtgttggagaaatggccagtgcagctggaacaaggggcagcagggaaggaggtcacgtcagaaaacgaggcaagtgccagagcaacgggggcggcagtagaggcaggaagaccaactgggagtccctgtggccgtccaggtagacaccgtggccttgtcacagtgcagccctggagagacacgagggagacagaggctggggcagcactgacagcacctgctgttgaattgaatatggggagaggatgtggagagaaggggaatcaaaatgatctcatcacatttgggctggagcagctggctggatgtgatgccactgctgagaaggtgaagcctggggaggagcaggtttagggcaaagatccagagtcccatgctggcctggataagtttcccacatccaagacatccattagctatccaggaggacgggacacagggggtgtgagacgctctagtttggagctcatggaatagttgggcctggagacaaaaacatgtaaatttcagcatttcaatggaatttaaatctgtggagctaaagaaaataatgcagatcatgctacttattcagtctcaattaaaactcagcttgtagcaatcaaagatggagagtttcaaccagaagtaaatgaaaagaattagaaatgccctgagaaatttggacaaacatgttattgatataaatactttgagatgcaaaagcatttcacatgtgtttgaaagaataaggaaaatgttagaaaataattgtcactgaagatgagtctacccatgatctgtcagttgtcctgaaattgagtaatttcttaaaatgacaatgtcctgtgagtttactttaactaaaatgcttacgactctgttattcttaatgatatgtgatgatctctgtattgttggtataaggaattatattccctacttgtatgtttcatagaatattgaatttcagccataa

SEQ ID NO: 462828 - DNA, 1103 bp, Homo sapiens
taaattgactcaatttaaatggaatgaagtggaatgcacttgaacggattggaatggattggaatggaatggaatggaacggaacggaacggaacggaacggacccggaatggaacggaacggacccggaatggaacggaacggaatggaatggaatggaatggaatgaagtggactctaatggaatggaatggaatggaatagactcgaatgaaatgggatggactcgaatggaatggaacggaatggaatcgactcgagtggaatggaatggaatggaatggaatagaatggaattgactcaatttaaatggaatgaagactggaatgaaatggaatggaatggactcaaatggaatggaatggaatggaatggactcaaatggaatggactcaagtggaatggaatggaatggacacgaattgaatggaatggaatggactgtaatggaaaggaatggaatggaacggaatggactcgaatggaatggaaaggactcgagtggaatggaatggaatggaatggactcgaatggaatggagtggaatactcgaatggaatggaatggaatggaatggaatggaatggaatggaatggaatggaatggaatggaatggaatggactcgaatgaaatggaatggactcgaatgaaatggaatggactagaatggaatggaatggaatggaatggaatggaatggaatggaatggaatggaatggaatggaatggaatcgactcgagtggaatggaatggactcgaaagaaatggaatgcagtggaatggactcgaatggaatgcaatggaatggaatagactcgaacggaatggaatggaatggaatggaatggaatggaacggaatggacgcgaatgaaatggaatggaacggaatggactcggatggaacggaacggaatggaacggaatggaatggaatttactcgaatgggatggaatggaatggaatttactcgaatggaatggaatggaatggactgaaatggaatagcatggaatggaatggactcgaatgcaatggaatggaatggactcgagtggaatggaatggactcgaacggagtggagtcgaatggattc

SEQ ID NO: 462829 - DNA, 445 bp, Homo sapiens
  misc_feature (67)..(67): n is a, c, g, or t
  misc_feature (70)..(71): n is a, c, g, or t
gacctgttaaaatcctaacctccatactgggaaaagaaggagctttagctgcatggctctcttattnctnncgctcagggggtctgtatctcaaagcctttaaaatgctgatggaaggagtggagatccagcgttcagggtagaaaagaggaaaatccatggaaccataatctatggatggctttaggaatgggattgactgcaaaggagcacaagggaacttcctggggtgatggaaatgttttgtcttgattgtggtaatgattacatgactatgtttgtcaaaattccagaactttatacctaaaagggtgaattttactgcatgtaaattatacctaaacacatgactttttaaaaaggcctgaaatcttaactactcagctaaaaataaaataaaataaaataaaccaatttaggtgcaaaacaagttttgtttttggga

SEQ ID NO: 462830 - DNA, 1336 bp, Homo sapiens
gaagatgattagagggttggaaaatgagatggatgtcagattaaagtgacagtaggattggcgggtggtgagggtgctggtggtgggaatctaagcaaaggagtcgagggtgataatgctaaggggtctggattgggaagctgggtggatttcaactaagacgagagaatctgtgggaagaggagcaagggcagaaggggctcaggggaagatctgtgactatgaaagggatctgaagaaaactttcccaaccgactggcaagagaaaatgacagtgtctttgaatgtattctgtaatatcaaaaacggaatacaaatttacggaactatcagtgttatccacaatcaaaactatccatttaaaactgatggaagtgactgttgcaccttcgggtattacatctgcattccaggtgggaggaagggggatggcaaaaggatccaaggcattctcttagagaagtttacctcttattctggaaagaaagtgttcctcaaagacttccacttacagcttattggccagagctgaagtaacagccctttgtagaattataaagtcaccctttataactatgctctcattaagttttggaaggcctattttccttgtatctttaggcttttcatcatgtagtaaacaagctgagtattagaaattaaatctcatgacaaagatgacacaagatgacagggcatctgggaaggctgtttgcatctgccttgcaatcagtgggtgagagagtgggttgattctgatgactatggtgagcttttccttcctcctattctaaaaagataccaaacctggcacagaacaatggtcaatgatgttggtgaacccagttgattaattctggctccactcttggcacagttcttttccttcctcctgttctagaaagagaagaaagttttaaaagtagctatgtcattttgcaatgtttgatatccttgtgttttatctagggggtctgtatctcaaagcctttaaaatgctgatggaaggagtggagatccagcgttcagggtagaaaagaggaaaatccatggaaccataatctatggatggctttaggaatgggattgactgcaaaggagcacaagggaacttcctggggtgatggaaatgttttgtcttgattgtggtaatgattacatgactatgtttgtcaaaattccagaactttatacctaaaagggtgaattttactgcatgtaaattatacctaaacacatgactttttaaaaaggcctgaaatcttaactactcagctaaaaataaaataaaataaaataaaccaatttaggtgcaaaacaagttttgtttttggga

SEQ ID NO: 462831 - DNA, 1427 bp, Homo sapiens
cgcaacaaccccaagtctgtttccaggtggaggctgtaacagggttgaaaacttgccccaggctaccggctgctaaagaaaagggcttggttcgtcccccacctgtggagtctgcacaccagatttgcgccctcccctgagttctgaccaggaggcgtctcgccccatccaaattgttaaaaagttcagctggacatttccctctccccatggagttctacccctgctcctctggtcaccctcctgatggatccccatggtgccaggcaggaatggcctgctaggagatgcagtgagcccccaggacctctccactgcctcctccacccctgtatttcacttggctctccaaattgactcaactccagaccataaagaagatggagaggcacatggtcaggggacaattgtataagcattttgatttggagaggaagaatgccaagcaggctgaagccagactggaccaaagactgcagagactaaaggttatttgcctctaccatgtgaaattgctgacctgggagcagaggcagctccaaaaagaactgcagaggttgcagcaagaaaccatgaagaaaaagttctcctcttatttggggaatggatttcagaagagaccagaagatgttctcgtgttctcaccacagggaaggcagaagcacagagccccacaggctaagaaaatgagagcattggcaacccgtatggcccaagacacatgcaaaagcaagtcccaggtgcctccttcacatgatgctggcctcaaagaccccatgaagagcaaaaagcagccactctctcaaaataacagaactgcctgcttcataaaagagcaaccacaagcccaagagaaagattctgtgaatccatctaaggacgtagaccccagcaagggcatctctgttccatgccaaaatcaagaggtttccaccaacaccatagaacaaggtcctagttccagcccagctagtgatagtggaatggcatgtgctgatgagaccagatcaaaagatgttgctctaaagccagatgggaacactggaaaacaaattcccccaaaacacatggaatgtgcaggaagcttcgaaggcgagttcacaaagccaaccttcttagagttgctttcaaaggccagaaatgcccattatctccggcacagggtcccccctgagtctgagaggttgcttagcattggagagatatttgggcatggggaatcctcatcatccagggcaggaaaggagtgtgaaaacagggtgccttctaagtttcttcctctctaaccgtttaacatagcctgacaataacatatgccattattgctaaggaaatgtgttcctcaaatgactatattaagcaatacagagaaaaacaaacaaacataattgaattacaattttattttaaactccctattattttcc

SEQ ID NO: 462832 - DNA, 1182 bp, Homo sapiens
cctgcggctcccgggctggtagcgcgccgctctcggtcgcgcggagtgatcgtgtggaatcgcgggtcgcggacgctcgccgccggccatagctcagcctagcgccgccaaggccgacggccctcagcctctgccatggacttcgaggacgattacacacactccgcctgcaggaatacttatcagggctttaatggaatggatcgtgattatggccctggatcttatggagggatggatcgtgactatggccatggatcctatgggggtcagagatccatggattcctacctaaaccagtcatatggcatggacaatcacagtggtggtggtgggggtagcaggtttggaccttatgagtcttacgactccaggtcttctctgggtgggcgagatctgtacagatctggctatggttttaatgaacccgaacaaagccgcttcggaggtagttatggtggtcgatttgagagctcctaccggaatagccttgactctttcggaggtagaaaccagggcgggtctagctgggaagcaccttactcccgttcaaaattgaggcctgggtttatggaggacagaggaagagagaattactcttcctacagcagtttttcttcaccccatatgaagcctgcacctgtaggctctcgggggagaggaacgcctgcttatcctgaaagtacgtttggaagcagaaactatgatgcttttggaggaccatcaacaggcagaggccgaggccgaggagaagtaatattttgtaaattattgcttaaatgagtaaatatactagtccacaattgtttaagtttagggtacatagtgtaaacattatgctttatgttcttaggtcacttgattgacatgaaattttacctagaacaaataaattaaaatggaacataaattttatcacaatttttacaggatttttcatcggtttattaacaagtaaattgtttttaactcactggtgtcaaatggtgaatttattttctaaaactaaaacgccagttattcctaagatttttgtgttttattacttttaatcaaaagacaaataaataagagcacttccaaataggaaaaaattctatttaactgctaaatatagcataaaattaggagattttgctgtttgtaagtgattatgctcttccctaccctaaaacttagagt

SEQ ID NO: 462833 - DNA, 950 bp, Homo sapiens
cctgcggctcccgggctggtagcgcgccgctctcggtcgcgcggagtgatcgtgtggaatcgcgggtcgcggacgctcgccgccggccatagctcagcctagcgccgccaaggccgacggccctcagcctctgccatggacttcgaggacgattacacacactccgcctgcaggaatacttatcagggctttaatggaatggatcgtgattatggccctggatcttatggaggtctgacattcaaggatatttatctaaaaattcttcttttgagtgccagtaaagcatatgggtgattttggaagcattcatagacccggaattgttgttgactatcaaaacaaatccaccaatgtgacagttgctgctgcaagaggaataaagagaaaaatgatgcagccatttaataagcccagtggaacctttatcaagaaacccaaactagcaaaacctatggagaagataagcctcagcaaatcacccacaaaaactgatcctaaaaatgaagaggaagaaaagcggcgaattgaggctcggcgagagaaacaaaggcgcagaagagaaaaaaaacagtgagaaatacggagatggatacagaatggcatttacatgttcattttgtaaatttcgaacattgagaaaaagattttgagactgctctgggaaggttcttcacatcagggaacattggatctatacagaaacaaactaaattgagtaagaggtatggggggttgccgaggcggggcggcgaaatcccggaaacatctatttgtgaggaccccgaccaactatctacgaggtgttaatatgcgaccacgttggagggttggtggaaacacactagaaggggaagcactggcgggcgggtgtatacacactgataaaaggagcggggaaacgtctataagggggggtgttgaaaaaaaaagagggggggaaaaagagg

SEQ ID NO: 462834 - DNA, 1147 bp, Homo sapiens
cctgcggctcccgggctggtagcgcgccgctctcggtcgcgcggagtgatcgtgtggaatcgcgggtcgcggacgctcgccgccggccatagctcagcctagcgccgccaaggccgacggccctcagcctctgccatggacttcgaggacgattacacacactccgcctgcaggaatacttatcagggctttaatggaatggatcgtgattatggccctggatcttatggagggatggatcgtgactatggccatggatcctatgggggtcagagatccatggattcctacctaaaccagtcatatggcatggacaatcacagtggtggtggtgggggtagcagtttttcttcaccccatatgaagcctgcacctgtaggctctcgggggagaggaacgcctgcttatcctgaaagtacgtttggaagcagaaactatgatgcttttggaggaccatcaacaggcagaggccgaggccgaggacatatgggtgattttggaagcattcatagacccggaattgttgttgactatcaaaacaaatccaccaatgtgacagttgctgctgcaagaggaataaagagaaaaatgatgcagccatttaataagcccagtggaacctttatcaagaaacccaaactagcaaaacctatggagaagataagcctcagcaaatcacccacaaaaactgatcctaaaaatgaagaggaagaaaagcggcgaattgaggctcggcgagagaaacaaaggcgcagaagagaaaaaaaacagtgagaaatacggagatggatacagaatggcatttacatgttcattttgtaaatttcgaacattgagaaaaagattttgagactgctctgggaaggttcttcacatcagggaacattggatctatacagaaacaaactaaattgagtaagaggtatggggggttgccgaggcggggcggcgaaatcccggaaacatctatttgtgaggaccccgaccaactatctacgaggtgttaatatgcgaccacgttggagggttggtggaaacacactagaaggggaagcactggcgggcgggtgtatacacactgataaaaggagcggggaaacgtctataagggggggtgttgaaaaaaaaagagggggggaaaaagagg

SEQ ID NO: 462835 - DNA, 1414 bp, Homo sapiens
cctgcggctcccgggctggtagcgcgccgctctcggtcgcgcggagtgatcgtgtggaatcgcgggtcgcggacgctcgccgccggccatagctcagcctagcgccgccaaggccgacggccctcagcctctgccatggacttcgaggacgattacacacactccgcctgcaggaatacttatcagggctttaatggaatggatcgtgattatggccctggatcttatggagggatggatcgtgactatggccatggatcctatgggggtcagagatccatggattcctacctaaaccagtcatatggcatggacaatcacagtggtggtggtgggggtagcaggtttggaccttatgagtcttacgactccaggtcttctctgggtgggcgagatctgtacagatctggctatggttttaatgaacccgaacaaagccgcttcggaggtagttatggtggtcgatttgagagctcctaccggaatagccttgactctttcggaggtagaaaccagggcgggtctagctgggaagcaccttactcccgttcaaaattgaggcctgggtttatggaggacagaggaagagagaattactcttcctacagcagtttttcttcaccccatatgaagcctgcacctgtaggctctcgggggagaggaacgcctgcttatcctgaaagtacgtttggaagcagaaactatgatgcttttggaggaccatcaacaggcagaggccgaggccgaggacatatgggtgattttggaagcattcatagacccggaattgttgttgactatcaaaacaaatccaccaatgtgacagttgctgctgcaagaggaataaagagaaaaatgatgcagccatttaataagcccagtggaacctttatcaagaaacccaaactagcaaaacctatggagaagataagcctcagcaaatcacccacaaaaactgatcctaaaaatgaagaggaagaaaagcggcgaattgaggctcggcgagagaaacaaaggcgcagaagagaaaaaaaacagtgagaaatacggagatggatacagaatggcatttacatgttcattttgtaaatttcgaacattgagaaaaagattttgagactgctctgggaaggttcttcacatcagggaacattggatctatacagaaacaaactaaattgagtaagaggtatggggggttgccgaggcggggcggcgaaatcccggaaacatctatttgtgaggaccccgaccaactatctacgaggtgttaatatgcgaccacgttggagggttggtggaaacacactagaaggggaagcactggcgggcgggtgtatacacactgataaaaggagcggggaaacgtctataagggggggtgttgaaaaaaaaagagggggggaaaaagagg

SEQ ID NO: 462836 - DNA, 693 bp, Homo sapiens
  misc_feature (40)..(40): n is a, c, g, or t
  misc_feature (77)..(77): n is a, c, g, or t
  misc_feature (88)..(88): n is a, c, g, or t
  misc_feature (110)..(110): n is a, c, g, or t
  misc_feature (119)..(119): n is a, c, g, or t
ctcaagcagatcctcccaccatggggcgtaccgcagtgcntgggattccagcgagtgatgccaccgctctctggctnattatattttncaaagactcctcagcctgcggncatgtgcanaaccaagccacccattgtcacccccaggctgtcaccaccctaggccacatcgtccgtatctatctcatggaagacttggacagcggcctctctgctatcctttgctgcattcttttgaagccccaggcttgcttcctcagatattcacatcctgatcaaaatcaggacattcgcactgatacagtactattcactaatgtgcaagccttattcacatttcctctgttcagctctagtgtcccttttctgttccaggatttagtcctggatcctgtcttgcatgaaaaagggcagttggctaccttctgggaaactaaacttaccggtaagctccgcatctgctggggttctggtgtcttccatgagccaggtcgtggaagtggagagagcatccaggaaggcttcccgaaagaagtgccaatcaaggcggctgcaccctggggacctacccagagggctttggaggcacatgatggcctgcggacctcaagcgggctcttctttcctggggcgccatcccccatgctctgagctcccgctctccccagcctctcaggccccatgggcagggctc

SEQ ID NO: 462837 - DNA, 535 bp, Homo sapiens
agcagccggcgcggccgccagcgcggtgtagggggcaggcgcggatcccgccaccgccgcgcgctcggcccgccgactcccggcgccgccgccgccactgccgtcgccgccgccgcctggcggcgcggagttctcggctcgctccaggaagaggaaggcaaacgtgaccgtttttttgcaggatccagatgaagaaatggccaaaatcgacaggacggcgagggaccagtgtgggagccaggtaggtccgcccggggttgggcctctgtggaggtccttctccccctgggtcacatggggtttcatgctgtcttgtctcttgctggagacactctggtgagagtgaacttctctaatgcagccacagcccatatggcccagcactgtacctgtcagtgggcactggcctctgccagtcctgggattccaggaagcttggtgttcctgactggcaccgtctgagattacagatatgtgcctagcctggaagaaccagaatggacatcacagtattcagtcctccccttctgcccag

SEQ ID NO: 462838 - DNA, 2142 bp, Homo sapiens
agcagccggcgcggccgccagcgcggtgtagggggcaggcgcggatcccgccaccgccgcgcgctcggcccgccgactcccggcgccgccgccgccactgccgtcgccgccgccgcctgccgggactggagcgcgccgtccgccgcggacaagaccctggcctcaggccggagcagccccatcatgccgagggagcgcagggagcgggatgcgaaggagcgggacaccatgaaggaggacggcggcgcggagttctcggctcgctccaggaagaggaaggcaaacgtgaccgtttttttgcaggatccagatgaagaaatggccaaaatcgacaggacggcgagggaccagtgtgggagccagccttgggacaataatgcagtctgtgcagacccctgctccctgatccccacacctgacaaagaagatgatgaccgggtttacccaaactcaacgtgcaagcctcggattattgcaccatccagaggctccccgctgcctgtactgagctgggcaaatagagaggaagtctggaaaatcatgttaaacaaggaaaagacatacttaagggatcagcactttcttgagcaacaccctcttctgcagccaaaaatgcgagcaattcttctggattggttaatggaggtgtgtgaagtctataaacttcacagggagaccttttacttggcacaagatttctttgaccggtatatggcgacacaagaaaatgttgtaaaaactcttttacagcttattgggatttcatctttatttattgcagccaaacttgaggaaatctatcctccaaagttgcaccagtttgcgtatgtgacagatggagcttgttcaggagatgaaattctcaccatggaattaatgattatgaaggcccttaagtggcgtttaagtcccctgactattgtgtcctggctgaatgtatacatgcaggttgcatatctaaatgacttacatgaagtgctactgccgcagtatccccagcaaatctttatacagattgcagagctgttggatctctgtgtcctggatgttgactgccttgaatttccttatggtatacttgctgcttcggccttgtatcatttctcgtcatctgaattgatgcaaaaggtttcagggtatcagtggtgcgacatagagaactgtgtcaagtggatggttccatttgccatggttataagggagacggggagctcaaaactgaagcacttcaggggcgtcgctgatgaagatgcacacaacatacagacccacagagacagcttggatttgctggacaaagcccgagcaaagaaagccatgttgtctgaacaaaatagggcttctcctctccccagtgggctcctcaccccgccacagagcggtaagaagcagagcagcgggccggaaatggcgtgaccaccccatccttctccaccaaagacagttgcgcgcctgctccacgttctcttctgtctgttgcagcggaggcgtgcgtttgcttttacagatatctgaatggaagagtgtttcttccacaacagaagtatttctgtggatggcatcaaacagggcaaagtgttttttattgaatgcttataggttttttttaaataagtgggtcaagtacaccagccacctccagacaccagtgcgtgctcccgatgctgctatggaaggtgctacttgacctaagggactcccacaacaacaaaagcttgaagctgtggagggccacggtggcgtggctctcctcgcaggtgttctgggctccgttgtaccaagtggagcaggtggttgcgggcaagcgttgtgcagagcccatagccagctgggcagggggctgccctctccacattatcagttgacagtgtacaatgcctttgatgaactgttttgtaagtgctgctatatctatccattttttaataaagataatactgtttttgagacagctggttttatgagctatgtctggtaacttaagttggcgtcgccacaccacacagtgccctcaacaaggccacctaagacctctgtgggacaaatctcacagtatgcgtctgccttcctctcccaaggcacctctgccacacttcgctctgctgacccctctttccctctggaaacttcagtgccagctcc

SEQ ID NO: 462839 - DNA, 2112 bp, Homo sapiens
taggctgtgggttgattctggaccgtggctgtccatttcccgccgactcccggcgccgccgccgccactgccgtcgccgccgccgcctgccgggactggagcgcgccgtccgccgcggacaagaccctggcctcaggccggagcagccccatcatgccgagggagcgcagggagcgggatgcgaaggagcgggacaccatgaaggaggacggcggcgcggagttctcggctcgctccaggaagaggaaggcaaacgtgaccgtttttttgcaggatccagatgaagaaatggccaaaatcgacaggacggcgagggaccagtgtgggagccagccttgggacaataatgcagtctgtgcagacccctgctccctgatccccacacctgacaaagaagatgatgaccgggtttacccaaactcaacgtgcaagcctcggattattgcaccatccagaggctccccgctgcctgtactgagctgggcaaatagagaggaagtctggaaaatcatgttaaacaaggaaaagacatacttaagggatcagcactttcttgagcaacaccctcttctgcagccaaaaatgcgagcaattcttctggattggttaatggaggtgtgtgaagtctataaacttcacagggagaccttttacttggcacaagatttctttgaccggtatatggcgacacaagaaaatgttgtaaaaactcttttacagcttattgggatttcatctttatttattgcagccaaacttgaggaaatctatcctccaaagttgcaccagtttgcgtatgtgacagatggagcttgttcaggagatgaaattctcaccatggaattaatgattatgaaggcccttaagtggcgtttaagtcccctgactattgtgtcctggctgaatgtatacatgcaggttgcatatctaaatgacttacatgaagtgctactgccgcagtatccccagcaaatctttatacagattgcagagctgttggatctctgtgtcctggatgttgactgccttgaatttccttatggtatacttgctgcttcggccttgtatcatttctcgtcatctgaattgatgcaaaaggtttcagggtatcagtggtgcgacatagagaactgtgtcaagtggatggttccatttgccatggttataagggagacggggagctcaaaactgaagcacttcaggggcgtcgctgatgaagatgcacacaacatacagacccacagagacagcttggatttgctggacaaagcccgagcaaagaaagccatgttgtctgaacaaaatagggcttctcctctccccagtgggctcctcaccccgccacagagcggtaagaagcagagcagcgggccggaaatggcgtgaccaccccatccttctccaccaaagacagttgcgcgcctgctccacgttctcttctgtctgttgcagcggaggcgtgcgtttgcttttacagatatctgaatggaagagtgtttcttccacaacagaagtatttctgtggatggcatcaaacagggcaaagtgttttttattgaatgcttataggttttttttaaataagtgggtcaagtacaccagccacctccagacaccagtgcgtgctcccgatgctgctatggaaggtgctacttgacctaagggactcccacaacaacaaaagcttgaagctgtggagggccacggtggcgtggctctcctcgcaggtgttctgggctccgttgtaccaagtggagcaggtggttgcgggcaagcgttgtgcagagcccatagccagctgggcagggggctgccctctccacattatcagttgacagtgtacaatgcctttgatgaactgttttgtaagtgctgctatatctatccattttttaataaagataatactgtttttgagacagctggttttatgagctatgtctggtaacttaagttggcgtcgccacaccacacagtgccctcaacaaggccacctaagacctctgtgggacaaatctcacagtatgcgtctgccttcctctcccaaggcacctctgccacacttcgctctgctgacccctctttccctctggaaacttcagtgccagctcc

SEQ ID NO: 462840 - DNA, 1965 bp, Homo sapiens
taggctgtgggttgattctggaccgtggctgtccatttcccgccgactcccggcgccgccgccgccactgccgtcgccgccgccgcctgccgggactggagcgcgccgtccgccgcggacaagaccctggcctcaggccggagcagccccatcatgccgagggagcgcagggagcgggatgcgaaggagcgggacaccatgaaggaggacggcggcgcggagttctcggctcgctccaggaagaggaaggcaaacgtgaccgtttttttgcaggatccagatgaagaaatggccaaaatcgacaggacggcgagggaccagtgtgggagccagccttgggacaataatgcagtctgtgcagacccctgctccctgatccccacacctgacaaagaagatgatgaccgggtttacccaaactcaacgtgcaagcctcggattattgcaccatccagaggctccccgctgcctgtactgagctgggcaaatagagaggaagtctggaaaatcatgttaaacaaggaaaagacatacttaagggatcagcactttcttgagcaacaccctcttctgcagccaaaaatgcgagcaattcttctggattggttaatggaggaaatctatcctccaaagttgcaccagtttgcgtatgtgacagatggagcttgttcaggagatgaaattctcaccatggaattaatgattatgaaggcccttaagtggcgtttaagtcccctgactattgtgtcctggctgaatgtatacatgcaggttgcatatctaaatgacttacatgaagtgctactgccgcagtatccccagcaaatctttatacagattgcagagctgttggatctctgtgtcctggatgttgactgccttgaatttccttatggtatacttgctgcttcggccttgtatcatttctcgtcatctgaattgatgcaaaaggtttcagggtatcagtggtgcgacatagagaactgtgtcaagtggatggttccatttgccatggttataagggagacggggagctcaaaactgaagcacttcaggggcgtcgctgatgaagatgcacacaacatacagacccacagagacagcttggatttgctggacaaagcccgagcaaagaaagccatgttgtctgaacaaaatagggcttctcctctccccagtgggctcctcaccccgccacagagcggtaagaagcagagcagcgggccggaaatggcgtgaccaccccatccttctccaccaaagacagttgcgcgcctgctccacgttctcttctgtctgttgcagcggaggcgtgcgtttgcttttacagatatctgaatggaagagtgtttcttccacaacagaagtatttctgtggatggcatcaaacagggcaaagtgttttttattgaatgcttataggttttttttaaataagtgggtcaagtacaccagccacctccagacaccagtgcgtgctcccgatgctgctatggaaggtgctacttgacctaagggactcccacaacaacaaaagcttgaagctgtggagggccacggtggcgtggctctcctcgcaggtgttctgggctccgttgtaccaagtggagcaggtggttgcgggcaagcgttgtgcagagcccatagccagctgggcagggggctgccctctccacattatcagttgacagtgtacaatgcctttgatgaactgttttgtaagtgctgctatatctatccattttttaataaagataatactgtttttgagacagctggttttatgagctatgtctggtaacttaagttggcgtcgccacaccacacagtgccctcaacaaggccacctaagacctctgtgggacaaatctcacagtatgcgtctgccttcctctcccaaggcacctctgccacacttcgctctgctgacccctctttccctctggaaacttcagtgccagctcc

SEQ ID NO: 462841 - DNA, 208 bp, Homo sapiens
ggcaaatagagaggaagtctggaaaatcatgttaaacaaggaaaagacatacttaagggatcagcactttcttgagcaacaccctcttctgcagccaaaaatgcgagcaattcttctggattggttaatggaggtgagcttgagtcttcctgttcgcttcatgaaagcactgagcatttccagcatttttgtgtattaggacctctgt

SEQ ID NO: 462842 - DNA, 1971 bp, Homo sapiens
gtgctcacccggcccggtgccacccgggtccacagggatgcgaaggagcgggacaccatgaaggaggacggcggcgcggagttctcggctcgctccaggaagaggaaggcaaacgtgaccgtttttttgcaggatccagatgaagaaatggccaaaatcgacaggacggcgagggaccagtgtgggagccagccttgggacaataatgcagtctgtgcagacccctgctccctgatccccacacctgacaaagaagatgatgaccgggtttacccaaactcaacgtgcaagcctcggattattgcaccatccagaggctccccgctgcctgtactgagctgggcaaatagagaggaagtctggaaaatcatgttaaacaaggaaaagacatacttaagggatcagcactttcttgagcaacaccctcttctgcagccaaaaatgcgagcaattcttctggattggttaatggaggtgtgtgaagtctataaacttcacagggagaccttttacttggcacaagatttctttgaccggtatatggcgacacaagaaaatgttgtaaaaactcttttacagcttattgggatttcatctttatttattgcagccaaacttgaggaaatctatcctccaaagttgcaccagtttgcgtatgtgacagatggagcttgttcaggagatgaaattctcaccatggaattaatgattatgaaggcccttaagtggcgtttaagtcccctgactattgtgtcctggctgaatgtatacatgcaggttgcatatctaaatgacttacatgaagtgctactgccgcagtatccccagcaaatctttatacagattgcagagctgttggatctctgtgtcctggatgttgactgccttgaatttccttatggtatacttgctgcttcggccttgtatcatttctcgtcatctgaattgatgcaaaaggtttcagggtatcagtggtgcgacatagagaactgtgtcaagtggatggttccatttgccatggttataagggagacggggagctcaaaactgaagcacttcaggggcgtcgctgatgaagatgcacacaacatacagacccacagagacagcttggatttgctggacaaagcccgagcaaagaaagccatgttgtctgaacaaaatagggcttctcctctccccagtgggctcctcaccccgccacagagcggtaagaagcagagcagcgggccggaaatggcgtgaccaccccatccttctccaccaaagacagttgcgcgcctgctccacgttctcttctgtctgttgcagcggaggcgtgcgtttgcttttacagatatctgaatggaagagtgtttcttccacaacagaagtatttctgtggatggcatcaaacagggcaaagtgttttttattgaatgcttataggttttttttaaataagtgggtcaagtacaccagccacctccagacaccagtgcgtgctcccgatgctgctatggaaggtgctacttgacctaagggactcccacaacaacaaaagcttgaagctgtggagggccacggtggcgtggctctcctcgcaggtgttctgggctccgttgtaccaagtggagcaggtggttgcgggcaagcgttgtgcagagcccatagccagctgggcagggggctgccctctccacattatcagttgacagtgtacaatgcctttgatgaactgttttgtaagtgctgctatatctatccattttttaataaagataatactgtttttgagacagctggttttatgagctatgtctggtaacttaagttggcgtcgccacaccacacagtgccctcaacaaggccacctaagacctctgtgggacaaatctcacagtatgcgtctgccttcctctcccaaggcacctctgccacacttcgctctgctgacccctctttccctctggaaacttcagtgccagctcc

SEQ ID NO: 462843 - DNA, 1910 bp, Homo sapiens
tctttttggaagcactttcagaagtcatgcctagtatcttactgagttgcaggtgaatttgtaatgtttttgggtaatgtaagagctgtttgcatcttatctcacctctcctgtgtatttttcatttacagccttgggacaataatgcagtctgtgcagacccctgctccctgatccccacacctgacaaagaagatgatgaccgggtttacccaaactcaacgtgcaagcctcggattattgcaccatccagaggctccccgctgcctgtactgagctgggcaaatagagaggaagtctggaaaatcatgttaaacaaggaaaagacatacttaagggatcagcactttcttgagcaacaccctcttctgcagccaaaaatgcgagcaattcttctggattggttaatggaggtgtgtgaagtctataaacttcacagggagaccttttacttggcacaagatttctttgaccggtatatggcgacacaagaaaatgttgtaaaaactcttttacagcttattgggatttcatctttatttattgcagccaaacttgaggaaatctatcctccaaagttgcaccagtttgcgtatgtgacagatggagcttgttcaggagatgaaattctcaccatggaattaatgattatgaaggcccttaagtggcgtttaagtcccctgactattgtgtcctggctgaatgtatacatgcaggttgcatatctaaatgacttacatgaagtgctactgccgcagtatccccagcaaatctttatacagattgcagagctgttggatctctgtgtcctggatgttgactgccttgaatttccttatggtatacttgctgcttcggccttgtatcatttctcgtcatctgaattgatgcaaaaggtttcagggtatcagtggtgcgacatagagaactgtgtcaagtggatggttccatttgccatggttataagggagacggggagctcaaaactgaagcacttcaggggcgtcgctgatgaagatgcacacaacatacagacccacagagacagcttggatttgctggacaaagcccgagcaaagaaagccatgttgtctgaacaaaatagggcttctcctctccccagtgggctcctcaccccgccacagagcggtaagaagcagagcagcgggccggaaatggcgtgaccaccccatccttctccaccaaagacagttgcgcgcctgctccacgttctcttctgtctgttgcagcggaggcgtgcgtttgcttttacagatatctgaatggaagagtgtttcttccacaacagaagtatttctgtggatggcatcaaacagggcaaagtgttttttattgaatgcttataggttttttttaaataagtgggtcaagtacaccagccacctccagacaccagtgcgtgctcccgatgctgctatggaaggtgctacttgacctaagggactcccacaacaacaaaagcttgaagctgtggagggccacggtggcgtggctctcctcgcaggtgttctgggctccgttgtaccaagtggagcaggtggttgcgggcaagcgttgtgcagagcccatagccagctgggcagggggctgccctctccacattatcagttgacagtgtacaatgcctttgatgaactgttttgtaagtgctgctatatctatccattttttaataaagataatactgtttttgagacagctggttttatgagctatgtctggtaacttaagttggcgtcgccacaccacacagtgccctcaacaaggccacctaagacctctgtgggacaaatctcacagtatgcgtctgccttcctctcccaaggcacctctgccacacttcgctctgctgacccctctttccctctggaaacttcagtgccagctcc

SEQ ID NO: 462844 - DNA, 2007 bp, Homo sapiens
agcagccggcgcggccgccagcgcggtgtagggggcaggcgcggatcccgccaccgccgcgcgctcggcccgccgactcccggcgccgccgccgccactgccgtcgccgccgccgcctgccgggactggagcgcgccgtccgccgcggacaagaccctggcctcaggccggagcagccccatcatgccgagggagcgcagggagcgggatgcgaaggagcgggacaccatgaaggaggacggcggcgcggagttctcggctcgctccaggaagaggaaggcaaacgtgaccgtttttttgcaggatccagatgaagaaatggccaaaatcgacaggacggcgagggaccagtgtgggagccagccttgggacaataatgcagtctgtgcagacccctgctccctgatccccacacctgacaaagaagatgatgaccgggtttacccaaactcaacgtgcaagcctcggattattgcaccatccagaggctccccgctgcctgtactgagctgggcaaatagagaggaagtctggaaaatcatgttaaacaaggaaaagacatacttaagggatcagcactttcttgagcaacaccctcttctgcagccaaaaatgcgagcaattcttctggattggttaatggaggtgtgtgaagtctataaacttcacagggagaccttttacttggcacaagatttctttgaccggtatatggcgacacaagaaaatgttgtaaaaactcttttacagcttattgggatttcatctttatttattgcagccaaacttgaggaaatctatcctccaaagttgcaccagtttgcgtatgtgacagatggagcttgttcaggagatgaaattctcaccatggaattaatgattatgaagctgttggatctctgtgtcctggatgttgactgccttgaatttccttatggtatacttgctgcttcggccttgtatcatttctcgtcatctgaattgatgcaaaaggtttcagggtatcagtggtgcgacatagagaactgtgtcaagtggatggttccatttgccatggttataagggagacggggagctcaaaactgaagcacttcaggggcgtcgctgatgaagatgcacacaacatacagacccacagagacagcttggatttgctggacaaagcccgagcaaagaaagccatgttgtctgaacaaaatagggcttctcctctccccagtgggctcctcaccccgccacagagcggtaagaagcagagcagcgggccggaaatggcgtgaccaccccatccttctccaccaaagacagttgcgcgcctgctccacgttctcttctgtctgttgcagcggaggcgtgcgtttgcttttacagatatctgaatggaagagtgtttcttccacaacagaagtatttctgtggatggcatcaaacagggcaaagtgttttttattgaatgcttataggttttttttaaataagtgggtcaagtacaccagccacctccagacaccagtgcgtgctcccgatgctgctatggaaggtgctacttgacctaagggactcccacaacaacaaaagcttgaagctgtggagggccacggtggcgtggctctcctcgcaggtgttctgggctccgttgtaccaagtggagcaggtggttgcgggcaagcgttgtgcagagcccatagccagctgggcagggggctgccctctccacattatcagttgacagtgtacaatgcctttgatgaactgttttgtaagtgctgctatatctatccattttttaataaagataatactgtttttgagacagctggttttatgagctatgtctggtaacttaagttggcgtcgccacaccacacagtgccctcaacaaggccacctaagacctctgtgggacaaatctcacagtatgcgtctgccttcctctcccaaggcacctctgccacacttcgctctgctgacccctctttccctctggaaacttcagtgccagctcc

SEQ ID NO: 462845 - DNA, 2298 bp, Homo sapiens
tctaggaacatggcaggagcaagagcccaaagcttggagacaaaggcagtatggaagattgcggagaaccctggagaccaagacaagggttcttggttgaaatctgggctctgacactgacaagctgtgtgatcctgaatgcatcatctaggcggctcatagctgtaagagacctaaacctcaattcaacaatgaagaaactcattgcttcacagatccacagatccacaaatccaaaggaaaagttgtaccaggcagcctgtgagaacattttcaatagaaatgagtggaccaggaacaaattttattcctactcaatggctgtgttttctttggcagaagctagaccaagtttcacatcacagttgagaggagacgtgcataggaactgcgtcatctggttccacactcgctccagtgatgctggtttctgcctgtcccaaccctggccatggctgacaaggggcccagggacactggagcagagagacctgctggtccttggggtttcttgcaaggctgatagcgggggaacctctctcacagggctgctacaaagattgcatgagattttgctcaacaaatattagctgttggctccagagtttaatacctctgatcactacaagctttgaaggcaagataaaataacttcaacatagtgaatcatctgtgaacacttcctgtgaacgtgtgactatgattatggaacactctgttgcatcaagatggccagagattgtctcagagtccaggcagtgggaggaggggggatttgtttcctggctgggtggtcgtagggcatcaagggatgagcagctttggttgtctgggatttcagcagcttgaggggagctgtagggccccagagctgtcgctgtggctgtggtgtcagaaatgtaagcaaggtgcctccatggaggttagcgagggtgcccctctgaatgccgggtggaatgcaacctttcgcatggaggaggccctcagcagctgacctctgtcttccctgtgtagagggagggaggctgaggctggggctgagcgaggggtaaagtaagccacgtgtctcatcagctagcctgcagcaagcacagccctctgggagggctggttctatcctcctccttggtgtgaaatccatcaatctaatagggatccttattttcccagccaccaagtcacaatgagcaataatctcttcttgttggtgcatataaatttgcttcattcttttttaaacagctgccttgtgtcgccttttgcattcagcccaagtccagcctaggaggacagccttatcttaagtcactgagggaactagcttgcctaactgaaagggctttgccctggaaggagaagggtcttctggaaacataaaacgtttcaggggagggcagtcctgaatgagatggctctagggggtgggggacactggaccgcctgaaggtactgggcatctggcctgggcttttgaggaaatgcaaagccatgctatagatgatgctgagcaaaggcgggagagagacgtgggggtcctaccggggtcacttgaaaaccccttctccggcctcccccacgctaacccatctctcctggcacgcaagtctggaaaggccactggccctaaccatgctggctctgcgtccaccttcctcttcaattcaaatggcttggataaagccatgggttatgacgcttaacccatcactgtgggaaactggatgacttggggaacaaagccaaccttttgctgtctcccattccctttgcttttcccctccacccccacctccactgtaacctgctatggttagtctcctcctcttcctgctgcacccctcatcaccacctcttctgaaattgcaagcccccactcctgctcctctttcccactttgctctgctccttaacgcttattgctgacatgccctgtggctgattagttgctgactgtcacgccccatttgaagggggcagtgagggcagggatttcaatgtttcttcatggctgtatcttcagcaccttaaacagtgcctggctcatagtgggtgctcaataactgcttgttggttgaattaagccatgaatgaaaataaagtgcactgggccccacccaacctccccttcccatgaccagaaggggcctgggcacaggcaagggaagggtcagcattgagtatctaggctccaatgcatccccaggcaggtcatggcagcagctgttctgaagccatttcccctctcccccatggcagccccatggcatgtctggtggccatgtcttgacaagggccatc

SEQ ID NO: 462846 - DNA, 2103 bp, Homo sapiens
cacgcctgctcgtcctgctgctgccggggtggaggggcaccagctggagcgagctcctctgcttctcgggataaaaaggggagggccagactgcaggcagccgtggggagggcccctccttctgctcctcacccaccccatgatgtgcgggtggccaagcctcaggagctcggaagctactcagaaggtggctggcctgccctggttctacaggaggaggctcgaccagctgctgcagctgcttgcaaatgacaggcccgggattgatggccgtcgagttcaggggacctggactaacctcagcaccgctgctgctggctggcccgtcagctggtgcccaaacaccaagccaaagagctggaagcagtgcggccgtcacctgcccctgaagactgacgcgtccgacagcccgatattcttgacgcaggcctcagaggacccgctgctaccttcccaggaaaatgagaaagcgggcggggctgctggtttgcctccggaggcacacattggccctgggctctgcacactcaccggccccactggcagcagtgccttccaaaagggggtgcccccaactgccccacacatctgccctgtcctgcaggccatcaccaggactggcctgtgtgggagagggctttaaagtgaaataaatttaaccttttcatgggaataaatattaatgcccaataaaacctggagatcttattacttagtatcgccacagcaccggacgtgaagagctcttcactgctctgagactgctcccagggaggccagagagagatgctgaccccacccggatctccccaggaaaagcaacaagtgaggccctccccgcccttcccctgcatccacagcccacccagacctccccgggtaaagcaccgagtgaggccctccccgctatccccttgcatcccaacccatcaccagcatccattgcccacttgggttttttggagatcaaaataaactatcaaaaaaaaaacaaaaacctggtaagaaacagaggacagagaagatttttttttttttttttttgagacggagtcttgctcttgttgcccaggttggagcgcaatggcacaacctcggttcactgcaacttctgcctcctgggttcaaagtgagatcctgtcttgaagacaacaacaacaacaacaacaacaaaaacaaaaaagacaacgtagaaaacggaggtggggaagataaagtggaacactagttctgaaagcccaatagcgagtgatgggagtttgaaatagaaacaagaaagacaggagagcaaataatcaatgaaaccattcaagaaagtttaccagaatcatgggaaaggttggaaaagatggatggaaaggcccaaggaggggcaagtgacaaaaatcagacacgtatcaggtacccaatgaggggacttcaggacacttgggacacaaaaagggttcaataagcctccagaagggagaaaaacaggtcccacaccaaggatgaggaatcagaggagcatctttgtgccagcagcactgaatgagaaccacggatgggtgcagccttcgaagggacttcgatacccagccaaactatccgccacccagacagcagcttctcctgcacaagttcttctactttgttgcctaaccatcctgtggagtttttggtttcattttcaaattctgccctttccttatttctcaaggttctggaggctggaaagtccaagatcaaagcactggcagatttggtgtctgattacgccttctgagccataacgatcccatgcaaaatgcctgaaatccaatgaaactggagtgcttttgtaaactgtaataaaaaataaaataaaaaacatactgaatgccagaccttcctttaacatcatattgcaaaagaaatccgctccccagaggccgagtcccccctgctgttaatggggcttctactgaccatgtactacacatggaggctgccacggaggctacacactgaggaagccccttggccaccagccctggcccagctgggggctgtgtctgcctctgcctctgtgccctgccttgctctgcacttggacaagcacttttgaagcccctcctggtgggg

SEQ ID NO: 462847 - DNA, 1661 bp, Homo sapiens
ctaagcttcagcctttagggaggaaagacaaggggtgctcccagggaaggcttttcaagtccccaccttttcactccacaccactcatgccctggcatattcctctgctcaccctcacagtgtgagtgcatctccatccatgtgggccaggccggagtgcagatgggcaatgcctgctgggagctgtactgcctggagcacgacatccagcccagtggcaccatgcccagccacaaggccctggggagcagtgataactccttcaacaccttcttcagggagacccagcctggcaggcatgtgtcctgggctgtctgtggacctggagcctgctgtcatagcacaatgaagtcgctgtagagggaagggaccactgaaggtgccacctgctctccccgtctcaagcccaggcaggacctggccttagaagtgggtctctggtcgggaggctgaggcaggagaatcgcttgaacccgggagacagaggctgtggtgagccaagatcgcgtgattgcactccagcctgggcaacaagagtgaaactctgtctcaaaaaaaaaaaaagaaagaaaagaaaaagaagatgccgtgcatcatcactctgttgagcagttgtacctggggaggcttagcagcaaaggttctggtgtctggcgttcccttggggaatgaaccagcttgtcttacctttgtcctttcttcccctcaagatggggtaagaactgacatttataggcagctgttccaccctgaacagctgatatctggcgtggaagatgctgccaacaactgtgcccgtggccactacactgcggggaaggagatcatcgatttgactgccttcatggtagacgaggccatctatgatctctgctgccacaacctgcgccctacctataccaacctgaactggctcatcagccagattgtgtcctccatcactgcttccttgtgttttgatggtgccctcaacgtggacctcacagagttccagaccaatctggtgccctaccctcgcatccactttcccctggtgacctactcacccattatctcagctaagaaggcctaccatgagcagctctcagtggcagagatctccagtgtctactttgagccctccaatcagatggccaagtgtgaccctcgccacggcaagtacatggcctgctgcctgctctactgtggagaagtggtgcccaaggacgagaatgccaccattgccaccattaaaaccaagcaaatatttgttggcatcaactaccagtcccccacagtggtgcccgggggtgctgtagccaaggtgcagcgggcagtctgcgtgctaaacaataccacagccatcactgaggcctgggcccgcctcaaccaaaagtttgacctgatgtatgccaagcgggcatttatgcactgttatgtggacaggggcatggaggaagtccccatagtccccaaaagacaagggcctcaacctactgtgtcatttgtcttaattcgctaatagcgtggctctgacatgggtgtgtatccttacttgtgccccctttctttcgtgtaagcaagacaagtctcccttgctatagcggttgattttttctattttactccagagtctttctccaaagctgttcctaggagactgctaacctactggttcctct

SEQ ID NO: 462848 - DNA, 1722 bp, Homo sapiens
gatccgatctctgtccagctgcgacccaatgggagtccccgccaggagacacaaccggcggctctccggggatttataaggtcccgccagcaaccgcgcgttgggattcgtggtgttgctggagacccgtatggtgtctgcagtcagcgaccctccaacttcaactactggatcaaccatgtgtgagtgcatctccatccatgtgggccaggccggagtgcagatgggcaatgcctgctgggagctgtactgcctggagcacgacatccagcccagtggcaccatgcccagccacaaggccctggggagcagtgataactccttcaacaccttcttcagggagacccagcctggcaggcatgtgtcctgggctgtctgtggacctggagcctgctgtcatagcacaatgaagtcgctgtagagggaagggaccactgaaggtgccacctgctctccccgtctcaagcccaggcaggacctggccttagaagtgggtctctggtcgggaggctgaggcaggagaatcgcttgaacccgggagacagaggctgtggtgagccaagatcgcgtgattgcactccagcctgggcaacaagagtgaaactctgtctcaaaaaaaaaaaaagaaagaaaagaaaaagaagatgccgtgcatcatcactctgttgagcagttgtacctggggaggcttagcagcaaaggttctggtgtctggcgttcccttggggaatgaaccagcttgtcttacctttgtcctttcttcccctcaagatggggtaagaactgacatttataggcagctgttccaccctgaacagctgatatctggcgtggaagatgctgccaacaactgtgcccgtggccactacactgcggggaaggagatcatcgatttgactgccttcatggtagacgaggccatctatgatctctgctgccacaacctgcgccctacctataccaacctgaactggctcatcagccagattgtgtcctccatcactgcttccttgtgttttgatggtgccctcaacgtggacctcacagagttccagaccaatctggtgccctaccctcgcatccactttcccctggtgacctactcacccattatctcagctaagaaggcctaccatgagcagctctcagtggcagagatctccagtgtctactttgagccctccaatcagatggccaagtgtgaccctcgccacggcaagtacatggcctgctgcctgctctactgtggagaagtggtgcccaaggacgagaatgccaccattgccaccattaaaaccaagcaaatatttgttggcatcaactaccagtcccccacagtggtgcccgggggtgctgtagccaaggtgcagcgggcagtctgcgtgctaaacaataccacagccatcactgaggcctgggcccgcctcaaccaaaagtttgacctgatgtatgccaagcgggcatttatgcactgttatgtggacaggggcatggaggaagtccccatagtccccaaaagacaagggcctcaacctactgtgtcatttgtcttaattcgctaatagcgtggctctgacatgggtgtgtatccttacttgtgccccctttctttcgtgtaagcaagacaagtctcccttgctatagcggttgattttttctattttactccagagtctttctccaaagctgttcctaggagactgctaacctactggttcctct

SEQ ID NO: 462849 - DNA, 1497 bp, Homo sapiens
cctcccctgccccctcagcctgcgggcagcagaaggcggcggccagcctcctcctgcccctcggccggacgaaccgcggctgccgcgcctgtcacctctgcacctgcccggctgaggtgagatgcctggcgcgcaagaaaaatctgaaatttgaaacagaaatggccacataaggacaactcagatgaagtgcaggcgggctgacatcgcgcacttgggtctttccgggaaagacagccgcgctctgggagaagcctagtcctccggcttgtccccggacccgccccaaaggccgctgggagctcggtgaggacgtggcggtccccttgctcatctgactccggaggcaggttccgcagaaagagctctcaatctcggccgctgggctccaagataatctcctggcgaaagctaagaggcggccatcccttcccggggactcagcccctagattcagcttcttccgccgcaaaaaactcccaagccctgcgaactcgcaacttgcctctccaggcttccggcgtgggcgtcccagctacactttcgagcactttgcttggccggcatctacccgctcttcgattaaggaaagcgcagtggggacagaggcaactcctgcctcctgtaccaggcctacgtagtcgcccaggtggccgggtcacaaataaacaattccaccatcaagaaacccgctaacctctgtaccccgctaacctctgaaaacctaatactgatccaggtctcccaaataatctgaatctcccccagtccttccggtggaacagctagcctgagcgcagggaaaattgacaaggagccttcagctagccttctagctttgagcttgagtaggggcatggctacttggtggcttctttgcggtttattggtgtatttggtgactctacagatccagatcagcccccaccccactcttcctcaccacgcctccccacccccaccccaccaccgcaagttggtgtctctagaagagcctcagggttctgagtcccgggggcggacatggttgagagttactagggaggacaggagggagatccaggagcagcacagagcaaacgcctgggcaacacctgcaccaaggaaacctgggcaacaccacctcacctcaacaagagttttaatgcagcatttgcacagagcaagacggccagtgagactggatttgccatcaagggagagaaaaagtagcctgagaaaagaggctgccaacattccactgagaagtccaaaatggggaaaaggcaaaaataaagaggggaggtcttcttgcatttcaccctcttcccttccctttctggatcccacaggaagcggtggtgaagccaccaaagctgactggcacccagagagaaggctgaccaagggctggtctgaggcgggcaatggggatcctgatgagcagaataagagcttagcagcatgatcccagttgattgcccatagccctaggtgactgcctccaggttgccttcc

SEQ ID NO: 462850 - DNA, 2822 bp, Homo sapiens
ttgggaggccaagacgggcggatcatgaggtcaggaaattgagaccatcctggctaacacggtgaaacccgtctgtactaaaaatacaaaaaattcgccgggcgtgttggcgggcgcttatagtcccagctactagggaggctgaggcaggagaatggagtgaacccgggaggcagagcttgcagtgagcggagatcgcgccactgcactccagcctgagggacagagtgagacctggtctcaaaaacactcctaatttcaacatcaatttccttgtgaatctatcttatttttgtgtgtcagaaacacttttggatttgaagataatttcaaaacaatactaactctgtatttttttaaggtattattgtttacttatgtttatgtgttttcattttgcccaagacctttgtccagagcagagcctaaaagattccttccaaaaagtgatagtgacaagatatgaaaaacgtgaatatggcaatttagagttaaaaaaaggttgtgaaagtgtggatgagggtaaagtacacaaaagaggttataatggacttaaccaatgtttgacagctacccagagcaaagtatttcaatgtgatacatatgtgaaagtctctcatatattttcaaattcaaacagacataagataagagatactggaaaaaaacctttcaaatgtatagaatgtggcaaagctttcaaccagtcctcaacccttgctacacataagaaaattcatactggagagataacctgcaaatgtgaagaatgtggcaaagccttcaacaggtcctcacaccttacttcacataagagaattcatactggagagaaacggtacaaatgtgaagattgtggcaaagaattaaagtattcctctacccttactgcacataagagaattcatactggagagaaacggtacaaatgtgaagattgtggcaaagaattaaagtattcctctacccttactgcacataagagaattcatactggagagaaaccctacaagtgtgataaatgtggcagagcatttatttcatcctcgatcctttatgtacataagataagtcatactgaagagaaaccctacaaatgtgaagaatgtggcaaagccttcaagctctcctcaatccttagtacacataagagaatccatactggagagaaaccctacaaatgtgaagaatgtggcaaagccttcaggcgctccttagtccttcgtacacataagagaattcatactggagagaaaccctacaagtgtgataaatgtggcaaagcatttatttcatcctcactcctttataaacataagataagtcatagtgaaaagaaaccctacaaatgtgaagaatgtggcaaagccttcaagcgctcctcaacacttactatacataagataagtcatactgaagagaaaccctacaaatgtcaagaatgtgacaaagtcttcaaacgctcctcagcccttagcacacataagataattcatagtggagagaaaccctacaaatgtgaagaatgtggcaaagccttcaagcgctcctcaaaccttactacacataagataagtcatactgaagagaaactctacaaatgtcaagaatgtgacaaagccttcaagtactcctcagcccttagcacacataagataattcacagtggagagaatccctacaaatgtgaagaatgtggcaaagccttcaagcgctcctcagtccttagtaaacataagataattcatactggagcgaaaccctacaaatgtgaagaatgtggcaaagcctttaagcgctcctcacagcttactagtcataagataagtcatactggagagaaaccctacaaatgtgaagaatgtggcaaagcttttaacttgtcctcagaccttaatacacataagaggattcatattggacagaaagcctacatagtgaagaacatggcaaatctttgaaatattcctcaacccttaataaacataagataattcatactggagagaaaccgtataaatgtgatgactgttggaaagcctttgaccacccctctactcttactaaatatgagaatttatatgaaacataactcctacaaaaataaagaatgtgacaaatcattttaaggaagttctcaacccttactacacataattcatactggacggaaactctacaggtgtgaaaaatgcagcaaagcctataacaagttctcaattctttttttttttttttaagaaggagtttcatgcttctcacccagcctggagtgcaatggcacgatctctgctcactgcaacctcttcctcctggttcaagccattaacctgcttcagcctccaccaccatgcccaactaatttttgtatttttggtagagacagggttttgccatatttaacaggctggtctccaactgtgattcacacaccttggcctcctaaaatgctgggattacagtcatgagcatccatgcccagccacaagttctcagttcttaagagacatggtgataattcatgctgaagaggaactttacaaacttgaaagatgtgacagtgcttttaccaccacctccaacttttctgtacataaagatgattatactagtgtgaaaccctagaaataatagaaaatttgacaaatcctttatatggttgcaagacttgattgtagaagaaaagcacaattattgaaacaaaacaacttattttaatttggtgaataacagaaaacaccttcaaaatgttgaaagcaaatctacactttctgctttgtattgaatttattaatgtaaaattttatagcttatgtttcaaa

SEQ ID NO: 462851 - DNA, 3070 bp, Homo sapiens
agagcagcaaccaccgtagcaccagctcccgagctcctttgcaagctccatcaacagctccagctccagggctaaggcagtcccagcaagagcaccagatccagccatgcagccactgcaggctctggccccaactccagctccagagcccaagccagttccagctccaggtcttgagacaacaacagaacctgctgctgactgccctggaggagacgactatacgctgaaagcttatgggaccttgcaggtccatgctggcaaaagcctgggcagcaggagtgggagtcgcattggcaagggaggcgccagcgtctttgaagagccctgtgcatggctgtcctttacacagtatgccacacagtatgccacgggggcaggatgggaattagagagtgtgacccacaaggatacgtggtgtggggtgaagacgctgagagcagcaaacagtgtgaaaaccaaaacttcagcgcacatgggctttcctcaaagtgtgacagtggaaccgaatgcatggagtccgaacacggctggaaaatccagacctagacagtcacaatggcttagtgaggaaataccatttaaatcagtgaaagctcagcaggcctcacttagggtggccgtccacttttccaccttgcccagagaccacctgctgaactcctgggcacaggtcattcctttccactttgatccctggatcaaaggtgccggggcccgcagaggcaaggttgaatctttccacgcctctgcccggtgtccactctggctgtgcttgaggagcccttcagcctgctactgcactgtgggagcccttctctgggctggccgaggccgcagccagctccctctgcttgtagggaggtgtagagggagaggtgtgggccggaaccggagctgtgcagggcgcttgcgggcagcacgagttccaggtggtcgccggcttggtgggccctgcactcggagcggccagccagcactgctggccttggacagtgaggggcttagcacccgggccaagagctgcggagggtgcactgggtcccccagcactgccgacctgccagtgccgtgctttaattctcgccaggcctcagctcagccgcctccccagggggcagggcttgggacctgcagctcgccatgcctgagctcccccgcccgccatgggctcccgcttgacccgagcctccctgacgggcactgccccctgctccgtggtgcctggtcccatcgaccgcccaagggctgaggagtaagggcacgtggggcgggactggtaggcagctcccctagctccccgtgcaggatccactaggttaagtcagctgggcttctgagtctggtggggacttggagaacttttatgtctagctaaaggtgtgtaaatgcaccaatcagcaccctgtgtctagctcaaggtttgtaaacgcaccaatcagtgctctgtgtccagctcaaggtttgtaaatgcaccaatcagtgctctgtgtctagctaatctagtggggacttggagaacttttgtgtctagctaaagaattgtaaatgcaccagtcagtgctctgtgtctagcttaaggtttgcaaacacaccagtcagcaccctgtcaaaatggaccaatcagctctctgaaaaatgggccaatcagctctctgtaaaatggaccaatcagcaggatgtgggtgggagatttctgatttctcagatatttcccaatagcgaattggcaaatgattggtgtcaaaataggcagaataaaaacttgggggttggagatgtgagttgaaatgtcaggaacatctctcactggcagccttgccttcgacaactctctttcccttttgttgcaagattgagttagtaattctactcttataaaccacggctaaaatactctcttcagaaacactgctaaagacagcgagcgtctctgtaattcaaggctctcattccaacgtgattctcatcattatcctccatataactgaaatgaaaaccaatcttttacagactgttcctatgaaggatccttctgccttttcataacctgtgtgctgttgtttaattctcatggagaatgacaagttccactaaaatatgcacatggcatctccaagaaacagaagcaagaattaaagtgaaggggtggtaggcaaaaaaggccaagaatgaccatgattagaccaaggaacttccacttccaagccgtagctggctgcatcctcttcatgactcttgggaaaatattttctgtggagtctaaaagaaacaaaaatacacctgaaaagaaaaaaaggtaagcattccttacaaaagagaaaatttcccttccatgttatgtgtctacagacaaatatttttcttcacatgcacttttggagtaaggactatatgcgtagctatagtttacacctgtatatactcaggaagtatttggattatgatggtatgatgatagttgttaaagaaagttcttttgcatgtgaaaaagaaagggaagacaaggcaaacagcagtctgttcagcattatcctttcaatgaattctacccttttatacaataaaaagctgtggctgtattataggccctgggttaaataaaagcaaaccacactctttgttcaataatagttttatttacttatttcactgttaacttggggataatattcaccacaaagttgcaggcatcattttatagtacagactacagacgattgactttttcaagattaaaaatgaacatggtttgtgacacacctgaaatgcctactgaggaagtgctggccacgaggtaataaaaaaaggtaaaattcagtgcctttggcaaagatgtggacactgttttagatgcgagtatgatacatgccctttgcttacaaagcaaatatacacccatctgtttttggactgcggtttctctatccaccagagagcatctttaaatgattcacagacatttccctgagagcttcctgccaagagaaatcagcatgctgattcaccatcgtggaagcccatttttatgtaattattcctcagtaggccttcaggtgtgtcacaaacg

SEQ ID NO: 462852 - DNA, 3133 bp, Homo sapiens
agagcagcaaccaccgtagcaccagctcccgagctcctttgcaagctccatcaacagctccagctccagggctaaggcagtcccagcaagagcaccagatccagccatgcagccactgcaggctctggccccaactccagctccagagcccaagccagttccagctccaggtcttgagacaacaacagaacctgctgctgactgccctggaggagacgactatacgctgaaagcttatgggaccttgcaggtccatgctggcaaaagcctgggcagcaggagtgggagtcgcattggcaagggaggcgccagcgtctttgaagagccctgtgcatggctgtcctttacacagtatgccacacagtatgccacgggggcaggatgggaattagagagtgtgacccacaaggatacgtggtgtggggtgaagacgctgagagcagcaaacagtgtgaaaaccaaaacttcagcgcacatgggctttcctcaaagtgtgacagtggaaccgaatgcatggagtccgaacacggctggaaaatccagacctagacagtcacaatggcttagtgaggaaataccatttaaatcagtgaaagctcagcaggcctcacttagggtggccgtccacttttccaccttgcccagagaccacctgctgaactcctgggcacaggtcattcctttccactttgatccctggatcaaaggtgccggggcccgcagaggcaaggttgaatctttccacgcctctgcccggtgtccactctggctgtgcttgaggagcccttcagcctgctactgcactgtgggagcccttctctgggctggccgaggccgcagccagctccctctgcttgtagggaggtgtagagggagaggtgtgggccggaaccggagctgtgcagggcgcttgcgggcagcacgagttccaggtggtcgccggcttggtgggccctgcactcggagcggccagccagcactgctggccttggacagtgaggggcttagcacccgggccaagagctgcggagggtgcactgggtcccccagcactgccgacctgccagtgccgtgctttaattctcgccaggcctcagctcagccgcctccccagggggcagggcttgggacctgcagctcgccatgcctgagctcccccgcccgccatgggctcccgcttgacccgagcctccctgacgggcactgccccctgctccgtggtgcctggtcccatcgaccgcccaagggctgaggagtaagggcacgtggggcgggactggtaggcagctcccctagctccccgtgcaggatccactaggttaagtcagctgggcttctgagtctggtggggacttggagaacttttatgtctagctaaaggtgtgtaaatgcaccaatcagcaccctgtgtctagctcaaggtttgtaaacgcaccaatcagtgctctgtgtccagctcaaggtttgtaaatgcaccaatcagtgctctgtgtctagctaatctagtggggacttggagaacttttgtgtctagctaaagaattgtaaatgcaccagtcagtgctctgtgtctagcttaaggtttgcaaacacaccagtcagcaccctgtcaaaatggaccaatcagctctctgaaaaatgggccaatcagctctctgtaaaatggaccaatcagcaggatgtgggtgggagatttctgatttctcagatatttcccaatagcgaattggcaaatgattggtgtcaaaataggcagaataaaaacttgggggttggagatgtgagttgaaatgtcaggaacatctctcactggcagccttgccttcgacaactctctttcccttttgttgcaagattgagttagtaattctactcttataaaccacggctaaaatactctcttcagaaacactgctaaagacagcgagcgtctctgtaattcaaggctctcattccaacgtgattctcatcattatcctccatataactgaaatgaaaaccaatcttttacagactgttcctatgaaggatccttctgccttttcataacctgtgtgctgttgtttaattctcatggagaatgacaagttccactaaaatatgcacatggcatctccaagaaacagaagcaagaattaaagtgaaggggtggtaggcaaaaaaggccaagaatgaccatgattagaccaaggaacttccacttccaagccgtagctggctgcatcctcttcatgactcttgggaaaatattttctgtggagtctaaaagaaacaaaaatacacctgaaaagaaaaaaaggtaagcattccttacaaaagagaaaatttcccttccatgttatgtgtctacagacaaatatttttcttcacatgcacttttggagtaaggactatatgcgtagctatagtttacacctgtatatactcaggaagtatttggattatgatggtatgatgatagttgttaaagaaagttcttttgcatgtgaaaaagaaagggaagacaaggcaaacagcagtctgttcagcattatcctttcaatgaattctacccttttatacaataaaaagctgtggctgtattataggccctgggttaaataaaagcaaaccacactctttgttcaataatagttttatttacttatttcactgttaacttggggataatattcaccacaaagttgcaggcatcattttatagtacagactacagacgattgactttttcaagattaaaaatgaacatggtttgtgacacacctgaaatgcctactgaggaagtgctggccacgaggtaataaaaaaaggtaaaattcagtgcctttggcaaagatgtggacactgttttagatgcgagtatgatacatgccctttgcttacaaagcaaatatacacccatctgtttttggactgcggtttctctatccaccagagagcatctttaaatgattcacagacatttccctgagagcttcctgccaagagaaatcagcatgctgattcaccatcgtggaagcccatttttatgtaattattcctcaagcctgcaccaaacttggtaacagttcctatatttaaaagaaagaagggctttgcccaaactgtggccatcacatagctctaagcagac

SEQ ID NO: 462853 - DNA, 982 bp, Homo sapiens
agaaagaaatattttgggtgcatttcatagtcccataatgttttataatagatttgttgaaacagaattcatataccacgaaattcattcttttaaagtgagcaattcagtggtttttagtatattcacaaaattgtgcgccatcaccactaattccagaacactttcatcacacccaaaagaaaccctttatccattagcagttactccccattccaccctcccaccttcacccaccactccagcccctgactcagcccacctgcacacaagtgaaataaacagccatgttgctcacacaaagcctgtttggtggtctcttcacatggacgcgcataaaatttggtgccatgactcggattggcggacctcccttgggagatcaatcccctgtcctcctgttctttgctccatgaaaaagatccacctatgacctcaggtcctcagacccaccagcccaaggaacatctcaccaattttaaatccgatcttctcagcttagcggctgaagactgacgctgcccgattgattgcctgggaagcctcctggaccatcacagacgccttgggtaactcttacagtggaggacaggaatgtcaggccggcctctgagcccaagcatgcatgtatacatccagatggcctgaggcaactgaagaaccacaaaagaagtgaaaatggctagttcctgccttaactgatgacattaccttgtgacattccttctccgggacagtgagtctccggagctccccactgagcaccttgtgacccccgcccctgcccgcaagagaacaaccccctttaactgtaattttccaccacctacccaaatcctaaaaaacggccccactcctatctcccttgctgactcctttttcggactcagccaacctgcacccaggtgattaaaaagctttatttctcacccaaagcctgttggtggtctcttcacacggatgcgcatgacagtgattatat

SEQ ID NO: 462854 - DNA, 1021 bp, Homo sapiens
cgcctttcatctgcatgctcacagctccagactgatggcaaatggagagatttacaggtcagaatgaccaggttcaaatccaagctttaccactacttattaactgtgtgactctagaaaactttcctaaattctctgagccttattttcttcatttggaaaatgggaatagtcatattctctatagacatattcatctcactggattgttgagcactaaagagatagctaagactgtttcaggaagccaagttcagggaaatgacactggaactgggttctcaagtataattaagagtccactggtgggtaatggaagaagccgcttctcgggaggagaagaaaaaggctttgcaaaggcctaccagacaaaaagcatggctttaacacctgtacatgttggtgtggctgcggaatgggaaaaggccactgagttccagtcccaggtgcacggctgaccatgtgatcaagagcccttcccttgttatctttgaagactcaggttctcagttctaccggtcagactccaggtcttatatcttgaaactgtaagtccctgaattcacagacaattcagagtaaggatggaggcaaagaagaggaccttgggtttactgttcacgagatgacctcataaaggtgttcagtgatgaagaggagtggctgaagagatggctgtctagagtcaacacaaacctaccccaaagtttgacctttgccttaagtcagtaactgaggagggccacggtcctgagttcagtccagaccccaggaagattcagagcctgcagttgtcctctggtttctaaagtatgttattgggctaaagatttcaagacatttatccttctttgctttctatcgcagccattaaatgttttagatattttctgccagaaggcaggaatcatgaagataacaaatattaaagacaaaaccaaataacttttaatgagaaggtcagtccgtggtttgagtctttggaaagaaatcaagaactctgactatacttgctatttga

SEQ ID NO: 462855 - DNA, 982 bp, Homo sapiens
cgcctttcatctgcatgctcacagctccagactgatggcaaatggagagatttacaggtcagaatgaccaggttcaaatccaagctttaccactacttattaactgtgtgactctagaaaactttcctaaattctctgagccttattttcttcatttggaaaatgggaatagtcatattctctatagacatattcatctcactggattgttgagcactaaagagatagctaagactgtttcaggaagccaagttcagggaaatgacactggaactgggttctcaagtataattaagagtccactggtgggtaatggaagaagccgcttctcgggaggagaagaaaaaggctttgcaaaggcctaccagacaaaaagcatggctttaacacctgtacatgttggtgtggctgcggaatgggaaaaggccactgagttccagtcccaggtgcacggctgaccatgtgatcaagagcccttcccttgttatctttgaagactcaggttctcagttctaccggtcagactccaggtcttatatcttgaaactgtaagtccctgaattcacagacaattcagagtaaggatggaggcaaagaagaggaccttgggtttactgttcacgagatgacctcataaaggtgttcagtgatgaagaggagtggctgaagagagcttcagcaagcaaccactaggataatgttaaagatcttcagtggtaagaagacaaggagcaaagatttttatcttactttgtgattttcataattaaaaaagaaagaaaggaaagagacgaggtcttgccacattgctcaggctggtcttgaactcctggactcaagcaattcttccactgtagcctcctgaggtggcaggattacagcataagccaccatgcctggcctcagtcacactttggaaaagaagactatggatctacatgttcattttgtggtcgaattataaccaacacgccactctatc

SEQ ID NO: 462856 - DNA, 997 bp, Homo sapiens
cttagctgcctcacctgcaaaatgcaaggatgtgacccactgaattctatggttcctactgaactaaaaatatttggtatccaagggtgtcagaggtgtcctcggagacgtagagtgaagaaccacccagtaggacacaagggagaccaaagtaagcaagagaagtcaaagcagggggtgattctgggaaatacctggggccagtttggaatcacggcttttgtcccctctccgagaatgaataatcaccaagaaaagagaggccgtgcagtcaccgtgggccctgagacagccttcaggatggaaaccagctatgaagatgctggggcagaaagattcatgctggctgactgccttggggggccatccaggagcagcagggagcccacctccagagctcctttattggagaaagaaataactctttctctctcttctctgtggtgctgttattctgggttttctgctatgtgtaggcaaaactaatcctaaccaagataccagcttttcattgaatctgtgtgtgaacttgaaccagacgattttttctctggaacttatttcctctacacaagaggcaggggtgtgggtgctttgtgtaattctgaagatccggagctttttcctggcccacatccatgttcacttctaattgttatagtgcctacattaccatttagggaactagccactccctgcaattccatatggttaagtgaggctaataccactttctggctgcaggggacaggacaggtgggaacagatgttggaggaaccattggtgccttgagcatgttctgtgcagggggtctcccgtgtttgccctgtctgcatcccacgtgggccccgtgtgtgtgagcattgacagtaggcacagctgctcgggaaagggtccacctgtgtcttccccaggaagacagtcccaactggaccttgattcaccatcctgcctgaccatcccctgtggaactgttagctctcagcatccacacat

SEQ ID NO: 462857 - DNA, 1216 bp, Homo sapiens
ggggagggaagagtggggtccgccattcctaggtgcttcttgagcaagcaccccacagttcccaagtggaaaaggtttttgttgttgttgcttcgttggtttgttttcagaatgggagttaaaaaccaaacaaaaggccaagcgcagtgactcatgcctctaatcccagcatttagggaggccgaggtagggttgcatgattccagaggttcaagaccggcctgggcaacatagtgagaccccattctccacaaaaagggggaaacaagacaaaaacacaaaaactgtgaagacccccaaagcctggcccccttcctccctgctgagcaggtgaggcagtgctggaaagaggacagagtggaaggtcctggaagcccagcccagcattgctgagcgcctgccgtgtgcaggggaggggtcctagcccctgggtctgccagggagaggaatggccccgcagccgaagcccagggagccctgggagccggcgcctaattgttttgttgacgcggctgccgagcacttccagtaggtttcctaatgaactggtttgttatcggcctcactgcagcgctgataattacatcagaaacagggggcccactcgtccttcccacgcgttctgtgagccatcagcgcagatgcgggcgcctctgccccttcctcggtgctgacccccggcaggccctgatcccatatgtgaatcatgcactgatgacagctgctaccaccctgcttcagaaaagctcctctgtgcaggtcatcgccgtcaccacagacagtcctgtcaccgtgcagctgatgcgtcctgtggagggtggcgcctgttgccgcggtgcccccggcggtgtcggtggtgcgtgttgccatggcgcctgcctggtggaggaagtgtcccgcggtgcccccggcggtgtcggtggcgcgtgttgccatggcgcctgcctggtggaggaagtgtcccgcggtgcccccggcggtgtcggtggcgcgtgttgccgtggcgcctgcctggtggaggaggtgtcccgcggtgcccccggcggtgtcggtggtgcgtgttgccgtggcgcctgcctggtggaggaagtgtccctccgtttctggatttgccttaatagctcagagaaggctgagggaaacctgtgagtgattgtaaacatcccatgctagggaagggcttgtgaggccacacagggtggcttccaccagaatc

SEQ ID NO: 462858 - DNA, 1196 bp, Homo sapiens
gctcgcagccatgccgtccaagggcccgctgcaatcggtgcaagtcttcggacgcaagaagacagccacagctgtggcgcactgcagacgcggcaatggtctcatcaaggtgaacgggcagcccctggagatgactgagccgcgcatgctacaatacgagctgctggagccagttctgcttcttggcaaggagcgatttgctggtgtggacatccgtgtccgtgtgaagggtggtgctcatgtggcccagatttatgctatccgtcagtccacctccaaagccctggtggcctattaccagaaatatgtggatgaggcttccaagaaggagatcaaagacatcctcatccagtatgaccggaccctgctggtagctgatccccgtcgctgcaagtccaaaaagtttggaggtcctggtgcccgtgcttgctaccagaaatcctaccgataagcccatcatgactatcaaaattcacctgtataataaacagtttttgagggattttaaagtttccaggaaaaaaaaagttcattagctttttatgaaggatttatccttttttttcagtgtgctgtttattgctgagaagtggctgccctgccagaaaactgctattctcagctgtaaccacattgactaatagtgagtggaagtgcagtggataaaaagcaaatgtgtcttctctgtatcttttttcatttattggctgaagaacaggaggatgcggaagatggaagaaaatataatctctgaaagataatgaagaagctctcctaaatagaagaaaacctcataggggatttttttttcatcattttactctctgcttctatgcgtttaaattttttttttttttttttgagacagtctcgctctgttgaccaggccagagtgcagcggcatgatcccgactaactgctccctccacctcctgggttcaagcgattctgcctcagccttctgagtagctgggattacaggtgtgtgccaccacgcctgactaatttttgcatttttagttgtggtgcggtttcctcatgttggtgaggctggtctcgagctcctggcctcgtgatttgttcaccttggccttccaaagtgctgggattacgtgcatgagcccctgcacctgatggagtctcattctgtcgctcaagctgaagggcagtgccgtgatcttgacccactgcaacct

SEQ ID NO: 462859 - DNA, 2287 bp, Homo sapiens
tgcccccttccctgtgcatctctccagggcctggtacgatacccaacacatagcagagactgctatggagctgccccctgaggcctctaaggcccccttcactcatagcgtctacctgctcaaagggccctttagctcactcaccttccccgaggactggatgcccttaacgacagccatccccacgatgctccaggccacgaggaggcacagggtcatcttccagttgaggcccccactctccgagatggagtcagagatgtccaaggcctctcggtaccagaaaggcctggctgtctcctgcatcagtgagactggcgccagtgtgagagctgagggccgcttgcttcatcagtctcacctgagcacatgtgtgcaggagcagctgctcatagagcagacccttctgggagcacagacagacacacagccagccccagcagaatacacggcattggccagtgcaaagctgatggctgactgcctgccccagcccttgactcactatgcagctggagaagccgatgccccccaggcggggacatatatagtgccacacaccgatgctgccgcggcggatcctctgacccacagccagctccaggaagaagagggggatcccgatgatgatcagcagcaccagtcccggtgctcctccatgaatgatgtggccatacgtgtggcctaccacacagcagcccacccagaccctccttctcccccttgactcccctgacccgaaacactaagggaggaagtgtatggtagttctttatgtctggtgccatggtgattggtgtcactgtgaacaatcagactgtggcaagaacactgccctgggtggaaagatgcatcctggagaggaggggactgcgtctttggaaaaggttacatggcaagagttccacaagcaaggaaggaaggactggggtaaaatgcctgccaagctggggccacccaacaggctggagcatgccatgccaggcacagggactcaggagcacaagagctcttgctagttgactttcccaggaccagaggtaggggaacctccagatgttgccgaggcccacagagaagccaatctgggccaggatgtactgcagcttactgttccaggccggccggtcctctgcatccagctcctcctccaccgccttctgcttgccgcctgcctcaccagccacattcagtacactctgcttatagtccacaggctcctcgagggccagcaggtcggccacggactcagtgacatgctcactgctgtgctcacgctgggtcactttgctgttcttcggcattgatgccacctgggccgtgtagccctgctccccagcacacagagaagatggaattcagctgctgtcagctccttctcattcagggacctaggaaaccaggtgagcagtaaaggattatctgaccacaccaggaaggtgaggagcccaacgtggacacaacccaaattaactccccatcacactgtgaggcaggtcaagggcctcatatatgcagcttgccctagctccccatcaggggctgcccggtgaggagctcaaggcctacagactcagtttctccagaggcttgacccgagcattatttgaaaagtaaacctaaaggggcaaaataggcaaagccatactccgaacccaagtagagcattatccgtgaagacatttccctcttccatactgcagagcttagagtgctcaagcccctttggaggcccatacagccttccccttccaggtgttctgcttagccaaaaccacatggcggaagccacggaagccagcgccttccttccttagggccttttcattcaaaatgcagggattgcaccaggaactggttagaaaggggcatcttaggctcgcaccagacctcctgaatcaatctctgcctttttacaggatccccaggtgatttaaaaaaaaaaaaaaggctcttgagccatcaccagggggcccctggacaccagtgccgatggcatctccattcccctagctggactggttgaccaggctcagctaaagattctggcaccagaagccaagggctgtttgctcagtgccaatgaatcttgggtcattgctcagcactgacattatctgaggacttctgcagccaagagctggttctccatccttcagcgacagttttacagcagataatgtctgcacgacatgggcggaggaggcaaaaccctcccctactcctgccagtcctcatttgtctttcatgctttcccttaaagaaataaagcaccaagaaaacgaag

SEQ ID NO: 462860 - DNA, 8092 bp, Homo sapiens
aactgggcttttctgatgaacaaatccttacagtgaagacttctggcagtgggaccccatctgggagttcagcagattcttcaaccagctccagcagcagcagcagtggggtttttagttcttcatatgccatggagcaggagaaatccctccctggtgtagtgatggctctcgtatgtaacgtatttgacatgctttatcagctcgccaatctggaagagccaaggataactctacgagtacggaagcttctgctcttgatacccactgatccagccattcaggaagcccttgatcaacttgattctttaggaagaaagaaagaagtaggcataccatttcctctgggtgaggtaggcatggacaccagctcaaagcatgagcagaggatggttgaaggaattcctgaggggaggtctggcacagagaagctgggtagggaccttgaggaggtcgaggggatgggaaatagggaaatgatggcaaaaaggattcccaagtaccgtagaagaggagcagccagcgcacacccatgcgtggggacctgcctggtgccggcagaggccacaggaggccagtgtgatgaagacctcaccaaagatggtatagaagcactttcttcccgcccattccgaaatgtcagccggcagacaagcagacagatgtccttatgtggtaccccagaaaagtcatcctaccgacagttgtccgtgtctgataggtcttctattagggttgaggaaatcatccctgctgctcgagttgcaatacaaacaatggaagtaagtgatttcacttctactgtggcttgcttcatgagattgtcatgggctgcggctgcaggacggcttgatcttgttgggagtagccagccaattaaagaaagtaattccctgtgtcctgctggaattcgaaacagactcagcagttcaggaagcaattgcagctctggaagtgaaggagaaccagtagccctgcatgcgggaatctgtgttcgacaacagtctgtatccaccaaagactcgctgattgcgggagaggctttgtctcttcttgttacgtgcctacagcttcggagccagcaactggcatctttctataacttgccctgtgttgctgatttcatcattgatattctgctcggatcaccaagtgctgagattcgccgggttgcctgtgatcagctgtacactcttagtcagacagacacatcagcgcatccagatgtgcagaagccaaatcagtttcttctaggcgtaatcctcacggctcagctgcctctctggtctccaactagtattatgagaggagtcaatcagagactgttatctcagtgtatggagtattttgatttgagatgccagttattagatgatctgacaacttcagaaatggagcagttaaggatcagcccagctacgatgcttgaagatgagattacttggctggataactttgaacctaatcgtacagctgaatgtgagaccagtgaagcggacaacatcttactggcagggcacttacgcctcatcaagacccttctttcactctgtggggcagaaaaggaaatgcttggttcatcactcattaaaccattgttagatgacttccttttccgagcttctagaattattttaaatagtcattctccagctggcagtgccgccatcagtcaacaggactttcatccaaagtgtagtacagcgaatagccgattggcagcctatgaagtccttgtgatgttggctgatagttcaccttcaaatcttcaaattattataaaagaactgctttctatgcatcaccagcctgaccctgctcttaccaaggagtttgattaccttcccccagtggatagcaggtccagttcagggtttgtggggctgagaaatggtggtgcaacttgttatatgaatgcatcattactttcagtggatgatgacacagacaatccagatgatagcgtgttttaccaagtgcagtctctctttggacatttaatggaaagcaagctgcagtactatgtacctgagaatttttggaagattttcaagatgtggaataaagaactttatgtgagagaacagcaggatgcatatgaattctttactagtctcattgatcagatggatgaatacctcaagaaaatggggagagaccaaatttttaagaatacatttcagggcatctactctgatcagaagatctgtaaagactgtcctcacagatatgagcgtgaagaagctttcatggctctcaatctaggagtgacttcttgtcagagtttggaaatttctttggaccaatttgttagaggagaagttctagaaggaagtaatgcgtactactgtgaaaagtgtaaagaaaagtttccctggatgctaaacatggagccttacacagtttcaggaatggctcgccaagattcttcttctgaagttggggaaaatgggcgaagtgtggatcagggcggtggaggatccccacgaaaaaaggttgccctcacagaaaactatgaacttgtcggtgtcatcgtacacagtgggcaggcacacgcaggccactactattccttcattaaggacaggcgagggtgtggaaaaggaaagtggtataaatttaatgacacagttatagaagaatttgacctaaatgacgagaccctggagtatgaatgctttggaggagaatatagaccaaaagtttatgatcaaaattgtcaagacaagaaaaacttttatttacagatgtgtttcttaatgtcttgttataaagcaaacccatacactgatgtgcgccgaagatactggaatgcctatatgcttttctaccaaagggtgtctgatcagaactccccagtattaccaaagaaaagtcgagtcagcgttgtacggcaggaagctgaggatctctctctgtcagctccatcttcaccagaaatttcacctcagtcatcccctcggccccataggccgaacaatgaccggctgtctattcttaccaagctggttaaaaaaggcgagaagaaaggactgtttgtggagaaaatgcctgctcgaatataccagactaaattaaagcatccatattatccttgcatggcaaaggtgagcttacagcttgctattcaattcctttttcaaacttatctacggacaaagaagaaactcagggttgatactgaagaatggattgctaccattgaagcattgctttcaaaaagttttgatgcttgtcagtggttagttgaatattttattagttctgaaggacgagaattgataaagattttcttactggagtgcaatgtgagagaagtacgagttgctgtggccaccattctggagaaaaccctagacagtgccttgttttatcaggataagttaaaaagccttcatcagttactggaggtactacttgctctgttggacaaagacgtcccagaaaattgtaaaaactgtgctcagtactttttcctgttcaacacttttgtacaaaagcaaggaattagggctggagatcttcttctgaggcattcagctctgcggcacatgatcagcttcctcctaggggccagtcggcaaaacaatcagccaaggtccagacctccaggtccagcccagccagctacccatcagggccccagagggagctttgatgcaccacagtaatcatgtggacagtagtcgctgctaccagtgtgtcaaatttcttgtcactcttgctcaaaatcatatatcatgggtagtttaagtgacatgcctagagtcatagagtgaaaacttgaacacaggctgattgactgcaaaatgaaggttcttttttttttaattgtggtgaaatgtacataacataaaatttactatttgaaccatttttaagtgtatagttcagtgactttaagtacattcacactgatgtgcaaccatcaccaccatccatctccagaactcttttcatcttctgaaactgaaactctggacctattgaagactgactccctattcctcccttcccccagcccctgggggaagcaattgtaatttctgtctccatgaatttgactactctaggaaccccatttaagtagaatcacaaatataaagacaactgaattttaatgaaactagcatttacgtttcaaaatgaagcactaggaacaagcaaagaaagaatttggctaataaaaatctcctcggtcatcaggtgtcctgcagctaaggagtacttcaaggagaattcccaccactggagctgggctgtgcagtggctacagaagaagatgtcagaacattactggacaccacagagtaatgtctctaatgaaacatcaactggaaaaacctttcagcgaaccatttcagctcaggtgagagttgtctcttgtttttgcgtggtctaaatcacttatggaggattttcagtgtgtttctcagaaactgcaacctctgagaagagaggtatgagttgaagatgagaacaagcagaagaaacaattggatttctatgaaaagaaaacagattggtgtacacttacacaaatttgtgcagattatttgtctagaaggaaagtcatacaggttgggcagtctggtcacaaaaagggacaggggttgagggggttctggtgactgtgatgaaggcctcactctcaggcctccggtcccactgaaggtcagatgaaaggtagtcttccctggcggttgctgctgccactgaatgggccctaactttgtcgtcttgtgtttgaatcttctgcaggacacgttagcgtatgccacagctttgttgaatgaaaaagagcaatcaggaagcagtaatgggtcggagagtagtcctgccaatgagaacggagacaggcatctacagcagggttcagaatctcccatgatgattggtgagttgagaagtgaccttgatgatgttgatccctagaggaacatgcccagcctgagaggagtcaagacacaatactggatgctcagcaccttcttggaatcagaatctcgaaccctttggaagagcctggagattggactgggaaagctgctgtgacttgggcggatcgtgtatttctcaaggaaagcatttttaagccactagaaggtttgggagctgtttggcagtgggagaactccggcatgtggatcagctgtcccgggagcgtggtctatatgtggattcacatttctgtggagattttcggaaatagagccagtggcagacttttttgttacacgaacatacaagagtgagcataaagctgttgctttctctacgatgctacaaaagaaattcctttggtttttatattttaagaaaaagcaagctgcttttagatatgtgggggcaaatttttaatcttgcagtaatattaaacaggaatatccaatttaaaatgatgtaaagatgtaataaaattccttttcattgtaaaatagtaattaagtcaatttacacagacctttgtatttaatatgtctccctatttgtatagaatttcagatgggtctagatgagaaccctatgcataagcttggatcttgatgaaaggttaccaggatcaggatcaaaaattgggaaatactaagctcttgaagatatttttctgatataattagattgaaaagagcaattttgaaaatgctgtgttctccagaagtacagggtgcattatttgacatcaattacttaaagaagttatgagttgttccccaaacagattttaaaaacagcaaaataaaagcactttaagatataattttactgagtttaacttcacagaattatctttttaatgcttggagacatattgaataaactgtagtcttaaatcatgtgatctgcaatcgtttgcttttgcttaaaacataattactgaaacccttggtattggttgtatatgaagttaactatttgagttggtacacactgcttgtgagtttcatagttattgtaatgcagagaaggaatttgagaatttgtttctcctcaacatgactaattaacactgaaaagtcagtcaaggtttaagatttattttcccagaaataaatataaagcaattgaataaccatccatttagtcgtatttccaaagtatagcaccattcactcatttataccagctcccttttatggtgtgggggagaggtttacacccacatatttcatatatattttgtacattttgtattttgaattgctcacattttcggccctgttttgcctttagttacaggtcctgccttattttcatctcaccatgcacagaactagggagccttaggaagtgccaggttttcactgtcagatttgccaagtcacagaggcgcagccagccctgaagtgcctgtctggctgctgtggcattgtgtgggcatgtggccaggcagatggcatctcattactgtgctctcgccatggcccagtcttttcattctctggcagtgagggtttctgtgctgtcagacttcattgttattctgtgacttgctggaggttggcagtggcctttgtcaaacacactgagaagatggaagggccagcacttaagagcagaactgtacccttagagaaacggacagaggcgagtggcaaacttcagacggttccaatggtcttgcagtttgaaatgtgatgttctaccattggttttgagtacgtgaatacttcctgtcctactgtttcccctaccctattctcaccttctctccgcccacatcctcaccaagagattgtgtgggacatgaccttgaaatgctggcgatgatccacactgggatatcatcgctggcgactgcactctcaggagcccaaaatcaggagtgaaattgccacttctagtccccttatttcctatggaaacaacgccttccgcacccctagcacctgccgtcctcactgtaaagcttcatcaggatcgtccaccgtgtatattatacgcttcagatcatgttgcttatattgttgctgcaatgaccatcgttttcactttgctggtaaccacttgattgctgacagctacagtcaatgaacctgctgatgactttttttaatgtagtacaacagtgacagttatgacaggcttaccttggaagagttgtcatttttactgccaattttttggatgaagatgtttttataaacctttcaaaatggtctgcaaacagagcaggaattgcacaattaactcaataatgctgtgtgttctcaagaagctcccttagtgaggccgatcttaagatggccgattctgcccgttgaaggcatcctgggaaagaaaacaagcatcccagcgggcatctcaccacgacttctcctggagtcctcacacggtcactgacaactacagtcagttttaggaactagagtgccgtatcatcagacttaccctgtcctgccccaccttccctgctaacatcgaggtgtgtgcagttaccttctgagcttggaacaagcagactggaattttcctctgctacctcttgtgtataaaatcttgtttataaaatttcaaaaggaagtagatacactagggaagaaccttaattctaaatttggttcatgtgtggcaaagttcttagcttctaagagtataaaataaatttttcaaaaacagagttggagtcttgccgccattcttcatatatcagaacacagccgtagtgggcgggggaacacgagcctgtgcctggtgctaaatgctgttgattcctcttagtactttacactaataaaggggactgtgggtcctctgagcctgttgctgttcttttctctggaggggctgaccatttcaggattcatctgcaaagcttagaggaggatgctgaacttaggttgatggtctccattcatctccaccaaagcttttggctctcccaagtggtccccagcatagatcgtgtcgctggtcacactgggcttcttgctagatcccacaggtctcagtctcattcctagtggccagcgttgctcacatgggtccccttccctatttgctagtccagattttcgccttcctgcaagccacacccctctgtccccattttgaatgtgcccccttgtctcaataaaccctttggagtaaa

SEQ ID NO: 462861 - DNA, 805 bp, Homo sapiens
cactctgggatgggaacaagctcagtagtgatagaacattcaccacagctccacttcttgagtgctttccatgcaatctcactaattctccaagcattgctgggagacaggtgcagtttcccctatgttagagatgagaaaacagaaactcggaaacttgcccgtgacttggacctgggctacccactttccactatccctgtgctctccaatcatgctccaggctttcttgaaactcaggttacagcttccatctgcatggaccattctttcaagagttttggttatgaagagaagtggaacgaaagagcccataagagaagtggagaggaagaacaaatggtgactaatggtggctgtgggcactgccttgctgatctgggttctcttgaggctaactgtgcagaacacttctagaataaatgaagatcatgtaacaaatagagatggtagtgctgtctgaagagtctctggagtatgtcactgtgcttcttaccaacatagggatgccttgactaaagtgggcctgaaatggctgaaaagaaaaacccttagtttctacagacagaaatgttgctaccctcaaagtgccacagcatgaacagaagacttgtctcacagaagtcaacagtcattgaggagatgcatgtagacatggagcagaacccctgtgtggtgggctgcagactgcttcctccaacctccctgccccatccccacacaaaaagataaccaaatcctaatctctggaacctgtaaatgtttccttattttgaaaaagagtcattgcagatgtgattaagga

SEQ ID NO: 462862 - DNA, 2910 bp, Homo sapiens
  misc_feature (859)..(859): n is a, c, g, or t
ccgggcccttggtcccccgcgcgggcgcgggtggatctctcgggctctgacttgttttcgggtcaccttcaggcttcagccaggcacctgacgcctctttcccctcacggtgccagggccgggccgaactacatttcccaggaggctccgcggccaggtgcaaacagcgccgtgctgactacatttcccagacagccttgcggcggcccgggccttaaagcgtccatttcccagcggccctccgctgcgagaccgcagcccttctctggagtctcagagccgcaagacaccacgactcccagaggaccttgcgtcgggcaagaaagactacaccttccagaggcctctgcggcgccgcgacaggaagcggcgggcgagccgagtgtccttgcgcgtggatccgagcgaccatggtggcccgggtgtggtcgctgatgaggttcctcatcaagggaagtgtggctgggggcgccgtctacctggtgtacgaccaggagctgctggggcccagcgacaagagccaggcagccctacagaaggctggggaggtggtcccccccgccatgtaccagttcagccagtacgtgtgtcagcagacaggcctgcagataccccagctcccagcccctccaaagatttactttcccatccgtgactcctggaatgcaggcatcatgacggtgatgtcagctctgtcggtggccccctccaaggcccgcgagtactccaaggagggctgggagtatgtgaaggcgcgcaccaagtagcgagtcagcaggggccgcctgccccggccagaacgggcagggctgccactgacctgaagactccggactgggaccccactccgagggcagcntcccgcttgccggcccaataaaggacttcagaagtgttccctgacccgtgtgctggccccagggagcacagggttggcctggtggtgcccagagcaccgaggcctgggcttctggctcctgatggcttgtcagggcttgaccttgaccacaggccatagcactcccctttgccgtctgctctggtgcggggagtcagaggtcagagcggctgctcccggtgctccagaggctgtgctctggggccaggaaagtgctttggccaagcctgggttgtggagggtcttggttttggagggctgagaccagggtaggacagtggaagagccagagtggacagaagtggggtctgcttccctgcgggacacagggcaggagcccccagggccactggttcctgccctcctcagctcctgtccgcagtcctgtcccggcccttccttggccggactccaccctcattccaccctctcccgacaaccctagcaggggaatcctggtcattgaaggaaatccaggtgtttgttgccattcagagggtctcccggacattgcctctcccctgggacgccttccctgacacccctgccgcacactggccaggctacctggcagcctgcatggttcccccgcatcaggcatgagccctgggaggctcccagcacccagccacagagggcgatccacggggttgggtgatggcaagaggcctgtgcccagaaaccagtctggtggctccagacacatgggggtggtggggagcttgggtggggccagaggcctccgtaggatgctgccctgggagcagggagcagacaggtgatgctcaccgagctgggacagggtccccgttcccatgagttcaggggtttatgttgcttggtatagggaactgagcttaggaggggacagctgttacagaggagaggagcagagactagaggccggggcatctcccccactgtcccactcagagaggagaagccactggcctgagcagggcgtaggaggggtgtggctgggagcagcggcctagtctggtagaaggggagtccacagggcctgcccaccccattccccccaggagcgtggtcccgggacaggtcccccacatctgatatgcccctgtccttactgggccttagcagtggtgggggcaggtctagggtgagggagggatgagcagggcaggggagcatcactgaccctcagtgctgcaggaggaagccggtgctcgccggagcacccacgcactcactgtcccctgacactgtccaccaagtccttcccgaaggcccaggaaggagcagactgcaggcccattttacagacgaagaaacttgcacagacagacagttctgtctgcccagcctgtccggagcccaggctgttcaccacaaaccctcgcaggggatgcagaatttctagtcgcctcgcacccaggcacccagccccagccccagccccagcctgtgaggacaggaggggtttgcactcggtgctgtgatgccatggctgggtcagagggcgtccgtccgctccaggaggcctctgcagcctcacacctgttaccgtcactgttagaggggaaggactggacgaggccagtgagcagctgctttctggcccctcccctccatccaggcggccgggtcctgcagctccacgaatgtggcttagttcttccctggggtcacaggctttatcccatgagttcgtcctcacccatccactggcacctgtgtgcaagaacatgcctggggtcaggggagttggggggccatggaagtggagctccagaaagcagaggtggctgaggcaggtctaggggtgactttgggaaggcgggaaggggctggggaaacacctgaccacacccacagccaagaccacagagcaaggcaaggctggcatgtggcacagtgccatttgacagctggggtcactcgatagctggaagcaggacgggctaggaacggagtccagggaaagctagcccatcacgatgtgggctgggcagagctagaagagagagcagggggagtccataggc

SEQ ID NO: 462863 - DNA, 1357 bp, Homo sapiens
tcctccaccaggctccacaggaaacgccagggcagggtttaaaggaaggtttatcaccccgactttacataaccagcatggcccagtctcagtcagagtcacataagaatataccccgagtaggtacccagcttctgttggaggcctgtgtccaagctacagtgccaatcttcatctacaccagtaccctagaggtagccaggcccaattcctacaaggaaatcattcagaacggtcatgaagaagagcctctggaaaacacatggtacgctccatacccacacagcaaaaagcttgctgagaaggctgtgctggcggctaatgggctgactctgaaaaacggtggcaccttgtacacttgtgccgtaagaccaatgtttatctatggggaaggaagcccaatcctttctgccggtataaatgaggccctaaacaaccatggaatcctgtcaagtttcagcaagttctccagagtcaacccagtctatgttggcaacatagcctgggcccacattctggccttgagggccctgcgggagcccaagaaggccccaagtgtccgaggacagttctactatatctcagatgacacgcctcaccaaagctatgataaccttagttacaccttgagcaaagagttcggcctctgccttgattccagttggagcctgcctttatccctgacgtactggattggcttcctgctggaaatagtgagcttcctgccgaggccagtttacacctgtcgaccgcccttcaaccaccacagagtgacattgtcaaatagcgtgttcaccttctcttacaagaaggctcagcaagatctggcatataagtcactttacagctgggaggaagccaagcagaaaaccatggagtgggttggttcccttgtggactggcacaaggagaccctgaagtccaagactcagtgatcgaaggatgacagagatgtgcatgtgggtattgttaggagatgtcgtcaagctccatcctcctggcttcatacaggtgacaagggcaaaagtccaggtcctgctgcctccctttcacataatagccaacttattgtcttcctcatgtcatcaaaacctgcccagtccctggcccaaccagaagctttttgtcctaatcatataccagaggaaagacaatgtgatttgctttttccatatctcagtggctgattccgaacaattgtagtctcttctaacttgaggtcatttttaactactagagctccatttctactcttaaatgagaaaggatttcttttcttttaaatctcctatttcttcacgcagtccaatgtaaagagcaataaatgttttaatccttaacctggagggaggtgtag

SEQ ID NO: 462864 - DNA, 3082 bp, Homo sapiens
cggtagaccccgagcctaccgctctgcttgcgttctcgggggtcggtgtcggtcttgggtctggccatgcctgagcctgcaaagttcgcgccggctcccaagaagggctccaagaaagccgtcaccaaagcccagaagaaagacggcaagaagcgcaagcgcagccgcaaggagagctactccatctacgtgtacaaggtgctgaagcgggtccaccccgacaccggcatctggtgcaaggccatgggcatcatgaactccttcctcaacgacatcttcgagcgcatcgcgggagaggcgtcccgcctggcgcactacaacaagcgctccaccatcacgtcccggagatccagacggccgtgcgcctgctgctgcccggcgagctggccaagcacgccgtgtccgagggcaccaaggcggtcaccaagtacgccagctccaagtgagtccctgccgggacctggcgctcgctcgctccctccctccctccctccgcgggtcgccggctgctttgtctccaaaggctcttttcagggccatttaaccacctcagttaaagaatctttcttgtgttgtcagtcccagttgatgtttttggcttcacgtctggttaactttaggagagcacacaacaccaagcacagataactattttcttttcacataggcattgctataagtaagcttacatagattgatagtggtatcttactatggcatagataggttggggcttgccttagagggctgctcttgaactgtctttggcctggttacgtacccgtgaatatgtgcccaggagattgtttcctgttgagaaacgcagtgttaattttgataagtttatgtaagatcaaattgtgtatatgaacaaaggttgggtccgctcttcagtggtaaaatgaaggtagagattaaatgcattgtatgctctcagatgtgtacttaaaagggaatagctcaacttttatatatggtatcgagaaacctgaggtttttatatcattggttcacaaacacgtgcctacaccaccactcatgtgaaaattccttaaggaggtagatggaagttcgattttgataaccaggagttaacaccgataaccttctgcgctttctagttgagataccctaaaatctacccaataccattaaatggtttttttccccaagagttatcactcggaaaagcttgtccagtttaagggtttgttccatacaatagcaacaaaatatacgatttctgaagccagagtttgggatccctgaagaggagaaggaccaccaatttgcaagggaggttgattaggtttgttttctgctttgggaacactggacttggaatcacacagcctcattaacctcaaaatattatactgattgctctggggatcgtaaatcctaggctggccacaatagaagcgaggaaagcaattaggaggctgttgcagtgttgtgggctggaacagtgattaagacttaaagtctctccagaccagcagcatcagcattacttgaagttactaaaaatgaaaattcccaggttccattatttgtgttaagctttctgggtgatggtgatatatgctaaagtgtgaaaaacaacggataaatgacatgctggagtgcaatggtggtaatggaaacaaatgttggattttatctttgaggtagaattaataggtgtggctgaggaacaggatttagctaacagtgaaacccctagatttttggcttgagcaactgtgtacatagtggtactattaggatagaacactgagagaagatattcgttgggacactgaagggagatccagagttccgactgaaatttgagaagctctttgctattcaagtggatatgtgcagttgacagtttgagagatgcatctagggttcagtaaagacaacacaagcctgtctttagggtctacctgtgaactgtgaacacagcaatgagaatgatggacatcacctttaagtatttttctagactttattactcatgtgtttgtcatgaggtgtaacttagtagttcatagtcctataatgtatgttattgactaggtagcatttatttttctaattgtttctgttatagtgctgccacatgtgtttcccagaaacgcattttacccacagttcttagggttggcctgattagtttaattgctgtctgaacctgcttcttactgtgattagttcaggaatctagatcaaactcattggcatttaacatttcaggaagtgaactgagtaacaactaactcagcaggggagtgtctacaggtgcggaaggaaagtttatatggtgaggcttggtcgcaaaactattaggaatattttcaggttactacacaattttgcgagctcaatatgcagttaacactttttccctcgactctcctgagcagatttacattgaccgcacccgtagcatatcgtctcactttggaaaaggcaaattatgtgcacatgaccctgtcactacaaggtagttctcgaccaagctacatcttatagctttatcttatattcctctcccatcatctgcaggaaaagggataggtgctgagggaaaacccctaagtagaactcacagtaagcagtgggaaaacagcttatttcactaacggggttaagtggccctgaaaagagcctttggagacaaagcagccggcgacccgcggagggagggagggagggagcgagcgagcgccaggtcccggcagggactcacttggagctggcgtacttggtgaccgccttggtgccctcggacacggcgtgcttggccagctcgccgggcagcagcaggcgcacggccgtctggatctccgggacgtgatggtggagcgcttgttgtagtgcgccaggcgggacgcctctcccgcgatgcgctcgaagatgtcgttgaggaaggagttcatgatgcccatggccttgcaccagatgccggtgtcggggtggacccgcttcagcaccttgtacacgtagatggagtagctctccttgcggctgcgcttgcgcttcttgccgtctttcttctgggctttggtgacggctttcttggagcccttct

SEQ ID NO: 462865 - DNA, 4250 bp, Homo sapiens
  misc_feature (2)..(3): n is a, c, g, or t
  misc_feature (5)..(5): n is a, c, g, or t
  misc_feature (11)..(11): n is a, c, g, or t
  misc_feature (14)..(14): n is a, c, g, or t
tnnangttttnatngctcctgacatcaagtgctgttcacaagtggggtactgaaattcatgaaggaatttacaacatgttgatgctattaatagaactggtcgcagagagaataaaacaagatccaattcccattggtctcctgggtgtgcttacaatggctttcaatcctgataatgaataccattttaaaaacagaatgaaagtgtctcaaaggaattgggcagaagtgtttggagagggaaatatgtttgctgtttcacctgtatcgactttccaaaaggagcctcatggatgggttgtggatttggtaaataagtttggagaattaggtggatttgcagcaatccaagccaagctccattcagaagatatagaacttggggctgtctcagcactgattcagcccttaggagtgtgtgcagagtacctcaattcctccgtggtacagcccatgctagacccagtcattcttactacaatccaggatgtacggagtgtagaagagaaagacctcaaagacaagagattggttagcatccctgagctcttgtctgccgttaagttactttgcatgcgcttccaaccggatctggtgacaattgtggatgaccttcgactagatattctattgcgcatgctgaaatcaccacatttcagtgctaagatgaattctctcaaagaagtaaccaaactaatagaagatagcactttatccaaatctgtgaagaatgctatagatacagacagattattagattggctagttgaaaactcagttctgtcgattgcactggaaggaaatgaagctgctcttggaggtgcttttactttaagtgctggaactgtcaaagaggtgctactgccaccaaggtttccagagtcccttgcagccacagccagcatctgcatccactctgaacctaagccagacgtacttcatccttcatcctgccactcatctcccagcgcttcctctcattggcagaactcaggacaatcatctactgtgattgagaacattcatactattattgctgcagcggctgtgaaatttaattcagatcagcttaatcatttgtttgttctcattcagaagctccatgaaattactcgctcattcataaaacaaacctatcaaaagcaagacaagagcattattcaagacttgaagaagaattttgaaatagtgaaattggtaacgggaagtttgatcgcttgtcatcggcttgcagctgctgtggccgggcctggaggcttaagtggctcgacactagtggatggccggtacacttaccgggaggagaaatccctccctggtgtagtgatggctctcgtatgtaacgtatttgacatgctttatcagctcgccaatctggaagagccaaggataactctacgagtacggaagcttctgctcttgatacccactgatccagccattcaggaagcccttgatcaacttgattctttaggaagaaagaaagaagtaggcataccatttcctctgggtgaggtaggcatggacaccagctcaaagcatgagcagaggatggttgaaggaattcctgaggggaggtctggcacagagaagctgggtagggaccttgaggaggtcgaggggatgggaaatagggaaatgatggcaaaaaggattcccaagtaccgtagaagaggagcagccagcgcacacccatgcgtggggacctgcctggtgccggcagaggccacaggaggccagtgtgatgaagacctcaccaaagatggtatagaagcactttcttcccgcccattccgaaatgtcagccggcagacaagcagacagatgtccttatgtggtaccccagaaaagtcatcctaccgacagttgtccgtgtctgataggtcttctattagggttgaggaaatcatccctgctgctcgagttgcaatacaaacaatggaagtaagtgatttcacttctactgtggcttgcttcatgagattgtcatgggctgcggctgcaggacggcttgatcttgttgggagtagccagccaattaaagaaagtaattccctgtgtcctgctggaattcgaaacagactcagcagttcaggaagcaattgcagctctggaagtgaaggagaaccagtagccctgcatgcgggaatctgtgttcgacaacagtctgtatccaccaaagactcgctgattgcgggagaggctttgtctcttcttgttacgtgcctacagcttcggagccagcaactggcttcagaaatggagcagttaaggatcagcccagctacgatgcttgaagatgagattacttggctggataactttgaacctaatcgtacagctgaatgtgagaccagtgaagcggacaacatcttactggcagggcacttacgcctcatcaagacccttctttcactctgtggggcagaaaaggaaatgcttggttcatcactcattaaaccattgttagatgacttccttttccgagcttctagaattattttaaatagtcattctccagctggcagtgccgccatcagtcaacaggactttcatccaaagtatggaaaatgcacgtgtagtacagcgaatagccgattggcagcctatgaagtccttgtgatgttggctgatagttcaccttcaaatcttcaaattattataaaagaactgctttctatgcatcaccagcctgaccctgctcttaccaaggagtttgatattttcaagatgtggaataaagaactttatgtgagagaacagcaggatgcatatgaattctttactagtctcattgatcagatggatgaatacctcaagggcatctactctgatcagaagatctgtaaagactgtcctcacagatatgagcgtgaagaagctttcatggctctcaatctaggagtgacttcttgtcagagtttggaaatttctttggaccaatttgttagaggagaagttctagaaggaagtaatgcgtactactgtgaaaagtgtaaagaaaagtttccctggatgctaaacatggagccttacacagtttcaggaatggctcgccaagattcttcttctgaagttggggaaaatgggcgaagtgtggatcagggcggtggaggatccccacgaaaaaaggttgccctcacagaaaactatgaacttgtcggtgtcatcgtacacagtgggcaggcacacgcaggccactactattccttcattaaggacaggcgagggtgtggaaaaggaaagtggtataaatttaatgacacagttatagaagaatttgacctaaatgacgagaccctggagtatgaatgctttggaggagaatatagaccaaaagtttatgatcaaaattgtcaagacaagaaaaacttttatttacagatgtgtttcttaatgtcttgttataaagcaaacccatacactgatgtgcgccgaagatactggaatgcctatatgcttttctaccaaagggtgtctgatcagaactccccagtattaccaaagaaaagtcgagtcagcgttgtacggcaggaagctgaggatctctctctgtcagctccatcttcaccagaaatttcacctcagtcatcccctcggccccataggccgaacaatgaccggctgtctattcttaccaagctggttaaaaaaggcgagaagaaaggactgtttgtggagaaaatgcctgctcgaatataccagactaaattaaagcatccatattatccttgcatggcaaagaaacgcaagtctcttcccacaaggcgatcacagtctgctgctttgatgcaccacagtaatcatgtggacagtagtcgctgctaccagtgtgtcaaatttcttgtcactcttgctcaaaagtgtcctgcagctaaggagtacttcaaggagaattcccaccactggagctgggctgtgcagtggctacagaagaagatgtcagaacattactggacaccacagagtaatgtctctaatgaaacatcaactggaaaaacctttcagcgaaccatttcagctcaggcctccggtcccactgaaggtcagatgaaaggtagtcttccctggcggttgctgctgccactgaatgggccctaactttgtcgtcttgtgtttgaatcttctgcaggacacgttagcgtatgccacagctttgttgaatgaaaaagagcaatcaggaagcagtaatgggtcggagagtagtcctgccaatgagaacggagacaggcatctacagcaggtataac

SEQ ID NO: 462866 - DNA, 904 bp, Homo sapiens
  misc_feature (2)..(3): n is a, c, g, or t
  misc_feature (13)..(14): n is a, c, g, or t
cnnaactgtgaannaggaaagccctgtcaaagcaagagatggctagtgtttcatccagccaaagaggtgaagtggttctggaaactttggtggtggtcgtggaggtggtttcagtgggaatgacaactttggttgtggaggaaactttagtggtcatggtggctttggtggcagctgtgatgtcagtggatatggtggcagtggggatggttataatgggtttggcaattatggtggttatggaggaagtggccctggttactctggaggaagcagaggctatggaagtggtggacagggttatggaaaccagggcagtggctatggcgggagtggcagctatgacagctataacaatagaggtggaggtagctttggcagtggcagtggaagcagttttggaggtggtggaagctacagtgatttgggcaattaaaacaatcagttttcaaattttggacccatgaaggggggagattttggaggcagaagctctggcccctatggcggtggaggccaatactttgcaaaaccacgaaaccaaggtggctatggcggttccagcagcagcagtagctatggcagtggcagaagattttaattaggaaacaaagcttagcaggagagaagagccagagaagtgacagggaagctacaggttacaacagatttgtgaactcagccaagcacagtggtggcagggcctagctgctacaaagaagacatgttttagacaaatactcatgtgtatgggcaaaaaacttgaggactgtatttgtgactaattgtataacaggttattttagtttctgttctgtggaaagtgtaaagcattccaacaaagggttttaatgtagatttttttttgcacccatgctgttgattgctaaatgtaatagtctga

SEQ ID NO: 462867 - DNA, 1680 bp, Homo sapiens
agggagccctcacaatcatggtagaagatgaaggaagcgaaagggacattttacatggcagcaggcaagaggatgaaaccatctgcatttttcaagaggcttgtgaaatatctaccaactcttttggaatgcaacggaaagtgactgctgaaaagaagtccttgaatcttcaatgcaattcaggttcttgctatattaaggcactcaagagtgactacagccagatcattgttgttgaatggaaaaccatgctgatgaatccacaaaaaacttccatcactattgccatggcagctttcctcatgagctcattggaaaaagaaactgaccaacattcccagtacaatgccaaggttcatttctttacatgtgttttatgtgtttttaaattttctgcattgcaatttgattcaaaatcatccctttctcccttgaatgggtttatataataattatggaaaatacaggtcctgtataaaagaaataaatatttaaaaatttaaggcaatcagtatggcctttcaacaaagtctgtactaatttacattcttatgatttgttatatgagaattcccacttcactgagcaccaaaaactagtgttgtcatttttctgctctacaccaatttgatggcttggaaattgaatcttatttattcatatgtgtattttccagttacacttatttttataatgtattcttagaaaatgtcaagtttctttaggatgttactgttcggcttttagtttttaaaagccattctttgcgaaatatattaacttttttccctactttttgcaaatacttactccaaggtcatcatgtattatttaattttttgattataaaagctaataagtattgttttaactgataattttgcttaatgttacattacatggaatatgtttggaagttaatatcggaattaaaggcttagagaaatattagaggaactatgagaggaaaggtcagggaagctaactctaaacagcaagtaattcagcaaaaatttcaggaaagcaaccagagatctcagccagaagctcccagtaactgtcttggaaactgctgctgtgctaacggttctatgtgaaactctcactaattgtctttgtgtgcaacagccaagcagctcacaccagtgttttttgctggcaaagcctaacatagaaacatacagagagaaggttttgggaaatgcggaggagaccttggaaagctgcggtaatgatgtcaagttgacaatagccaaacatcacaagaagaaatcaaattttgtgaatgaagcaataatacagtgaagttgttcaacatttcacagctattaaacagcacagtaatttttttcagtattgaaatatagaataaaatagctctttttgtaatacatctggttagaagggatgatttccttacttttaaaccataaaaatatatataaataattaaagaaatattaacttttaataatagagaaatagaagagaatattatactttgggttctacctatattcctaagtactataatcagtgctatacagaatttatgttaaatatcctttgccataactcctggagtaggaattataacctttaatttacaaacatcgatgcttgaaacttaactagtttccccaagttttcagagcccctctgaagtcttttctaggatgg

SEQ ID NO: 462868 - DNA, 1554 bp, Homo sapiens
ggacagaggaatggagccagtgaaacgcggaggaggatgcagccagctgcctgtgggaactgggaaggcacacagggagctgctgcctgagctgtgactcgaagacaacgtgggaggtggcaggattgtggggtggggaatgtgtcagtcagggtcctggcaggaaacagagtatgtgagtaggctgaagagagtttaatacaggactgttcacaaagggcaaggatgggagtctaagcagggggatcacatggctggtagtcatggtggtgtggaggatggattggaggagggcaggagcagaaggaaggccaccaagagcctactgcaatacagaatgcttaggggaatcaacagaatctggacctggggcttgctgtcagaagaaccggactcaaatccccattctgctgcttacatttgtgagctactgggcaagaaacactggaggcctaacaaaggcaggggcagccaccatggggagagcaggtggacacaagaatcatttctctgggtgtgataatgagagggaaggatatgattctgagctgtgtaacttggcagatggactaaacattaatggggtcaagggccacagaaggaaaaaagaactaaggaacatggaaggaggaggagtggtgtggctctggacaggtcagatttgagaaggcaaaagccagatggaatttattttggtggcccttatgaagtagctaagcctttccctgcgagagagctaatgccgttttgatgtggaagtaggagtggggctggttaaggcaagaggtcagtttaatgtttagtaaagtgtcctgataaaaagcaagggctgttgtaactgccccagacctgcatttcacccatctgttactgacttccctttctcataggaaggaaccagaaacgtgacatggatcaaaaggacatgtttgagtctgaggacacaccactggcccagaccctggacggctgctccgactctggaaggaaatgcacctgcactacctcatctcccccagcaatcaggtccatctccaacaattaattatgtgctgatgggagacactgagcaacgatgagctcatgtgtagatctcatctgtcaggggctgccattctgaggttcttcttgctcacctcctccaaaaaaccttttattggagcaattaatacaaacaagatgaacacatttaccctttatgatggcttcatttctcccacccacccccttatcattatgaattatcagtaaaaactgcaacaaatgagacaagagatgaggtcaatgtcaggcctctgagcccaagctaagccatcatatccccagtgacctgcacatatacatccagatggcctgaagcaactgaagatccacaaaagaagtgaaaataaccttaactgatgacattccaccattgtgatttgcttctgcccaccctaactgatcaatgtactttgtaatctcccccacctttaagaaggttctttgtaattctccccacccttgagaatgtactttgtgagatccaccccctgcccctaaaacattgctctt

SEQ ID NO: 462869 - DNA, 1543 bp, Homo sapiens
ataaaacccgatcgtacattcgttctattctaagataggagaaaactgccctgtggctggagaagtaaacactatgtccaaaagtagatcattcgaacaaatattagttaaatcaatcaaaagacaagattcttttcctggtgaatcttacattatagtaggatccccgatgagctccttaaaaggattactggttcccaccccagagttcctgagtcaggaagaccgagaggccagagaagagcaaacttggccctttggggacagcaaaaaacagtctgttagctgtttagacctagagaaggcagctgaaagtgtttggttaccaaacagcgttcctaagcacctagataactggtgtgatcagtactcaaccctgctgttggctgatgacagggaagagactggagtgagagtgtcagaaaaaaaaaacagcattgaaaagagatctttgtttccttatttttcaggtaaggaagtggaggattaaatgatttgcccaaagtctcacagtaatttgtagagctgagattgaaattcgggtgaaacttcacatatcacattctttttatcagatggcagtttctggatttactcttggtacctgcatacttctgttgcacattagttatgtggctaattatcccaatggaaaagtaacacagtcatgccatggaatgattcctgaacatggtcatagtccacagtctgttcctgttcatgacatttacgtgagtcagatgacattcaggccaggagatcagattgaaggtaccgtgctgggattaactgtttacattttggatttcactcttttactgtttattgaatctttattattacttgatttagaagatttcacttaaatctgttttcttttgtaagatactatcatacttcttatttttggttccagatgactgtattacttaagtagtctgtgtattccccatccagaacaggctttaaaataagtttttatcgttatttactatttttattaattgtgctatcacttcaagagaagagaaaaatgaagtttattttatcttgtttaaaatataataaacccttgtccttcttgatatcatataattttaagaacaattctctaatttctctggtaaaatgtaggctgattattaaagataaatctataacagcattttgcaaactattttttgcaactctagaaatgcaaaatgttaacaggtactctgttacatagagagtatatagaaaaataagtttggaatattctgtgtgatatataatataccttagagttcacactgtacagtaggatattaaatatcctaagaaatttgcagtaaagaaacaagtatttactttcatccagtgtttttctttttttgtaattcaataagaatttattgagtgtcactgtgagccagacactgtgttaaatactgcaattcaaaagaaaacacctcatgttttttcctctaatgaggtcaagtaaacattttttttttaaacttttattttgggttcaggggtacatgtgtaggtttgtttatag

SEQ ID NO: 462870 - DNA, 1099 bp, Homo sapiens
tggttaggctgccttcgcttctcaaggtaaggaagtggaggattaaatgatttgcccaaagtctcacagtaatttgtagagctgagattgaaattcgggtgaaacttcacatatcacattctttttatcagatggcagtttctggatttactcttggtacctgcatacttctgttgcacattagttatgtggctaattatcccaatggaaaagtaacacagtcatgccatggaatgattcctgaacatggtcatagtccacagtctgttcctgttcatgacatttacgtgagtcagatgacattcaggccaggagatcagattgaaggtaccgtgctgggattaactgtttacattttggatttcactcttttactgtttattgaatctttattattacttgatttagaagatttcacttaaatctgttttcttttgtaagatactatcatacttcttatttttggttccagatgactgtattacttaagtagtctgtgtattccccatccagaacaggctttaaaataagtttttatcgttatttactatttttattaattgtgctatcacttcaagagaagagaaaaatgaagtttattttatcttgtttaaaatataataaacccttgtccttcttgatatcatataattttaagaacaattctctaatttctctggtaaaatgtaggctgattattaaagataaatctataacagcattttgcaaactattttttgcaactctagaaatgcaaaatgttaacaggtactctgttacatagagagtatatagaaaaataagtttggaatattctgtgtgatatataatataccttagagttcacactgtacagtaggatattaaatatcctaagaaatttgcagtaaagaaacaagtatttactttcatccagtgtttttctttttttgtaattcaataagaatttattgagtgtcactgtgagccagacactgtgttaaatactgcaattcaaaagaaaacacctcatgttttttcctctaatgaggtcaagtaaacattttttttttaaacttttattttgggttcaggggtacatgtgtaggtttgtttatag

SEQ ID NO: 462871 - DNA, 1110 bp, Homo sapiens
ctctttggctgcctcagttcatttcattttaatcaaggtgccaggagggaatttaggttaaaaaatccaacctccttcttgtcacaagttccctgacacggactatagttgtagatgttgccctggctgcgtatcaacaatgacttcttttccttgatgtttcttcacaggaaggatcagaatgttctctctccagtcaactgctggaatctcctcttaaaccaggtgaagcgggaaagcagggaccataccaccctgagtgacatctacctgaataatatcattcctcgatttgtacaagtcagcgaggactcaggaagactctttaaaaagagaaaaaccaggctagataatttaatagcctctccagatctcagagatgcttatactgaaggcagccagatagcaaagtcacgagtgttcctggctcttcaagtgccctatgcacatttcaccaaagagcccattggaggaattcagctacaatcctgcctgggaagtagtttccaggaccttcgcaattccacatagcatctttaacatgtttgagagtacgtaaggaggcagcatagtgcagcggaaagaacactcaagtgagtgttgagggggctggattctaatattaatattagccaacatttattgaacaggctaggtgctagattctgtttaaagcactttatgtggattatctcactattcttattatcctattttacagatgtggaagctgaagcatagagggtttaaatataatttacccaaggtcatcaattggggagtagaagtaggattcaattcctgctccagagcctgcatgttcagctctcttttaatactgcatgtggtccttgataggctactgaccctggaaaagtcatttcaacttttagggctcattggtgaaccataaccaaagggagctcattgtggctaacctctgatggagtttccacttttaataatttatatgatgcaatgcagctatattgtttagttcttgtcattatgtgaaagcatagtatttaaactttgatctcattgattcagcaactgattattttatggccactgtgcacaaagcaatgggctgggtaccacagaggattc

SEQ ID NO: 462872 - DNA, 739 bp, Homo sapiens
tccataaaccattcagtgtgcgttcgcttcggcccacctaagtaacgctcgatagtgggtcatacactgtactcctcaactgacattcctgagtcatgactagtgacttgtcattctcaccaataaaatatgcccggatgtcaagcaccgaagtcgttctagagacgagacatccataatgcagttgcgtagaaggtcattcctgtgtctagtcaggacagggagctcgcgaatgcgagctactgatatttaaagtcacgcactctctgtccgagacaggctaggtgctagattctgtttaaagcactttatgtggattatctcactattcttattatcctattttacagatgtggaagctgaagcatagagggtttaaatataatttacccaaggtcatcaattggggagtagaagtaggattcaattcctgctccagagcctgcatgttcagctctcttttaatactgcatgtggtccttgataggctactgaccctggaaaagtcatttcaacttttagggctcattggtgaaccataaccaaagggagctcattgtggctaacctctgatggagtttccacttttaataatttatatgatgcaatgcagctatattgtttagttcttgtcattatgtgaaagcatagtatttaaactttgatctcattgattcagcaactgattattttatggccactgtgcacaaagcaatgggctgggtaccacagaggattc

SEQ ID NO: 462873 - DNA, 3685 bp, Homo sapiens
agccagtggtttggctggatggtcagggacttggaagaggcatgatcagaaaattggtgacaaagaagtttggggaagaggctaacctggctacagccactgctgagtgcccaattggccagcagcagctaccaacactgagccctcgatatggcaccattcctcgggatgatcagctagctagttggtggcaggttgattatattggatttcttccatcatggaaagggcagaggtttgttctcactggaatatatccttactctggatatgggtttgcctatcctgcatgcaatgcttctgccaagactgccatccatgggcccacgcaatgccttatctaccgtcacagtattccacaaagcattgcctctgatcaaggcactcactttatggctaaagaactgaagcagtgggctcatgctcatggaattcactggtcttagcataaatgttttaaaaattggattttaaagactgtttttaaagatcgtataaccagaattattatatttagaaatgttactaaagctgttaatctgtatagcctaagtaaaagtaatttttaaagcagccttgataatagataattctttgaatggagaaaattttaatattttggtaagagggttaagcagtatgctaaatgattatccaatttttttttgtcttttctaaactactgaatttaaatagcatttaaacttctgcttctatctcattttccaatgtataacaatttatcagatatcagaaatgatgtcaatttagtagtttattagtttcccaatggctgtgtgttaacactgttttagaattgtgtgtacatcattgatttaaaaaacagaaagaaaggaaacaagaaaataaaaagaagggaggaaagaagtaaggaaggaaaaaatgaaggaaagaagaaaggagaaaggaaggaagaaaaaaggaagggagagagaagagacaaagaggatgagacagaggaaagaaggaaaggatgaaataagaaagagagagagaaagaaagaaaaaagagaaaagaaaggcaagaggaaaaggggaaggaagtaaagaaagaagggaggagggaaggaaggaaggagggaaggaaggaaagaaggaaggaaagaaggaaggaatgaagaaaggaaggaaggaaggaggaaaggaaggaaggaaggagggaaggaaggaaagaaggaaggaaagaaagaaggaaggaatgaagaaaggaaggaaggaagggagggaggggaattttgaggaaacctatccaaatttattacactttacaatttttttttatgaacacacattttctgttttcatactgagttatttaaattaattgacagttgtgttgtaattcttaatatagaatggtagtttaaaaacatatttgagaaaatccttatgttttctttagaattataaatttctgttccattttattttcattttgatattttacactattggtatattttgaaagctatacttttttcactttggagaacttatgcaaagattttaaacgtatacagtagatgggcaacattaatagaacactaaatgaaatattttaaattgggaatgttagcaaataataaattctaataattgagaactctaaaatttagtgcattttgtattctttatgacaccagtaataatcttttttaataaattattttttaaatttctgtaaatagggtaaaactacttacttccatgatagtttttcaatataatatcaaatttatattgactattttatattaacctgatttttcaaatgaaaacgctaacttctaacatattttgctatcgactaacaaatacgaatgatgattaaagtccactgattcagaagtgaactatagtttacactttagtcatatgaattgatatgttacatgaaactgttttctagtaaatctattttcaagcaggttgctagttaaatttttaagagaggtttgatataaaagggtaagaaagaaacaactgactggcttagtagatatcaacatgaaaaaatactgctagataaaaacatatttagcaaagatttgaaaaatgtatgaggtagaagttgatattcagaccagactgaattttagtaaaacaattatttgttttgaaaaaaaacacagatcagaaatctggatttcataatgtactggcacttagaccagaattttattaacactacaaaacaagtttatcttcaggaagatttcacgctttcttcttgaaaagagaactacacatccacagaaaggagaactaatgatttggagagaaataaggtatttagtggagaatatttaagttattaagcttgtaagactttcactatgcctgtagatgacaggacaagaaagaaacccaaaatggaatcagatttcttcctttataatcacttaacatataatttagattaagtcattttaagtaaagaacaaatactattctgaaataaacaaagaagcaaggtcaaatttgatcatatgaattgataagacaatggatgaagttttgccattaagaatcctggtaagacctttttatgtatagaaatgccacaggtaaactaaaggtttgaatacaggaaagtgttatactggtcaattgactcaaatctgtgttaaaaattattaagaagcctatccgtgcttccaactcatattgacaagccttactcttgatgtaaagaaaattaattcttatatacccgagtagttatactagtaatttttaagcaaaattatttgactgaatgataattggctacaaataaaaagacatagttcaattaaatcaattttgacttaataaaaataaggtacactatatacttgacatatggagtttgtgataaattatgggtcaagacattaatttaatatgttctattctttacctctgaggcaaatatcacatatagtagcatttaaaaaaaatggacatactgcataatatattaatattagatgtattttaaatatcaaattaatactttaatatgtataatcaaaatagtttgtttaattattttcatgagtaaggcaaaggtaaaccattagattttattttaaatatcaaattaatactttcatatgtataataaaaatagtttgtttcattattttcatgagtaaggcaaaggtaaaccattagatctttgtatcataagattataacttgtaataaaataattaaggtcattgaagatgttttagaatttcatagttatttactttcaaataattattatgtgagtaggttgtgcaaatgataatacagttctagtagaatattaaaatgactattgtctatggtaattattatggagtgtgattaagttgagtttgaagtggtattgtttgcaaatatatggtttatgatataaccaatagaaagatacattaattagaattactaagagcagtttcatatttattataaatttcaaataaaatattgagaaaaaagtttacttttctgttctgattattttatagttagtaaaagggatctgcaaaactagtggatttctttcaaacatgaaatgtctaacaaagacattttaaaatatttgtattaaaccataaaaataaaatacttttagatcttctgacatatgccttgccatgcatctgtgtataagaacattttctcctct

SEQ ID NO: 462874 - DNA, 1758 bp, Homo sapiens
cccaaggacccagcccctccagctcttgtcccctaatgtggaggcacctcctcttcagaggcctcccgaatgtgccccttgcacctggagtcagctccctactccccctctgtcttctcagcctgcagaccacttccagacatggtggatgctcatggcccatcctgtgccagctggctgtgtcccttgcccctggcaccgggcaggtctgcactgctggcctgcctacaggacctggacctgaacctgtgcaccccacagccggcacccctgggcacagacctgcagggcctccaagaggacgccttgagcatgaagcacgagccaccagggctgcaggccagctccaccgatgacaagaaattcacagtcaagtacccacagaacaaggacaagctgggaaaacagccagaaagagctggcgagggggccccctgcccagccttctcctctcataacagctcttccccaccaccgctgcagaacagaaagagccccagccccttggctttctgcccctgtccccctgtcaactccatctccaaggagctcccatttctcctccacgccttctaccctggatacccacttctcctgcctccaccccacctgttcacctatggggccctaccttctgaccaatgtccccacctcctcatgctgccccaagacccctcctaccccaccatggctatgcctagcctgctgatgatggtcaatgagctggggcaccccagcgctcggtgggagaccctgcttccctacccaggggccttccaagcctctggccaagctctgccttcccaggcccgaaatccaggtgctggagctgccccaaccgactccccaggcctggagcgtggtggcatggcatctccagcaaagcgggtcccattgagttcccagacaggcaccgcagccttgccttacccgctgaaaaagaagaatggcaaaatcctgtacgagtgcaacatatgtggcaagagctttgggcagctctccaatctcaaggtccacctgcgtgtgcacagtggagagcgtccattccagtgtgccttgtgccagaagagcttcactcaacttgcccacctgcagaagcaccacctggtgcacactggggagcggccccacaagtgctcggtgtgccacaagcgcttcagcagctccagtaacctcaagacccacctgcgcctgcactccggggcccggcccttccagtgcagtgtctgccggagtcgcttcacccagcacatccacctgaagctgcaccatcggctgcatgccccacagccctgtggcctggtgcacacccagctgcccctggcctctctggcctgccttgcccaatggcaccagggggcactagatcttatggcggtggcatctgagaaacacatgggctatgacatagatgaggtcaaagtgtcctcgacatcccaggggaaagcaagagcagtgagcctgagcagtgccgggactcccctggtgatggggcaggaccagaacaattaaaaatgtttcttctgtcaaaaagctttgaggcttcctgagcttcaacagtttaggtgtggggtgggggtaatgggggaaagccactgtgtttgccagacctcacacttcacccgggagcaggtcaggggactcagccaggaagagcctgtgctgcctgtgtgtgcggtgcttgcctgcagccatctgcttcagcaaggcttgagttccactccccgtctaggaccaggctctcctcgtctattcacc

SEQ ID NO: 462875 - DNA, 1818 bp, Homo sapiens
cccaaggacccagcccctccagctcttgtcccctaatgtggaggcacctcctcttcagaggcctcccgaatgtgccccttgcacctggagtcagctccctactccccctctgtcttctcagcctgcagaccacttccagacatggtggatgctcatggcccatcctgtgccagctggctgtgtcccttgcccctggcaccgggcaggtctgcactgctggcctgcctacaggacctggacctgaacctgtgcaccccacagccggcacccctgggcacagacctgcagggcctccaagaggacgccttgagcatgaagcacgagccaccagggctgcaggccagctccaccgatgacaagaaattcacagtcaagtacccacagaacaaggacaagctgggaaaacagccagaaagagctggcgagggggccccctgcccagccttctcctctcataacagctcttccccaccaccgctgcagaacagaaagagccccagccccttggctttctgcccctgtccccctgtcaactccatctccaaggagctcccatttctcctccacgccttctaccctggatacccacttctcctgcctccaccccacctgttcacctatggggccctaccttctgaccaatgtccccacctcctcatgctgccccaagacccctcctaccccaccatggctatgcctagcctgctgatgatggtcaatgagctggggcaccccagcgctcggtgggagaccctgcttccctacccaggggccttccaagcctctggccaagctctgccttcccaggcccgaaatccaggtgctggagctgccccaaccgactccccaggcctggagcgtggtggcatggcatctccagcaaagcgggtcccattgagttcccagacaggcaccgcagccttgccttacccgctgaaaaagaagaatggcaaaatcctgtacgagtgcaacatatgtggcaagagctttgggcagctctccaatctcaaggtccacctgcgtgtgcacagtggagagcgtccattccagtgtgccttgtgccagaagagcttcactcaacttgcccacctgcagaagcaccacctggtgcacactggggagcggccccacaagtgctcgataccgtgggttccaggaagaaatcactggaaaagcttccaggcctggagggaaagagaggtgtgccacaagcgcttcagcagctccagtaacctcaagacccacctgcgcctgcactccggggcccggcccttccagtgcagtgtctgccggagtcgcttcacccagcacatccacctgaagctgcaccatcggctgcatgccccacagccctgtggcctggtgcacacccagctgcccctggcctctctggcctgccttgcccaatggcaccagggggcactagatcttatggcggtggcatctgagaaacacatgggctatgacatagatgaggtcaaagtgtcctcgacatcccaggggaaagcaagagcagtgagcctgagcagtgccgggactcccctggtgatggggcaggaccagaacaattaaaaatgtttcttctgtcaaaaagctttgaggcttcctgagcttcaacagtttaggtgtggggtgggggtaatgggggaaagccactgtgtttgccagacctcacacttcacccgggagcaggtcaggggactcagccaggaagagcctgtgctgcctgtgtgtgcggtgcttgcctgcagccatctgcttcagcaaggcttgagttccactccccgtctaggaccaggctctcctcgtctattcacc

SEQ ID NO: 462876 - DNA, 551 bp, Homo sapiens
aaccctggagaaattgcttagcctcgctgtgacttcttaagcccgcatctctcatcatcagctcatgcatagccttcgagagccctgcactcctgtagttccagcgggtagcattgctatgagtgatgaagcccccggatggtctcagtggaacaatggtcgtgccaaaaagggccgcggccacgtgcagcctattcgctgcactaactgtgcccgatgcgtgcccaaggacaaggccattaagacattcgtcattcgaaacatagtgaaggccgcagcagtcagggacatttctgaagcgagcgtcttcgatgcctatgtgcttcccaagctgtatgtgaagctacattactgtgtgagttgtgcaattcacagcaaagtagtcaggaatcgatctcgtgaagcccgcaaggaccgaacacccccatcccgatttagacctgcgggtgctgccccacgtcccccaccaaagcccatgtaaggagctgagttcttaaagactgaagacaggctattctctggagaaaaataaaatggaaattgtacttaaa

SEQ ID NO: 462877 - DNA, 481 bp, Homo sapiens
tgtggtgcacatggggcatgtacgggcaacactcaatcctgcccaggaagcttccttgagccttgagggctgcctcacaatggatcctaggcttcttttttcccttgctgcttgcctgtcagcagtccaactaccagggccagagccccatcaaagaatcttcagtgccagccagaaagaatgatgaactcctcgtgtcaagggagtttggggcaaccagtcaaaccatggcctcatgggaagcagctgactaggcaatgagagaggaatacaaaagacaaggcactgtgaagccaagtctggttggggagaagaaaccaatatgcctgaaacagggaaccagaaaggactcagacaaaactgctgacaagtatggggtttcttggggtaggtggtgaaaatattccaaaataagattatagcgatgttttaataatcccctggatataataaaaaaacatcgaattgtacacttaaaatg

SEQ ID NO: 462878 - DNA, 1018 bp, Homo sapiens
gctgaaaacgtaatacccaaaataggcctggcatggtggttcatgcctgtaaccctagcactttgggaggccgaggaaggcagatcacttgagatcaggaaagcaggatacccttctcagctttgcccagtgaatcacatgacccctgagatatgtaactcaggaggaattgcctttcagggcctctcagctgtgttgtgtggggggcatgtacagtcaagactccaaccttcccagacagctgtcttgagccttgaggactgcctcacaatggatcctaggcttcttttgtcccttgctgcctgtctgtattatactaaagccacttcacattacttgttgcatatgctgtttcctttgcccagcacacctgtcactcacctcaaccctttctctcttttccccatctttctgtggctagctcctcctcattctttaggtctcagtgtagatagcaccactatcaggaaggagtccagacactgccaggcctaagaaatgtaaattaaatgctctcaagggatgagagacactggaagctgggacgctcttggaactctgttgccatcatcaaggcttccagatacagccctctaggtcatccagaggtgccagccagccctcaccagtggtcagcttttcctcagtggagtggtcagcagtccaactaccagggccagagccccatcaaagaatcttcagtgccagccagaaagaatgatgaactcctcgtgtcaagggagtttggggcaaccagtcaaaccatggcctcatgggaagcagctgactaggcaatgagagaggaatacaaaagacaaggcactgtgaagccaagtctggttggggagaagaaaccaatatgcctgaaacagggaaccagaaaggactcagacaaaactgctgacaagtatggggtttcttggggtaggtggtgaaaatattccaaaataagattatagcgatgttttaataatcccctggatataataaaaaaacatcgaattgtacacttaaaatg

SEQ ID NO: 462879 - DNA, 1194 bp, Homo sapiens
gctgaaaacgtaatacccaaaataggcctggcatggtggttcatgcctgtaaccctagcactttgggaggccgaggaaggcagatcacttgagatcaggaaagcaggatacccttctcagctttgcccagtgaatcacatgacccctgagatatgtaactcaggaggaattgcctttcagggcctctcagctgtgttgtgtggggggcatgtacagtcaagactccaaccttcccagacagctgtcttgagccttgaggactgcctcacaatggatcctaggcttcttttgtcccttgctgcctgtctgtattatactaaagccacttcacattacttgttgcatatgctgtttcctttgcccagcacacctgtcactcacctcaaccctttctctcttttccccatctttctgtggctagctcctcctcattctttaggtctcagtgtagatagcaccactatcaggaaggagtccagacactgccaggcctaagaaatgtaaattaaatgctctcaagggatgagagacactggaagctgggacgctcttggaactctgttgccatcatcaaggcttccagatacagccctctaggtcatccagaggtgccagccagccctcaccagtggtcagcttttcctcagtggagtggtaggtgagccagtggagcttgctctgaagatactagagggagccaaagctgtctggcccttcagtgtgactcagtttccagactctttctctttagacataaatgaagaacaagtcaaccttgatgcctttgagggttggttcagcggatgatgtgttgtggggttttcccacaggtcagcagtccaactaccagggccagagccccatcaaagaatcttcagtgccagccagaaagaatgatgaactcctcgtgtcaagggagtttggggcaaccagtcaaaccatggcctcatgggaagcagctgactaggcaatgagagaggaatacaaaagacaaggcactgtgaagccaagtctggttggggagaagaaaccaatatgcctgaaacagggaaccagaaaggactcagacaaaactgctgacaagtatggggtttcttggggtaggtggtgaaaatattccaaaataagattatagcgatgttttaataatcccctggatataataaaaaaacatcgaattgtacacttaaaatg

SEQ ID NO: 462880 - DNA, 4621 bp, Homo sapiens
agcccaggctttcttggaaaactggctggagcaccactgactggaataggagctgcgatcccgggaagaggagctgactcgggcggctctgcagcagaagtctcaggaggagctgctaaagcggcgtgagcagcagctggcagagcgcgagatcgacgtgctggagcgggaacttaacattctgatattccagctaaaccaggagaagcccaagatttccagcacaagataaccgtgcaggcctctcccaacttggacaaacggcggagcctgaacagcagcagttccagtcccccgagcagccccacaatgatgccccgactccgagccatacagtagaaagaaacttaccagagattgggtgaaataaataattttctcattgttttcatgttttgagtaaggtagtttcacaactgatatgattcatttagcttttttaacaaagccaatattggttaatatgattgttgtggttaatatggttaataatgttctttttagtgacttcagatgaaagcaataaaacttggggaaggaacacagtctttcgacaagaagaatttgaggatgtaaaaaggaattttaagaaaaaaggttgtacctggggaccaaattccattcaaatgaaagatagaacagattgcaaagaaaggataagacctctctccgatggcaacagtccttggtcaactatcttaataaaaaatcagaaaaccatgcccttggcttcattgtttgtggaccagccagggtcctgtgaagagccaaaactttcccctgatggattagaacacagaaaaccaaaacaaataaaattgcctagtcaggcctacattgatctacctcttgggaaagatgctcagagagagaatcctgcagaagctgaaagctgggaggaggcagcctctgcgaatgctgccacagtctccattgagatgactcctacgaatagtctgagtagatccccccagagaaagaaaacggagtcagctctgtatgggtgcaccgtccttctggcatcggtggctctgggactggacctcagagagcttcataaagcacaggctgctgaagaaccgttgcccaaggaagagaagaagaaacgagagggaatcttccagcgggcttccaagtcccgcagaagcgccagtcctcccacaagcctgccatccacctgtggggaggccagcagcccaccctccctgccactgtcaagtgccctgggcatcctctccacaccttctttctccacaaagtgcctgctgcagatggacagtgaagatccactggtggacagtgcacctgtcacttgtgactctgagatgctcactccggatttttgtcccactgccccaggaagtggtcgtgagccagccctcatgccaagacttgacactgattgtagtgtatcaagaaacttgccgtcttccttcctacagcagacatgtgggaatgtaccttactgtgcttcttcaaaacatagaccgtcacatcacagacggaccatgtctgatggaaatccgaccccaactggtgcaactattatctcagccactggagcctctgcactgccactctgcccctcacctgctcctcacagtcatctgccaagggaggtctcacccaagaagcacagcactgtccacatcgtgcctcagcgtcgccctgcctccctgagaagccgctcagatctgcctcaggcttacccacagacagcagtgtctcagctggcacagactgcctgtgtagtgggtcgcccaggaccacatcccacccaattcctcgctgccaaggagagaactaaatcccatgtgccttcattactggatgctgacgtggaaggtcagagcagggactacactgtgccactgtgcagaatgaggagcaaaaccagccggccatctatatatgaactggagaaagaattcctgtcttaaactaagtgccttactgttgtttaagcatttttttaaggtgaacaaatgaacacaatgtatctacctttgaactgtttcatgctgctgtgttttcaaaagctgtggccatgttcctaaattagtaagatatatccagcttctcaaaaaatgtatatgattgctgttagccatgtctattgtttttcctctggattcttttcttataacttggaatacacaaaagtgtaaaacaagagatgtgcaccaatgaaaactatgctgggtcgaattaccttcagcacaatgttaatgtttttgttctcatttatgcctttgtccatttgcacacaacagaaattgtaatgagcttcactatttttgtttctttccttccttttttttcttttttcctttctttcctttttcttgtcttgtttcttgtttttttttcttgtagtttcttttcttaattgtcatttttgcaacaaaaagccaagaaagagctttagtttcttggcaagaataatgtgatattagtaagtaaaggtcttaaaagtctgacgactggaatagatataaagtcctgtttaaactacctaaccttggctgtgggccgataatgcatatgtccagttctcacttaaattatgcaatgatatttctctctgaggaaattatacggaatgtaacttataaaagctttactgaatataagttataagcattttattcattagaactccaaaatagatgttcaaagttcagtccttgccatttgactgagaccacatggtgtgccccttgagtgaggctaatctttaggtttttcctatagaaaacattcttcctccatcagtagccctttatttgatattcagaagtggaaagctttttcattctccagtagaacttttaaaaattgttacagatacctagctcttcacagatatcatgtactgtaaacagtcatgtgtcttaattttattttctctatttgagtgcataattatcctaataatcccaaagacactgacaactcaaggaacagcagtacagtactattagaagttaagtatgttgttgttatttcacatttcatttaattgtggataaatgttagacatctgttgaaataagctcatatggtggaaacgacaactatattatgaattattttcagaaatggatctttgaatagcagatcaggatttaaataataaaattatctatgaatcacttttatggtcatacatatatgatacaaatccagagttattggtgcagaaatggctacccgagagcttggtaaatttgccttggtttcttatgttaaatgtattgtgcttcccttctgtctctagaatgtggctcttcagaagacagacaatcgacatttaaatttttccaaacaatgaaaaactaaattaaaaacattgcttgatatttcatttaaaattgcaccttgcttaaggtttactgaataactgaaatgtcagcaatttaaaataaattcaattgtgtgataaaatatctcacctataatagaagaaaaggaaaatcatattatttggcaattttgcagcattgtggttgcctaacaggtatatccagcagatgagaaacagtatgaaaggattgtattaacatggtaagttttgccctaaggaaaacgatcttgcattctggattcttgcagcaaagtctcagatacttaatacgttttcttgttttatcatctgttctatgattcggcttcactttgtgtggttattgaattatgtaacagagatttggttttcccaaaatgttatcacatttgaaactatgattgctttgtgttcagtccttttggaacacgtagcttccagcttaagggtagagaaatatatacctaaaatcatcaatacatgaaagaaaaaggatggaaactatgtcctcagttttacttctaccaaaacatccctgtatgtgtgtgcatgtatgttggcgtgtgtgtgtgtgcatgcatattagtaaatgtgtgtttgcatgtgtgtgttggggagtgtatgtgatctgggtgtttgtttatctctgttattattcccctttagctttattttagtcaactctacattatgatgaatttcaaaatgaagctgtattaaaataattgtaatataacaattcaatctcacatgttactgcagatagttaacttttgctgcaatctattgtacatttgcaattttctgtgttagtaaacttagcagaatctggttatttatttttgtgtaggcttaatgttcactgaaagataagtcaattactgttagtaaaaaattaaggtactctcactgcagagatttaaggcctgggcctaatgtgctgtattatgaagccttgtgactgaaaaatatgtttacatatgttgtctatttttttaataaacttttatagctggtctatttgctcagtagctttgatcctctcttgattattgtgactatagtttgcaatggtttattttgtattcaataagaaaaattgtgttaataaagattattgtttaataagccaggtattaacctgctaaatatattaaactgaaaatcactaaatgagtcattcaattaaatacatcaaaaaaggtagaatgaaatgttttatttcaaatttttttggtttacatatgcattgaaaagttatatttcatggtgagc

SEQ ID NO: 462881 - DNA, 4530 bp, Homo sapiens
agcccaggctttcttggaaaactggctggagcaccactgactggaataggagctgcgatcccgggaagaggagctgactcgggcggctctgcagcagaagtctcaggaggagctgctaaagcggcgtgagcagcagctggcagagcgcgagatcgacgtgctggagcgggaacttaacattctgatattccagctaaaccaggagaagcccaaggtaaagaagaggaagggcaagtttaagagaagtcgtttaaagctcaaagatggacatcgaatcagtttaccttcagatttccagcacaagataaccgtgcaggcctctcccaacttggacaaacggcggagcctgaacagcagcagttccagtcccccgagcagccccacaatgatgccccgactccgagccatacagttgacttcagatgaaagcaataaaacttggggaaggaacacagtctttcgacaagaagaatttgaggatgtaaaaaggaattttaagaaaaaaggttgtacctggggaccaaattccattcaaatgaaagatagaacagattgcaaagaaaggataagacctctctccgatggcaacagtccttggtcaactatcttaataaaaaatcagaaaaccatgcccttggcttcattgtttgtggaccagccagggtcctgtgaagagccaaaactttcccctgatggattagaacacagaaaaccaaaacaaataaaattgcctagtcaggcctacattgatctacctcttgggaaagatgctcagagagagaatcctgcagaagctgaaagctgggaggaggcagcctctgcgaatgctgccacagtctccattgagatgactcctacgaatagtctgagtagatccccccagagaaagaaaacggagtcagctctgtatgggtgcaccgtccttctggcatcggtggctctgggactggacctcagagagcttcataaagcacaggctgctgaagaaccgttgcccaaggaagagaagaagaaacgagagggaatcttccagcgggcttccaagtcccgcagaagcgccagtcctcccacaagcctgccatccacctgtggggaggccagcagcccaccctccctgccactgtcaagtgccctgggcatcctctccacaccttctttctccacaaagtgcctgctgcagatggacagtgaagatccactggtggacagtgcacctgtcacttgtgactctgagatgctcactccggatttttgtcccactgccccaggaagtggtcgtgagccagccctcatgccaagacttgacactgattgtagtgtatcaagaaacttgccgtcttccttcctacagcagacatgtgggaatgtaccttactgtgcttcttcaaaacatagaccgtcacatcacagacggaccatgtctgatggaaatccgaccccaactggtgcaactattatctcagccactggagcctctgcactgccactctgcccctcacctgctcctcacagtcatctgccaagggaggtctcacccaagaagcacagcactgtccacatcgtgcctcagcgtcgccctgcctccctgagaagccgctcagatctgcctcaggcttacccacagacagcagtgtctcagctggcacagactgcctgtgtagtgggtcgcccaggaccacatcccacccaattcctcgctgccaaggagagaactaaatcccatgtgccttcattactggatgctgacgtggaaggtcagagcagggactacactgtgccactgtgcagaatgaggagcaaaaccagccggccatctatatatgaactggagaaagaattcctgtcttaaactaagtgccttactgttgtttaagcatttttttaaggtgaacaaatgaacacaatgtatctacctttgaactgtttcatgctgctgtgttttcaaaagctgtggccatgttcctaaattagtaagatatatccagcttctcaaaaaatgtatatgattgctgttagccatgtctattgtttttcctctggattcttttcttataacttggaatacacaaaagtgtaaaacaagagatgtgcaccaatgaaaactatgctgggtcgaattaccttcagcacaatgttaatgtttttgttctcatttatgcctttgtccatttgcacacaacagaaattgtaatgagcttcactatttttgtttctttccttccttttttttcttttttcctttctttcctttttcttgtcttgtttcttgtttttttttcttgtagtttcttttcttaattgtcatttttgcaacaaaaagccaagaaagagctttagtttcttggcaagaataatgtgatattagtaagtaaaggtcttaaaagtctgacgactggaatagatataaagtcctgtttaaactacctaaccttggctgtgggccgataatgcatatgtccagttctcacttaaattatgcaatgatatttctctctgaggaaattatacggaatgtaacttataaaagctttactgaatataagttataagcattttattcattagaactccaaaatagatgttcaaagttcagtccttgccatttgactgagaccacatggtgtgccccttgagtgaggctaatctttaggtttttcctatagaaaacattcttcctccatcagtagccctttatttgatattcagaagtggaaagctttttcattctccagtagaacttttaaaaattgttacagatacctagctcttcacagatatcatgtactgtaaacagtcatgtgtcttaattttattttctctatttgagtgcataattatcctaataatcccaaagacactgacaactcaaggaacagcagtacagtactattagaagttaagtatgttgttgttatttcacatttcatttaattgtggataaatgttagacatctgttgaaataagctcatatggtggaaacgacaactatattatgaattattttcagaaatggatctttgaatagcagatcaggatttaaataataaaattatctatgaatcacttttatggtcatacatatatgatacaaatccagagttattggtgcagaaatggctacccgagagcttggtaaatttgccttggtttcttatgttaaatgtattgtgcttcccttctgtctctagaatgtggctcttcagaagacagacaatcgacatttaaatttttccaaacaatgaaaaactaaattaaaaacattgcttgatatttcatttaaaattgcaccttgcttaaggtttactgaataactgaaatgtcagcaatttaaaataaattcaattgtgtgataaaatatctcacctataatagaagaaaaggaaaatcatattatttggcaattttgcagcattgtggttgcctaacaggtatatccagcagatgagaaacagtatgaaaggattgtattaacatggtaagttttgccctaaggaaaacgatcttgcattctggattcttgcagcaaagtctcagatacttaatacgttttcttgttttatcatctgttctatgattcggcttcactttgtgtggttattgaattatgtaacagagatttggttttcccaaaatgttatcacatttgaaactatgattgctttgtgttcagtccttttggaacacgtagcttccagcttaagggtagagaaatatatacctaaaatcatcaatacatgaaagaaaaaggatggaaactatgtcctcagttttacttctaccaaaacatccctgtatgtgtgtgcatgtatgttggcgtgtgtgtgtgtgcatgcatattagtaaatgtgtgtttgcatgtgtgtgttggggagtgtatgtgatctgggtgtttgtttatctctgttattattcccctttagctttattttagtcaactctacattatgatgaatttcaaaatgaagctgtattaaaataattgtaatataacaattcaatctcacatgttactgcagatagttaacttttgctgcaatctattgtacatttgcaattttctgtgttagtaaacttagcagaatctggttatttatttttgtgtaggcttaatgttcactgaaagataagtcaattactgttagtaaaaaattaaggtactctcactgcagagatttaaggcctgggcctaatgtgctgtattatgaagccttgtgactgaaaaatatgtttacatatgttgtctatttttttaataaacttttatagctggtctatttgctcagtagctttgatcctctcttgattattgtgactatagtttgcaatggtttattttgtattcaataagaaaaattgtgttaataaagattattgtttaataagccaggtattaacctgctaaatatattaaactgaaaatcactaaatgagtcattcaattaaatacatcaaaaaaggtagaatgaaatgttttatttcaaatttttttggtttacatatgcattgaaaagttatatttcatggtgagc

SEQ ID NO: 462882 - DNA, 647 bp, Homo sapiens
tgtgtgactatatccaacatataagctctgattcattatttgtgtgactatatccaacatataagctcagaatcattatttattgacctgaaccccgagaagtaagaaaccaaaataagaaatcgatcctgcaatattctttgcagttagggtctgaccatttttgtttttattgctgtgtgctaaatacatggctatgaagataaaggaaaaccatgaaataccagttctccctttttgcctccaacagatttccagcacaagataaccgtgcaggcctctcccaacttggacaaacggcggagcctgaacagcagcagttccagtcccccgagcagccccacaatgatgccccgactccgagccatacagtgtgagctttctgcactgccacgggggctcctgtgttgacttctctcctttcacttgacttggattcaaattgagcagatgtgttttcatagcaggttgtagatgagtgtaggacatttcgtaggtgccacaactatttgagaaacaaaacttgagcataggttccttagtctaattttcttctactcacaaaaaatgaattttagatgctatgcagttggtgatgcgacctggccccggagtagaaagtgaaacaccacatctcgagacattct

SEQ ID NO: 462883 - DNA, 653 bp, Homo sapiens
agcccaggctttcttggaaaactggctggagcaccactgactggaataggagctgcgatcccgggaagaggagctgactcgggcggctctgcagcagaagtctcaggaggagctgctaaagcggcgtgagcagcagctggcagagcgcgagatcgacgtgctggagcgggaacttaacattctgatattccagctaaaccaggagaagcccaaggtaaagaagaggaagggcaagtttaagagaagtcgtttaaagctcaaagatggacatcgaatcagtttaccttcagatttccagcacaagataaccgtgcaggcctctcccaacttggacaaacggcggagcctgaacagcagcagttccagtcccccgagcagccccacaatgatgccccgactccgagccatacagtgtgagctttctgcactgccacgggggctcctgtgttgacttctctcctttcacttgacttggattcaaattgagcagatgtgttttcatagcaggttgtagatgagtgtaggacatttcgtaggtgccacaactatttgagaaacaaaacttgagcataggttccttagtctaattttcttctactcacaaaaaatgaattttagatgctatgcagttggtgatgcgacctggccccgga

SEQ ID NO: 462884 - DNA, 3306 bp, Homo sapiens
agcgtgaacctgggaggcagagcttgcagtgagcctagatcgcgtcactgcactccagcctgggcgacagagtgagactctgtctcaaaaaaaaaaaaaaagtcaaaacaagagaacatactaaatgattccatttttttatttatgacttcatgactaccattaagaaaatataacctgttgggaaactgtttctgccttgatgatgttgtacagacaagagataaacagtgaggaatatgcttagatgtattgggaaagacacgggtctgtggcattgtcacaagggtacacgaatactgagagtgaatgctgaaggaatgatccccattggtggtgaccctcaggtgagactagggtgcctgtgtttcagcaaagcctgggcaattggaatgcagggctcctaagattccatgacacccccaccttctaattctgttattgcaactgcagacggttacctggcacgctggccacaatctacctcactcttatcagagtctgagctactggcagtgctttcagctctgagttgaggcacctcaaaccttgtttttgtggtgaaggatcctaaagtgctgtgggagtgatcacatttttcacaacagtaagtccctggccccacctcttctgccacaaacgtcagcatggtggtatcagccggcccttggtccagcgagaaggcagagatgaacattctagaaatcaacgagaaattgcgcccccagttggcagagaacaaacagcagttcggaaacctcaaagagagatgttttctaactcaactggccggcttcctggccaaccgacagaagaaatacagcaatataaagtcctggttcactctcaggaacgagagctgacgcagttaaaggagaagttacgggaagggagagatgcctcccgctcattgaatgagcatctccaggccctcctcactccggatgagccggacaagtcccaggggcaggacctccaagaacagctggctgaggggtgtagactggcacagcaccttgtccaaaagctcagcccagaaaatgacgaagatgaggatgaagatgttcaagttgaggaggatgagaaagtactggaatcatctgcccccagggaggtgcagaaggctgaagagagcaaagtcgctgaggactcactggaggaatgtgccatcacttgttcaaatagccacggcccttgtgactccaaccagcctcacaagaacatcaaaatcacatttgaggaagacgaagtcaactcaactctggttgtagacagagaatcctctcatgatgaatgtcaggatgctctaaacattctcccagtccctggccccacctcttctgccacaaacgtcagcatggtggtatcagccggccctttgtccagcgagaaggcagagatgaacattctagaaatcaatgagaaattgcgcccccagctggcagagaagaaacagcagttcagaaacctcaaagagaaatgttttctaactcaactggccggcttcctggccaaccagcagaacaaatacaaatatgaagagtgcaaagatctcataaaatctatgctgaggaatgagcgacagttcaaggaggagaagcttgcagagcagctcaagcaagctgaggagctcaggcaatataaagtcctggttcacgctcaggaacgagagctgacccagttaagggagaagttgcgggaagggagagatgcctcccgctcattgaatgagcatctccaggccctcctcactccggatgagccggacaagtcccaggggcaggacctccaagaacagctggctgaggggtgtagactggcacagcaccttgtccaaaagctcagcccagaaaatgacaacgatgacgatgaagatgttcaagttgaggtggctgagaaagtgcagaaatcgtctgcccccagggagatgcagaaggctgaagaaaaggaagtccctgaggactcactggaggaatgtgccatcacttgttcaaatagccatggcccttatgactccaaccagccacataggaaaaccaaaatcacatttgaggaagacaaagtcgactcaactctcattggctcatcctctcatgttgaatgggaggatgctgtacacattattccagaaaatgaaagtgatgatgaggaagaggaagaaaaaggaccagtgtctcccaggaatctgcaggagtctgaagaggaggaagtcccccaggagtcctgggatgaaggttattcgactctctcaattcctcctgaaatgttggcctcgtacaagtcttacagcagcacatttcactcattagaggaacagcaagtctgcatggctgttgacataggcagacatcggtgggatcaagtgaaaaaggaggaccacgaggcaacaggtcccaggctcagcagggagctgctggatgagaaagggcctgaagtcttgcaggactcactggatagatgttattcaactccttcaggttgtcttgaactgactgactcatgccagccctacagaagtgccttttacatattggagcaacagcgtgttggcttggctgttgacatggatgaaattgaaaagtaccaagaagtggaagaagaccaagacccatcatgccccaggctcagcagggagctgctggatgagaaagagcctgaagtcttgcaggactcactgggtagatgttattcgactccttcaggttatcttgaactgcctgacttaggccagccctacagcagtgctgtttactcattggaggaacagtaccttggcttggctcttgacgtggacagaattaaaaaggaccaagaagaggaagaagaccaaggcccaccatgccccaggctcagcagggagctgctggaggtagtagagcctgaagtcttgcaggactcactggatagatgttattcaactccttccagttgtcttgaacagcctgactcctgccagccctatggaagttccttttatgcattggaggaaaaacatgttggcttttctcttgacgtgggagaaattgaaaagaaggggaaggggaagaaaagaaggggaagaagatcaaagaaggaaagaagaaggggaagaaaagaaggggaagaagatcaaaacccaccatgccccagtgtctgctgttgcaaaaagaagaaaacattctctgcctgagttttaatttttgtccaaagttaattttaatctatacaattaaaaccttttgctatcactctggacttttggattgttttttacattcagtgttataatatttgattatgctgattggttttggtgggtactgatgc

SEQ ID NO: 462885 - DNA, 342 bp, Homo sapiens
gggaagaagatcaaaacccaccatgccccaggctcagcagggagctgctggatgagaaagggcctgaagtcttgcaggactcactggatagatgttattcaactccttcaggttgtcttgaactgactgactcatgccagccctacagaagtgccttttacatattggagcaacagcgtgttggcttggctgttgacatggatgaaattgaaaagtaccaagaagtggaagaagaccaagacccatcatgccccaggctcagcggggagctgttggatgagaaagagcctgaagtcttgcaggagtcactggatagatgctattcaactccttcaggttgtc

SEQ ID NO: 462886 - DNA, 495 bp, Homo sapiens
aaccagagtcacagaatatcagagccaaaggaacatttgcagacggttacctggcacgctggccacaatctacctcactcttatcagagtctgagctactggcagtgctttcagctctgagttgaggcacctcaaaccttgtttttgtggtgaaggatcctaaagtgctgtgggagtgatcacatttttcacaacagtaagtccctggccccacctcttctgccacaaacgtcagcatggtggtatcagccggcccttggtccagcgagaaggcagagatgaacattctagaaatcaacgagaaattgcgcccccagttggcagagaacaaacagcagttcggaaacctcaaagagagatgttttctaactcaactggccggcttcctggccaaccgacagaagaaatacaagtatgaagagtgtaaagacctcataaaatttatgctgaggaatgagcgacagttcaaggaggagaagcttgcagagcagctga

SEQ ID NO: 462887 - DNA, 2613 bp, Homo sapiens
agcgtgaacctgggaggcagagcttgcagtgagcctagatcgcgtcactgcactccagcctgggcgacagagtgagactctgtctcaaaaaaaaaaaaaaagtcaaaacaagagaacatactaaatgattccatttttttatttatgacttcatgactaccattaagaaaatataacctgttgggaaactgtttctgccttgatgatgttgtacagacaagagataaacagtgaggaatatgcttagatgtattgggaaagacacgggtctgtggcattgtcacaagggtacacgaatactgagagtgaatgctgaaggaatgatccccattggtggtgaccctcaggtgagactagggtgcctgtgtttcagcaaagcctgggcaattggaatgcagggctcctaagattccatgacacccccaccttctaattctgttattgcaactgcagacggttacctggcacgctggccacaatctacctcactcttatcagagtctgagctactggcagtgctttcagctctgagttgaggcacctcaaaccttgtttttgtggtgaaggatcctaaagtgctgtgggagtgatcacatttttcacaacagtaagtccctggccccacctcttctgccacaaacgtcagcatggtggtatcagccggcccttggtccagcgagaaggcagagatgaacattctagaaatcaacgagaaattgcgcccccagttggcagagaacaaacagcagttcggaaacctcaaagagagatgttttctaactcaactggccggcttcctggccaaccgacagaagaaatacagcaatataaagtcctggttcactctcaggaacgagagctgacgcagttaaaggagaagttacgggaagggagagatgcctcccgctcattgaatgagcatctccaggccctcctcactccggatgagccggacaagtcccaggggcaggacctccaagaacagctggctgaggggtgtagactggcacagcaccttgtccaaaagctcagcccagaaaatgacgaagatgaggatgaagatgttcaagttgaggaggatgagaaagtactggaatcatctgcccccagggaggtgcagaaggctgaagagagcaaagtcgctgaggactcactggaggaatgtgccatcacttgttcaaatagccacggcccttgtgactccaaccagcctcacaagaacatcaaaatcacatttgaggaagacgaagtcaactcaactctggttgtagacagagaatcctctcatgatgaatgtcaggatgctctaaacattctcccagtccctggccccacctcttctgccacaaacgtcagcatggtggtatcagccggccctttgtccagcgagaaggcagagatgaacattctagaaatcaatgagaaattgcgcccccagctggcagagaagaaacagcagttcagaaacctcaaagagaaatgttttctaactcaactggccggcttcctggccaaccagcagaacaaatacaaatatgaagagtgcaaagatctcataaaatctatgctgaggaatgagcgacagttcaaggaggagaagcttgcagagcagctcaagcaagctgaggagctcaggcaatataaagtcctggttcacgctcaggaacgagagctgacccagttaagggagaagttgcgggaagggagagatgcctcccgctcattgaatgagcatctccaggccctcctcactccggatgagccggacaagtcccaggggcaggacctccaagaacagctggctgaggggtgtagactggcacagcaccttgtccaaaagctcagcccagaaaatgacaacgatgacgatgaagatgttcaagttgaggtggctgagaaagtgcagaaatcgtctgcccccagggagatgcagaaggctgaagaaaaggaagtccctgaggactcactggaggaatgtgccatcacttgttcaaatagccatggcccttatgactccaaccagccacataggaaaaccaaaatcacatttgaggaagacaaagtcgactcaactctcattggctcatcctctcatgttgaatgggaggatgctgtacacattattccagaaaatgaaagtgatgatgaggaagaggaagaaaaaggaccagtgtctcccaggaatctgcaggagtctgaagaggaggaagtcccccaggagtcctgggatgaaggttattcgactctctcaattcctcctgaaatgttggcctcgtacaagtcttacagcagcacatttcactcattagaggaacagcaagtctgcatggctgttgacataggcagacatcggtgggatcaagtgaaaaaggaggaccacgaggcaacaggtcccaggctcagcagagagctgctggatgagaaagggcctgaagtcttgcaggactcactggatagatgttattcaactccttcaggttgtcttgaactgactgactcatgccagccctacagaagtgccttttacgtattggagcaacagcgtgttggcttggctgttaacatggatgaaattgaaaagtaccaagaaataaactcgtaaccctgtccttc

SEQ ID NO: 462888 - DNA, 685 bp, Homo sapiens
atatctggagaaaccatgtcaaagctttccaagagagactgtgaacagtacctggggaacaccaaaaagagagatgataaagaagggatgacaagtccctgcaggcctggaccaagtgcaacacagaacaagcaacaagaccaaaagaaagcagtgtgtcttgttaagtttctttgcaaggctttaaatcagctgatcgaataccataagaggaattctggactgaagagttatgaagtcatttcagacacttccagacaatttgtgttaattaaattctcactggttgagttccattctacactggaagagcatttttcctggaaaggctcctcaaaatggacaccatcaagagtcacctcctcagtgaagccttccatggtttcataccacccatccctatcggaatgaatgtatccttgttctccgttatcccagtattttgcctgggcttctgtcacactactttcaatgtctatacctcagttatcgaatcgaaaaacaagagtcatcagtctctaaggtccttgcaagcttcaaaactttatatttttgtcaattacaactgaataaagctgaacaacttattatttatggatacttgctcaagcaccatataactctttcagatattttaaaagaatatgtttgcaaaagactccaaatcaatgtattaaattgaaat

SEQ ID NO: 462889 - DNA, 1267 bp, Homo sapiens
tggagacatggaatttttgcaaaaaaaatggggtagaggaaaataagacatctgtgtgagtatataaccatttgatctctttttttagccctctccagggtcaccctagaatcagatctgctccccagcatcttctgtttcctggagtgtgttgtctgctactttggattggccatgacaggctggagctgccttgtgacaggagcaggagggtttctgggttagagtatcatccgcctcttggtggaggagaaggagctgaaggagatcagggccttggacaaggccttcagaccggaattgaggaaggaattttctgaaattgcagaatttgctgtagcaacttcttgtgcaaataactccatgaggaaagtagaaaaggagtcatatccaactggacaatgaactatcaagatccagaaacataaaacaacttgctaagaccatctggttaatgtgtagcagacctcagaccagagcttcatccagaagcatcatcactttactctggagctgatccttggcaaagtgggtcttcagtctctccctttgcctctctgggtgcccaattccctgtcctcctccccaacccagggggagacagacatagagaggttaattaactcgttgaaagtctcagagttagaatatggcaaagctggatttgaacccagacagtctacccagatccagtaggtatcaggaccttcaagccatcctcgaacatctatgtaacaacatctttatcagtttcagaaatcgtttcagaaatcgttctgataacctgaccggtgttcacacagagctccagaacaagaccaagctgacggtgctggaaggagacattctggatgagtcatgcctgaagagagcctgccaggacatgtcggtcatcatccacaccacctccatcatagacatcatcggtgtcactcacagagagtccatcatgaacatcaatgtgaaacgtacagtagcctggggaggagatgaagcaaggtggggaattaaggatcacaaagaaggacaggaagggaaaagaagtctctccactgaacacctgctatgctctggaccaagtgtctttgctgatcactaccaactgggggagttcaaagctgctatcttcagttttttacatgaggaaaccagtgctacagatggcaagtaacttgtccaaggcccccccaggtaagtaagtaaataggagagttagactttaaactcacccctgtgtgactccaaaggctgtggacactctttctat

SEQ ID NO: 462890 - DNA, 452 bp, Homo sapiens
tggagacatggaatttttgcaaaaaaaatggggtagaggaaaataagacatctgtgtgagtatataaccatttgatctctttttttagccctctccagggtcaccctagaatcagatctgctccccagcatcttctgtttcctggagtgtgttgtctgctactttggattggccatgacaggctggagctgccttgtgacaggagcaggagggtttctgggttagagtatcatccgcctcttggtggaggagaaggagctgaaggagatcagggccttggacaaggccttcagaccggaattgaggaaggaattttctggtaagtaaacttgattcatgggtgtgtggttccattttagacactgcatgggtgcaggaaggtggaccttttctagcaagttacagagaacagtagtcaaatctaagccaatctcacatcgatagtcttaaaa

SEQ ID NO: 462891 - DNA, 1390 bp, Homo sapiens
ttcacaaaggacaccatttacctgaagacctcaccagtgggtccctgcctctctagacttccctgagctttgttttgttttgtagcaaccttggcacctttggtgaaggcaaaataaaaggaagtgaagttatagatgagtgtgtaagtgtgtgtgtttgtgtgtgtgagagagagagagcaaaagagagagaaaatgagggggagagaaaatcagagagagagaatgagaaagagaaagaatgcatgagaaagagtgagagagagagggagaggataggagaaagagacagcatcagtgagagagagagagcatgcacaagtgcacagcacagagcagagacagagtaagaggcagtataaggccggatatccctcttttcgatttttcatttatggctttattttttaaccatttgcttctgttgctcaatacccccaagaaattgcagaatttgctgtagcaacttcttgtgcaaataactccatgaggaaagtagaaaaggagtcatatccaactggacaatgaactatcaagatccagaaacataaaacaacttgctaagaccatctggttaatgtgtagcagacctcagaccagagcttcatccagaagcatcatcactttactctggagctgatccttggcaaagtgggtcttcagtctctccctttgcctctctgggtgcccaattccctgtcctcctccccaacccagggggagacagacatagagaggttaattaactcgttgaaagtctcagagttagaatatggcaaagctggatttgaacccagacagtctacccagatccagtaggtatcaggaccttcaagccatcctcgaacatctatgtaacaacatctttatcagtttcagaaatcgtttcagaaatcgttctgataacctgaccggtgttcacacagagctccagaacaagaccaagctgacggtgctggaaggagacattctggatgagtcatgcctgaagagagcctgccaggacatgtcggtcatcatccacaccacctccatcatagacatcatcggtgtcactcacagagagtccatcatgaacatcaatgtgaaacgtacagtagcctggggaggagatgaagcaaggtggggaattaaggatcacaaagaaggacaggaagggaaaagaagtctctccactgaacacctgctatgctctggaccaagtgtctttgctgatcactaccaactgggggagttcaaagctgctatcttcagttttttacatgaggaaaccagtgctacagatggcaagtaacttgtccaaggcccccccaggtaagtaagtaaataggagagttagactttaaactcacccctgtgtgactccaaaggctgtggacactctttctat

SEQ ID NO: 462892 - DNA, 1455 bp, Homo sapiens
cctgggccaccatttcctcatctaaagataggacctggtttaatccattcagcaactcaaggaccactctttattctgcttggtaaagcttcattcttaacctgactcccctgatggtcaaagatggctgtcagcagctcctgctactacatgttcctaaagaggaggaggaagagcagggaggagaaggagacacaggaaggcggcagggtgtcacactcttcccctacatccaagatgatctggaccaccctctttcagccaccctgcagcagaattctcccagcctacaggctaaatctgaagtcctcagcacacaattcaaagcgcgcattagccagagttctctctgctccctgagaatgccagacccattccagaagctgtgccccgatcacactgttgcctcttctgaaacagcctctccctgctttcatgtcaaactctcatgcctcatcaagacccagctcatgctatctcctccaaaaagctttctgaaccctttccttccacaaaaaaaggacatcattgctccttctattttgctctaaagttcttcatgcctagtctgatgcaagcccacacaagaacactggtgttgtcataatggatggcctctggtggcagtagtgaaattcctccaacagctttgtgggccctggattggagctggaaagaaagaccatggtgaatgccacttgtgatgggtccagctgacagtcggacttgggggcccttgggaaactgcctttgaagatcctcagaaatacttgggagggtggtgagtttatgaaggactcacagaggctaccatatggataggaataaaaccagttgtgttgttgcaagaccaattatgggatgaatgatgaaggaactgtggaaatacagaactaagtaaatcaccttctgctgtcatcagagaaggctcaatgcaggggcatcactggcactagctctggaaggttaagggacatggcacaggtgattaactgccacagcaatagatgcctttgaatgaatacactgacctccatgctcagttccgcctggctgatgtgcatgcagattgttcccctgtggcttgagtagcatcttctgctctaggagacaatgggaaacaggatctcattgacacaggccacctcctttcccaagagcccttcattttgatgacaaaggactcttaccttgcaatatgaacaaaggccaaatggcttgtcttcatccagcatcctcattcagaactagccaactgagatctgtcacatggggccatggtagtggggcctgccacatcccacctccctataagctgtcacaccagctcttggcagtgtgagcctgggctgctggccactctgtaaatgtagctacatgaggaagaaaaatagacattaaagcagaaaaggaggtacgatccctagggctgctttcaggatgacaaagggtcgg

SEQ ID NO: 462893 - DNA, 1049 bp, Homo sapiens
gagatggggtcagcagggctggttccttccgagggtgggagggggaacctgttccatgcctctctcagccctagtgctccttggctcacagatgcaatgctccagtcctcacaggtgcagtgctccagtcctcacaggtgtgctccctgtgtatcttcacaccatcttccctctgtgtggacctgcgtcctaatcccttcttgttaggagggcactagtcatataggaccaggggccagcttaatggcctcactttcacttgattccttctgtaaagaccctatttcccattaaggtcacattctaaggtcctggggattaggatgtcaacatactttttagggagccataattcagtccataacatatctcaaaataaatacatccaaaataaatcccactgccttcccctgaaacctccccttcctcctgatttccatatgaccaacaccatctgaagctcagctttgtctttttcctcttctttagaatatttgcgttttccttattccctatcccacccatagagacagaataagctctttaaaggcaggacaagcgtggatataagtccagcaagaagcatggcacgtagcaggcatttccgtatcctctttggtgtgagtaggactgactcaagtcgggctgactttgcaggcttctgtgtgatgcaattcttcatgacgggagcaggacatttagacttaataatgacacccccatcttcaggagatgatggccccttccctgtcacaaagggaatggcagtgaagctgaagtttttacgcttctctgacagccatcaatcaaaaactaaattggcagatactcatcatcggttggtgggtggtaagtacctgcacccagccatccaggggaggtctccctgggttcacgtgtcagtggctcctctctctctgtcccctacttgggtaacgaacatgaaagcaattacgtgtaggtcctctgaacactccgtcactaacagggaatgccttggacttccatttcattgcagcaacaccactacagaacttttgcaatagaaa

SEQ ID NO: 462894 - DNA, 1147 bp, Homo sapiens
gtcctcacaggtgcgatgctccagtccttgcaagtgtgcttcagtcctcacagatgcaatgctccagtcctcacaggtgcagtgctccagtcctcacaggtacagtctttagtcctcacaggtgcagtgctccagtcctcacaggtgcagtgctgcagtcctcacagatgcagtgctccagtcctctcaagtacggtctccagtcctcacaggtgcagtgctccagtcctcacaggtgtgctccctgtgtatcttcacaccatcttccctctgtgtggacctgcgtcctaatcccttcttgttaggagggcactagtcatataggaccaggggccagcttaatggcctcactttcacttgattccttctgtaaagaccctatttcccattaaggtcacattctaaggtcctggggattaggatgtcaacatactttttagggagccataattcagtccataacatatctcaaaataaatacatccaaaataaatcccactgccttcccctgaaacctccccttcctcctgatttccatatgaccaacaccatctgaagctcagctttgtctttttcctcttctttagaatatttgcgttttccttattccctatcccacccatagagacagaataagctctttaaaggcaggacaagcgtggatataagtccagcaagaagcatggcacgtagcaggcatttccgtatcctctttggtgtgagtaggactgactcaagtcgggctgactttgcaggcttctgtgtgatgcaattcttcatgacgggagcaggacatttagacttaataatgacacccccatcttcaggagatgatggccccttccctgtcacaaagggaatggcagtgaagctgaagtttttacgcttctctgacagccatcaatcaaaaactaaattggcagatactcatcatcggttggtgggtggtaagtacctgcacccagccatccaggggaggtctccctgggttcacgtgtcagtggctcctctctctctgtcccctacttgggtaacgaacatgaaagcaattacgtgtaggtcctctgaacactccgtcactaacagggaatgccttggacttccatttcattgcagcaacaccactacagaacttttgcaatagaaa

SEQ ID NO: 462895 - DNA, 1168 bp, Homo sapiens
tgtggcccacatgagagctgacagcagcctctggatgtactcccgtgcatctggaaggggagagaatcacagacgatgtaatttcaacaaggacgatttcggtcttttgcaaagacccttctattagcaggagcagcttggatgctcctcctcatggccagtctccagagaggcctactgctcaccagatgtgtggatgaacaaacctgaacagcctggaggctggtgatatctacccccacagcgcttcttccttggtcccccaagcaggctccataactccaagacttcacgcagccttttctgaacttggaagtcaagagaaaattcacagaactttggaaaatacattttcttttaaggaagaattttttgttttcatttcaacagccctggctggtgatgaggggtgatgcgaggtgccctgttttccatcctaacacctatttccaggtgggggcagggagggctccaacctgaaatgttatttcaaaacctttccgggccttgcagctccatttccaggccacatgctgcaaagcacggcacgatttcccattacgtgctgttgccctttctcgtctgagcacctttcaaagtgggaagacccagcctgctgcaacaccctccctcctgtccccataaattaagtctcactgcctgatgtgaggcttaaataaatagccttgcccggcacccgatggccacactcctgatagatgggcttgccaagagcagcaaactcagctcgctcctccttgcccctccacagagagaagatgaaactggtgttttgcaaatgcttcctgcctgctttctgccagccaaggcacattccaagaaggagcaggccagcaaagtcttgtcatctgacggggctgctatgacaaaatactatagactgagtggcttaaacaacagacatttatttctcatagttttggaggctgtgaagtccaagatcaaggtgccagcaactttggtttctggagaggagctctgtcagctctggagccaagagattgctcaactggcatttcaggggcctgatgggctcctcctccagagaaacttcttccctgttggaggcttcagaaaatggcaagcccatcaatgaaggcacaggacacatccacacaagcacaaatatttcctcatttacataaac

SEQ ID NO: 462896 - DNA, 729 bp, Homo sapiens
gtgcctcttgttggggaagatgagactgctgggtgtggatgtctgagaagccaaagtggtggtggtttcagaacagtggctgagtacccaccgtgggccaggcccctgccctcgagaactcagaatctggggacatagacaaatgtgtcatgccatgtggcagcatcatgtgacaacagcatgtgcccagtaccttctccaacagtgcttgcggatagtaggaacacaataaacatgtgttagttaatgaatttcattaaatatttatacaacatttactctttgccaggcttcattcaagtggtttgcaaacatttaattcatggaagctgtaataaccctggtcagcccatcttcccagggcccgttggcacccccgttttgctcctggcccactgtggcaataggcagaaggccatcttggggggtggtagtggaagatttagggaaagcttgttgcaaagtcacgaccagagagtctcggaggtctgggtgggacactgggctctgagggacatcctgtcccccatccctcagccagatgctgggccctggcttgggagccatatggacctggatttgaccttgaacaggtcatttcacctgagtgtgtatagtgggaatgataacatccggctcacagaactgtggtgagaattagagatggtgggtgtcgaatgattagcacctaatcagcattttacaataaatgcaaattcttcccttctc

SEQ ID NO: 462897 - DNA, 1033 bp, Homo sapiens
tcatttcaatttaatcagtatatgctaagaccaagaaaatgcagctggttggtggacccgagccctaatcatatggctgacaccaaagtcatgaagaaacatgaatcctattgtgaattgtgcgtgcctgatgatctgaggtggaacagttaccttccaaaaccgtccccacttcacccccggattgtggaaaagttgctttacacaaaaaccatccctaagtgccaaaaagggggtaaagggcatgtcttttgtgaaaaggacctggatgctaaacaggcaaccctttcccccatcaactttctccttagagctatttccagctccagtgctgaatgcatctgtgacatccccactcctggggggaatctggtcaccctgagctgtgaaacaaagttgctcttgcagaggcctggtttgcagctttacttctccttttacatgggcagcaagaccctgcgaggcaggaacacatcctttgaatactaaatactaactgctagaagagaagactctgggttatactggtgcgaggctgccacagaggatggaaatgtccttaagcgcagccctgagttggagcttcaagtgcttggcctccagttaccaactcctgtctggtttcatgtccttttctatctggcagtgggaataatgtttttagtgaacactgttctctgggtgacaatacgtaaagaactgaaaagaaagaaaaagtggaatttagaaatctctttggattctggtcatgagaagaaggtaatttccagccttcaagaagacagacatttagaagaagagctgaaatgtcaggaacaaaaagaagaacagctgcaggaaggggtgcaccggaaggagccccagggggccacgtagcagcggctcagtgggtggccatcgatctggaccgtcccctgtccacttgctccccgtgagcactgcgtacaaacatccaaaagttcaacaacaccagaactgtgtgtctcatggtatataactcttaaggcaaataaatgaactgacttcaaaaaaa

SEQ ID NO: 462898 - DNA, 454 bp, Homo sapiens
gtaagtccactgacagggcccagcaattaagctcttccaaggagcctgtccctgtctatacaccatatagccagttagagctaccgccagttccttcctgctccctgaaatgaccagtgcctccctgaggacaggcacatcaggtctcagccaaccttcccttccaaacataactcagccagacccctctggtctctaaatagtatctcttctctttgtctttttctgtttcaggcctccagttaccaactcctgtctggtttcatgtccttttctatctggcagtgggaataatgtttttagtgaacactgttctctgggtgacaatacgtaaagaactgaaaagaaagaaaaagtggaatttagaaatctctttggattctggtcatgagaagaaggtaatttccagccttcaagaagacagacatttagaagaagagctgaaatgtcagga

SEQ ID NO: 462899 - DNA, 2811 bp, Homo sapiens
  misc_feature (2)..(3): n is a, c, g, or t
  misc_feature (7)..(9): n is a, c, g, or t
gnngcannnccagagtttgttccttctgatgttcgaatgtgttcggagtttcttccttctggtgggtttgtggtcttgctggctcaggagtgaagctgcagaccttcgtggcggcgtgtctggagttgttcattcctcctggtgggttcgtggtctctcgctggcttcaggagtgaagctgcagacattcgcggcgagtgttacagctcataaaggcagtgtggacccaaagagtgagcagcagcaagatttattgcaaggagcaaaagaacaaagcttccacagtgtggaagtggacccaagcaggttgccactgctggctcgggtagcctgctttttttcttttatctggccccacccacatcctactaggctcataggcagaagggacttgcctggtctcaatgagactgtgaacttaagacttttgggttaatgctgaaatgagttaagactttggtgaactgttggcataattgtgtctgttctcatgttgcaataaagaactgcctgtgactgggtaatttataaaggaaaaaggtttaattgactcataattccacaggggctcaggaaacttacaatcatggcagaaggggaggcaaatgtgtccttcttcacatggtggcgagagagaagtgccaaacaaaggtggaaaaacacttgataaaaccatcagatcttgtgagaactcacttgctatcattagaagagcatgagagaaccatcccataatctaatcacctcccatgagttccctccccaacaggtggggattacaattcagattacaattcaagatgggatttcagtggggacacagatccagaccatatcattctgcccctggtccctcccaaatctcacctttctcacatttcaaaacacaattatgccaacagttccccagcataataaagtgcacaataaatgtaatgtgcttgaatcatgctgaaaccatcacctgccggcactccccctgcccaccccctatggtttgtggaaaaattgtcttccacaaaaccagtccctagtgccaaaaaggttgggggactgctgatctatgggactattgggttggtttcagtgtgaggtgctggtgactggcaccagagtgggagcagtcaatacaccagggtattatcattggttgtctctgagtgttaagattatggactatttttctgcttctttgtgtatttttagtctttgcacatgttctacaaagaataaattacttgtgtaatcataggaaataaatactacctcttaccctctcccctgccccagtctggcataattgaaaaatgaacgcttagagaaaggaggtcacccaagatcagacttcagaattcaaatttaataagatctacttgttattcacgatagagtttgtcaaacattttcaccaaattttagcaacaagtttgagtgctgcaggagataacgagaagtgaaaagatggtgagggagacaaaacaaaacaaaattggcaaagaaaaagatggcattttaaatagcaacacgaacagtctgcctaaggactaatctactgtgtgagaaaatgatttttaattgaaaagttctttttgagaaagttttttaaaagtcttatataaaaatatggaatatataagaatttaactaataccttgtgtttagggtgcattataactgtataaggaatttttacatgaaaatttgggagaacaagagagaacatcatgtaataatgtgattaaacttgttactcagccattttacaaattctggaatataaaggacaaggtagagtatgttccaaggcaggcagtggccacacactgcttggcttgtaggccctattagggattttggtgtttctcctaaaaaccagtggaaaaccactgaagtattttaagcaagaagtagcttgatcaggcttgagtttcaaaaggttcacttttttttttttttaaacaggggtcatatcagaaagatatgtttgatgaaattaactacagaatcaagaagtatatactcaaaaatgcaaatactacaatatataagacaatgctggagtgcaatggtgcaatcttggctcactgcaacctccgcctcctgggttcaaatgattctcctgcctcagcctcccaagtagctgggactacagaccgcaaccaattgctcttccttcccattgaaagaaacccaggctgtacctgctctttcatctcctgtgtggaaaacatctatcggctggaagccctgagtcttcattttcaaggattttagttgtaagctgtttaaggcataagctaaagtttcaggcagaggtaattttagtagttaagcctgatttttacttccaccctctgtcctccagggctatatgggaagctttctgtgagtggataagctctttagctaagatgtaaacatgttccctgctatctgataaaggttcctggagactgacactttaaaaaaaaaaaaaaaaagaaagtgaggaaaaaaagaaaaggagaaactgaatccaaggcttacaaagggattagaaaactgtaccccagatggaaaattttatgggctctggagaaaatgtgtaagtgaaatatcggtatcataaaataacaggaaatagtgtaatctacctgatggagaaaattgtcactttaaaaaaactatcctaatttccttcaaaattgttcttgtttttgagccaataaacttcagctaagctcaccatgggtctttcttctgccaaactcctacttaccaacagaacctttgtgtgtttacaattgaaacttttccattctatttttttct

SEQ ID NO: 462900 - DNA, 920 bp, Homo sapiens
  misc_feature (25)..(26): n is a, c, g, or t
  misc_feature (41)..(41): n is a, c, g, or t
  misc_feature (60)..(62): n is a, c, g, or t
aaaataaataaaaaaaaaaaaaaannaattaaaaaatatanaattaaaaaataaaataannntattttgaggggtcatatcagaaagatatgtttgatgaaattaactacagaatcaagaagtatatactcaaaaatgcaaatactacaatatataagacaatgctggagtgcaatggtgcaatcttggctcactgcaacctccgcctcctgggttcaaatgattctcctgcctcagcctcccaagtagctgggactacagaccgcaaccaattgctcttccttcccattgaaagaaacccaggctgtacctgctctttcatctcctgtgtggaaaacatctatcggctggaagccctgagtcttcattttcaaggattttagttgtaagctgtttaaggcataagctaaagtttcaggcagaggtaattttagtagttaagcctgatttttacttccaccctctgtcctccagggctatatgggaagctttctgtgagtggataagctctttagctaagatgtaaacatgttccctgctatctgataaaggttcctggagactgacactttaaaaaaaaaaaaaaaaagaaagtgaggaaaaaaagaaaaggagaaactgaatccaaggcttacaaagggattagaaaactgtaccccagatggaaaattttatgggctctggagaaaatgtgtaagtgaaatatcggtatcataaaataacaggaaatagtgtaatctacctgatggagaaaattgtcactttaaaaaaactatcctaatttccttcaaaattgttcttgtttttgagccaataaacttcagctaagctcaccatgggtctttcttctgccaaactcctacttaccaacagaacctttgtgtgtttacaattgaaacttttccattctatttttttct

SEQ ID NO: 462901 - DNA, 884 bp, Homo sapiens
ggaccgcccaaacacgaggacgagggccgcgtcaggggtcatatcagaaagatatgtttgatgaaattaactacagaatcaagaagtatatactcaaaaatgcaaatactacaatatataagacaatgctggagtgcaatggtgcaatcttggctcactgcaacctccgcctcctgggttcaaatgattctcctgcctcagcctcccaagtagctgggactacagaccgcaaccaattgctcttccttcccattgaaagaaacccaggctgtacctgctctttcatctcctgtgtggaaaacatctatcggctggaagccctgagtcttcattttcaaggattttagttgtaagctgtttaaggcataagctaaagtttcaggcagaggtaattttagtagttaagcctgatttttacttccaccctctgtcctccagggctatatgggaagctttctgtgagtggataagctctttagctaagatgtaaacatgttccctgctatctgataaaggttcctggagactgacactttaaaaaaaaaaaaaaaaagaaagtgaggaaaaaaagaaaaggagaaactgaatccaaggcttacaaagggattagaaaactgtaccccagatggaaaattttatgggctctggagaaaatgtgtaagtgaaatatcggtatcataaaataacaggaaatagtgtaatctacctgatggagaaaattgtcactttaaaaaaactatcctaatttccttcaaaattgttcttgtttttgagccaataaacttcagctaagctcaccatgggtctttcttctgccaaactcctacttaccaacagaacctttgtgtgtttacaattgaaacttttccattctatttttttct

SEQ ID NO: 462902 - DNA, 1895 bp, Homo sapiens
agtttctctttctctctctcctctttcacttctctctctctgtctctctttctctctctctctctctttctttttgacacagggtcttgctctccttctgctcctccctgatgagccaggtacttttcctggtgtttagctttgctaggtacttcctaattcctctgcttgttgcctctttgctatttatctttcctaacaagaacctaaagacaaatgtggagaaagcagctttgcacctcctcctggttttcacaacaggggagaacaggtcttctctgtgtgtgcaggaaatccacggggctggtgagtttatcgagggtcatgcttacagaagtgttcgttcagatatttcccacttcacactctgcaagcacagtcagcccaatgtgcacagatacatgaacatctatgtatggaagagaacaaataaacttctcccacagtcctccacatgtcaggggattttgctggccctccatgtggcttctgctgtgttattcagagacattctctgcatggggagtgctccagtctgaagcactttcaaccatcaaatgcctccatatcaagtgccttctccaacaccatatggtgaggggctttatctcattttgaaaagcaggtctttcaaccccacctaggttttgtgagcctggaacttgggagactgttcggtagcccaggtctcctaagagtgggtgcagtggctgtgaccctgggctgctcagcattcatgtggaaatgaaggaaggaggactggatcaatcccatttgaaagcatccttctctgcagcccacacaatcctccaatgacactgacagaggtgtaccctcctagtgtactgggaccaaaattcggaagtgtctgcaaacttgctttaaccgtatgggaaataacctctatcacctggaatttccttgggactttggaaaatacaagagaagtatgagacttgggtcttcccttggctgtgtttaattcactcttctatggaataccaatgattctcactaagacttttgcctttttataaccacaatgtatgctttatggagaagattttactctttgctctacttagaaagaataaatatgagcaatgctttaggttttatgccctggacttaatatttttctgatttctgttttgagattaaattctcattctctgacaaccactaatctactttctctatatatagatgtacttgttctgggcacttcctctatatggaataacaaattgtggcattttgcatctgcttctcagcatagtgtcctcaagtttcatcctttttagcctgcagcagtacttcaacattttatggccaaataatattccactatatggttatacctaattttgtttattcatttaacaatgttttcactttttaactattatgaataatgctgctatgaacagctttgtacatgtttttgagtgaacatctgtttttcatttttttggttataaacctaggagtgcaattgctgcatcatatatcactttatgtttaacttttttatgtttaatttttttatgtttaacttcttgaggaactcacacactgttttccaacctcagtggctatgctactttacattcccactagtaatatatgagaattccatattctccataactttccaaacatgtattgtctttatttttttcttaagtcatactaatgggtgtaaagtggtatctcattttggtttgaatttacattttcctaatgatgaaaaacatcgaacatctttgcatgtgcttcttggccatttgtgtgtttcctttagagaaacctctactcacaacttttctcccattgttaaatgtggttgtcttttattgctcagttatatgaatcccttatatactctaggtatt

SEQ ID NO: 462903 - DNA, 2154 bp, Homo sapiens
cttctttctgtgtggaacctggaattcaagctgtgggtgagaagctctctagcagggactctgaccttatggaggatcgctgtttcccccatttttccttttcacccaaaaaagtcctgcttctctcacccttcaaacagcctgtgagcctaaatttttgtggccatgggacagacaaggaccccgtcttcagctgaactaaggaaaagtcctgcgacatctttggtacgcactgtggaggctctacaaacagccatcaaactccaaccagtcacccaaccagagcctctgaggatggccccttctgcggggaacccttacatgggcctctgactgatgcttccccaaaacagtgccccctgtcatcaggaagcagttaacactggtcttcattcttacgcttatccttattctaacagcagttatatgtacttctttagacgggggaataagacagccaggtgggagggggtctctggaaaactccatctggcctgtgcactagggtggaacctcaggaagttgatgacatttgtagctgggagcagcctggcccctcctcttcctgtgtggaacctgaaattccaccggcttggcaggaagcgctctagcagggactccggctttgcagagcatccctgtttccccgtttttcccttttcacccaataaaaccctgcttcactcacccttcaaaccatctgcaagcctaaatttttgtggctgtgggacggacaaagatgcctttagctgactgaggaaaagtcctgcaacacaggtatcactgcacatttataatattgtttctctgttttaaaccttgtataaataggaaaatattgtatataatctcaagcagattgttttcttttgaaaagtattcatatatgttaaagatgtagttctagttcattcattttctctgttttgactcttttatacatatactacagctcatttatccattttcctactgttgcaacatagattgcttataattcttctaattactaacaatgctggtatgaaattgttgtgtatatctctggtagatatgtgttatttcttttttgcaatgctagattataattatttgtctaaggtggagattaccagggtagactcgctctggccgtatgtaatgatgtctgtggctacataacctgccaacacttagtcttatcacacattttattttaaaatcaatatgtaaaaaatactaatttacttggtagtaatttaaatttttctgattattactgaggttgaatatgttttcatatgtttactgaatattcctgttaattttctcatgaatttcagttaatgtttctgttgattttattaatttgtagtggttttgaaacatattctagaaaccaatattttgtctgttgtatgtgttacaaatatatttattttgtatagcttcttcatatttagtacttttacaattttaacagtaaaattagtttcatgttttatagctataattattataacttttaaataaatatttcctcaattaaaataaaaatgcattatccttaattttcttcgaagatttttgaaatgtgtatgactttttcattcttgtgctggatttctacctgaaaaatatttctcccttctgaggttcagtacctgttttttgatttagatctatgattcctgtgactctgatttgatttgataatttgtattgtctaatagtaacgtttttaaagcaggcaaagatagattaagcctgactttcaagtttaatgcattcctttaattctcatatgcctgaaactgtctcagtaaggctccaatgagaaatctctcctttcttacttattttaaaattctgacgataaagtaacacaggcctctaagattatcacaatcaataaatggatcttttatatcactcaacagaattatgtggtgatatggtcttgctaccataaattttcatatcattgttcattttaaaaaaataataataaaccaggaattagaatatcattgatgctattatttataatgtgaagcccaagaggaacatacttaatttaatgttatgttcactacaatgacaaaatgttacgtttgatttaatatgcagtttgtgtgatgccaaaataagctgtgaattatgcaaaaagaaatc

SEQ ID NO: 462904 - DNA, 2127 bp, Homo sapiens
cttctttctgtgtggaacctggaattcaagctgtgggtgagaagctctctagcagggactctgaccttatggaggatcgctgtttcccccatttttccttttcacccaaaaaagtcctgcttctctcacccttcaaacagcctgtgagcctaaatttttgtggccatgggacagacaaggaccccgtcttcagctgaactaaggaaaagtcctgcgacatctttggccatcaaactccaaccagtcacccaaccagagcctctgaggatggccccttctgcggggaacccttacatgggcctctgactgatgcttccccaaaacagtgccccctgtcatcaggaagcagttaacactggtcttcattcttacgcttatccttattctaacagcagttatatgtacttctttagacgggggaataagacagccaggtgggagggggtctctggaaaactccatctggcctgtgcactagggtggaacctcaggaagttgatgacatttgtagctgggagcagcctggcccctcctcttcctgtgtggaacctgaaattccaccggcttggcaggaagcgctctagcagggactccggctttgcagagcatccctgtttccccgtttttcccttttcacccaataaaaccctgcttcactcacccttcaaaccatctgcaagcctaaatttttgtggctgtgggacggacaaagatgcctttagctgactgaggaaaagtcctgcaacacaggtatcactgcacatttataatattgtttctctgttttaaaccttgtataaataggaaaatattgtatataatctcaagcagattgttttcttttgaaaagtattcatatatgttaaagatgtagttctagttcattcattttctctgttttgactcttttatacatatactacagctcatttatccattttcctactgttgcaacatagattgcttataattcttctaattactaacaatgctggtatgaaattgttgtgtatatctctggtagatatgtgttatttcttttttgcaatgctagattataattatttgtctaaggtggagattaccagggtagactcgctctggccgtatgtaatgatgtctgtggctacataacctgccaacacttagtcttatcacacattttattttaaaatcaatatgtaaaaaatactaatttacttggtagtaatttaaatttttctgattattactgaggttgaatatgttttcatatgtttactgaatattcctgttaattttctcatgaatttcagttaatgtttctgttgattttattaatttgtagtggttttgaaacatattctagaaaccaatattttgtctgttgtatgtgttacaaatatatttattttgtatagcttcttcatatttagtacttttacaattttaacagtaaaattagtttcatgttttatagctataattattataacttttaaataaatatttcctcaattaaaataaaaatgcattatccttaattttcttcgaagatttttgaaatgtgtatgactttttcattcttgtgctggatttctacctgaaaaatatttctcccttctgaggttcagtacctgttttttgatttagatctatgattcctgtgactctgatttgatttgataatttgtattgtctaatagtaacgtttttaaagcaggcaaagatagattaagcctgactttcaagtttaatgcattcctttaattctcatatgcctgaaactgtctcagtaaggctccaatgagaaatctctcctttcttacttattttaaaattctgacgataaagtaacacaggcctctaagattatcacaatcaataaatggatcttttatatcactcaacagaattatgtggtgatatggtcttgctaccataaattttcatatcattgttcattttaaaaaaataataataaaccaggaattagaatatcattgatgctattatttataatgtgaagcccaagaggaacatacttaatttaatgttatgttcactacaatgacaaaatgttacgtttgatttaatatgcagtttgtgtgatgccaaaataagctgtgaattatgcaaaaagaaatc

SEQ ID NO: 462905 - DNA, 1043 bp, Homo sapiens
cttctttctgtgtggaacctggaattcaagctgtgggtgagaagctctctagcagggactctgaccttatggaggatcgctgtttcccccatttttccttttcacccaaaaaagtcctgcttctctcacccttcaaacagcctgtgagcctaaatttttgtggccatgggacagacaaggaccccgtcttcagctgaactaaggaaaagtcctgcgacatctttggtacgcactgtggaggctctacaaacagccatcaaactccaaccagtcacccaaccagagcctctgaggatggccccttctgcggggaacccttacatgggcctctgactgatgcttccccaaaacagtgccccctgtcatcaggaagcagttaacactggtcttcattcttacgcttatccttattctaacagcagttatatgtacttctttagacgggggaataagacagccaggtgggagggggtctctggaaaactccatctggcctgtgcactagggtggaacctcaggaagttgatgacatttgtagctgggagcagcctggcccctcctcttcctgtgtggaacctgaaattccaccggcttggcaggaagcgctctagcagggactccggctttgcagagcatccctgtttccccgtttttcccttttcacccaataaaaccctgcttcactcacccttcaaaccatctgcaagcctaaatttttgtggctgtgggacggacaaagatgcctttagctgactgaggaaaagtcctgcaacacaggaggtgcctgggaaagacagaaaaagatgatttgttcaaaaactcttgcaaaattgctaatggcaatacagtaacaatatgtggtagtaatagaatccttacatatgaaatgcttctagccggttgtacctggtctacacaggctaatgaaatgttaataggaaataatccttaacaaaagggttacctttgtgcaagtaatgtcctgatgcatgtattagccccttacatgttaattttgaaataaaaaatgtgttaatagaaga

SEQ ID NO: 462906 - DNA, 787 bp, Homo sapiens
ctacagttactaagcgcccactgtgtgccctggaagggactagactcagcaggaaaaacatccaggcaagtggacagcatttgcaacagcccagcaataagaaggaccatattctacttgggaaaaggtaaagtcgtttcatatggacggagcctgccaggaaacctgtcattcaaccctttgcaataaaacagctcctcatgaatgaagcaaaataaatcagaagttgtgggcttttaaactcactaaatgaaagcacagcatgcatgcagcctccctccaaattaatcaccagattaaatgcaagatgtgcacaccaaatcaatagcttgtgacggggacctcctgcctgtgcttcaggaaaattccatttcctttcagatgttgtcgcttgaaatgtcaggaagtttccattcatcacccgcccttgaaaatgccaccatcaccatacttcatggactaatcctattcacaagggctgtgctctcaggacacaatcacctcccaaatgccccacctcttaatgccatcaccttgggggtcaggatttcaacatatggatttggggagaacataaacactcagatcacagcaactggaaagcagggaattgaagttgccactagaacctcagtgaatggtacatgtgattgtcacacatggatatgcccagtaaacggcaaaggaaaacttcttgaggctctaatcccagagtgctggctcagccattcttaacaaattcttttgttcttctcacatattcttgtgttgaaaaatttcatggggt

SEQ ID NO: 462907 - DNA, 1175 bp, Homo sapiens
tgtccaggtgctctcctgccgccaacacagccctaatgagctctgcatattcaaaacacaagtaattgatagtccaatttaaagtgtgcagaggccaaatttctttccagacgctgaaggaaaaacaccagctgaggaagaatgaagaactgcctgttctaagttattctccttctgtggtcattcgagcaccaggaagaccaggtttgccccatcaagtacctcaagaaagaagtcaattacctaaagaagtcaagcaaagaggaaaggacaaaatgaaaatcatgtaccagggtacacgtcgaggctccaagctggaatgaatatggccttcaacatactctttatcatacagaagcttgtgttcagggcttggattttgaagtcagacagacctggattaaaaaccaattcaactacctattacatatgtgacctaggaaaaacatccaggcaagtggacagcatttgcaacagcccagcaataagaaggaccatattctacttgggaaaaggtaaagtcgtttcatatggacggagcctgccaggaaacctgtcattcaaccctttgcaataaaacagctcctcatgaatgaagcaaaataaatcagaagttgtgggcttttaaactcactaaatgaaagcacagcatgcatgcagcctccctccaaattaatcaccagattaaatgcaagatgtgcacaccaaatcaatagcttgtgacggggacctcctgcctgtgcttcaggaaaattccatttcctttcagatgttgtcgcttgaaatgtcaggaagtttccattcatcacccgcccttgaaaatgccaccatcaccatacttcatggactaatcctattcacaagggctgtgctctcaggacacaatcacctcccaaatgccccacctcttaatgccatcaccttgggggtcaggatttcaacatatggatttggggagaacataaacactcagatcacagcaactggaaagcagggaattgaagttgccactagaacctcagtgaatggtacatgtgattgtcacacatggatatgcccagtaaacggcaaaggaaaacttcttgaggctctaatcccagagtgctggctcagccattcttaacaaattcttttgttcttctcacatattcttgtgttgaaaaatttcatggggt

SEQ ID NO: 462908 - DNA, 2119 bp, Homo sapiens
cgggaaagtgccaggctgaatagatttagcgtgcttggaacgctcgagtgaaggagggggagaaggcagaagggagagcatgggcggagcagcagagatggtgactgtcttgagtcatggtccacctggagcaagggctggcatcatctcaacaatggctgggttgttgacaaactgcctggaggaaggggtaagaaacttcaaggaacttcgagccaaatttcaaaatcttgatgctccacctcttccaggacctattaaattcccagcaggtgtttctccaaagggtgacattggaggcacacagtcaactcaaattttggccaatgggaaacccctctcatccaaccacaagcagcgcacaccatactgttccagtagtgagtcccagcctcttcaacctcagaaaataaagttggctcagaagagtgaaattccaaaatgttctaactccccagggcctctgggaaagtctactgtatgttctgcaacaagttcacagaaggcttctctgctgttagaggtgactcaatcaaatgttgagataatcactaaggaaaaagtaatggtggccaatagcttcagaaacaaactctggaactgggagaaggtttcatctcagaaaagtgaaatgtcttcagcccttctccttgccaactatggaagtaaggccatccatctggaagggcaaaaaggcatggggcttactccagaggaacccaggaaaaagctggaaacaaaaggagcccagactcttccttcccagaagcacgtggtggcccccaaaatattacataacgtctctgaagatccctcttttgtaatttctcaacatatcagaaaaagctgggaaaacccacctcctgagaggagcccggcaagcagcccctgccagcccatctatgagtgtgagcttgccagtcaggccccagaaaaacagccagatgtcaggcatcaccaccttcccaaaacaaagccattgccctccatcgactccctgggtcctcctcccccaaagccttcaagacctcccatcgtgaacctccaggcctttcagaggcagccagctgctgttcccaagactcagggggaagtgactgtggaagagggctccctgtctccagagagagggctgcacagttgctgctgccgctcacattttacagctcaagatacttgggctcagaaagtttgccacttgctgagccatgattccaacccagatgtgccataactacactgattatatacctcacctcccacacaaagatgttcctgttctcaaaaagctgccactaaattttagtgctttcttttaagcatggagtgtgtatctgtttgccaaaacaggaaactgaaatggtttcacatgcttcatcgactgtaaattccattctggaaatccccacagaaattaaaaccatgatcactgaccccataatttcccaaactttctagatagagctttacatagtctgatgttcttaaaggtgagaaaactgaattctggaatcttttataactgctttaatcctgggtgctataagaaatgggtggatcagctgccttgaaataatttttttatgtttactttagcaacttatgaagttggaattgaagaactccaaaagaagaactagttcccttcacaccaaactaccacaagtcagttttttgtattcttttccctttttttctactgtcacgatctttgtgtctagcaatgagtttttcatgtggtcaaacatgtaccaagtccctctggtgtgatagcacttgtgcatagacagtagtgcttaacccttatagttaccctgtgagctgatatcactgctcccatattacagatgacattaaggttcagagaggtttagtaacctgtaaatcatgtaacaaagatataaaacaaggtctgtctgacttgtcattctaccagtgctgcatctaatttgctagaattatgtgagagtataatgagctatgatacctggattttgtgatggcattttagatgcttagatattttctattcttctcagagttcttagacagattccaaataatgaatgtcaccagatctataatcactgaataaatgaggggctacattgtgatcatt

SEQ ID NO: 462909 - DNA, 972 bp, Homo sapiens
ctcagatgttgagagaatgccaaggaagaagtacattggtgtgtggaggcttttatccaggtggatgacactgataatggtgacattgccactaagaatgactagatacagaaaaagaaaaactacaaagagggccagctgaatttcaccaaggctggaaaaacccagcaacaggaattcggtgaccatggtgaggttttctgccaagatctgcaaagggggaaagaagtaaaacatattcagatagaactacgaaaatagaatacacactcaatgggctgaccaactgattcataacatctttattggagaatgaactttctttttctctccaggccccctgtaacccctgtctggtattttctacatgactgattcctctctagagccagaactatggaatcttaagagaatctgtatttctttaaaaagaataaatatcttatgacactctttatttttgtttgcctttcctctcttatctctcacaacactgcaaacatttattccagttcccagattttatcccaatgttttaatcttatggaacttcttagttcactgaacatgcaaagagccatgtcttataacaacaatgccttttcctgtgttagggcagatcctctaatctttcaaatcacttccctggaaggaatatattttgagaaatggcagagcaatggactgacaggtgcttgtagatccagcagtgacagcagcaaggagcaaatatgggaaatgaggcagaatgtgggagaactcaacttccctggcagcagtgtgaagaatggattggggaccaagggacttgaagtttttgcagtaatccagaaaagacaggatgatcctgtaaaaacagaaaaggaatgtgattgaggaacttttagccagtggaatctataggacacaatgggtggtatgaggattaaaaaaaaaaaagtagtgaagatgacttccatgtgcttggcatgg

SEQ ID NO: 462910 - DNA, 945 bp, Homo sapiens
attactgaaacatacaagcacataatcagacacatttttggagcagaatatagaatagctcagatgatttgagaagcactgatggagaagtcgagttccttattcagatattaagccaatcttactctttccaatgtcatcttggtgacccaattgtgacaagaatgtccagatacagtttggtgttgtgaactggttggcttccccgttttgcagatagaactacgaaaatagaatacacactcaatgggctgaccaactgattcataacatctttattggagaatgaactttctttttctctccaggccccctgtaacccctgtctggtattttctacatgactgattcctctctagagccagaactatggaatcttaagagaatctgtatttctttaaaaagaataaatatcttatgacactctttatttttgtttgcctttcctctcttatctctcacaacactgcaaacatttattccagttcccagattttatcccaatgttttaatcttatggaacttcttagttcactgaacatgcaaagagccatgtcttataacaacaatgccttttcctgtgttagggcagatcctctaatctttcaaatcacttccctggaaggaatatattttgagaaatggcagagcaatggactgacaggtgcttgtagatccagcagtgacagcagcaaggagcaaatatgggaaatgaggcagaatgtgggagaactcaacttccctggcagcagtgtgaagaatggattggggaccaagggacttgaagtttttgcagtaatccagaaaagacaggatgatcctgtaaaaacagaaaaggaatgtgattgaggaacttttagccagtggaatctataggacacaatgggtggtatgaggattaaaaaaaaaaaagtagtgaagatgacttccatgtgcttggcatgg

SEQ ID NO: 462911 - DNA, 925 bp, Homo sapiens
gaggagccgtggcgcggcggcgggcgcgggactgacagccccaggccccgcctccagaccccgggccccgccccttcctggccgcgcggcttgccccgcctcctccgcccaccgccggggtcaaactgggtccatcggcccggagggcggggatgctcgctttcgattggcctcaaagaggcgcgtgcgccgtggctggggagggtagcggttacgctgagcgccggcgttgctggtccccgacccctggtacccgggcatcgttttttcatcccgggcagctgggaccccgggatgacctaaggaacaaggattcagacgcagactccacggtgaattggccttattcacgtgtgaacgaacgtccaggagaaaaccaaacccgaatgggccaggctctaaccagaggagaccccaaaactgtgatctgcatcagaaaacgaaccagccagccggttcccggctctgccaggtctaggggtgctttattcaagccctgggttcgctccctggtcagcaagtatgaggtatttgcagagggtctagaagatgtgaagggagattagcccgcatttaggactgtgccaaacagagagtgagtgatgctgaagaaagtggcctcctctgctccagccctccctcctcctccccaacccctggctctcccacctctccctcagcaccggcgccctaccctcagcctgtaaacagtatcaggtctcgcccaacaaaaatcaatggagacccagcaattccactcaagagaactagaaacatgtctgtactaaaacttgtacacaaaatgttcatagcggtgtattcagaaggccaaaaaaggaaacaactgaatgtccactgattgacaaatggatgagcaaattatggtctatccatacaatggaatagtattctgccataaaaaata

SEQ ID NO: 462912 - DNA, 775 bp, Homo sapiens
gaggagccgtggcgcggcggcgggcgcgggactgacagccccaggccccgcctccagaccccgggccccgccccttcctggccgcgcggcttgccccgcctcctccgcccaccgccggggtcaaactgggtccatcggcccggagggcggggatgctcgctttcgattggcctcaaagaggcgcgtgcgccgtggctggggagggtagcggttacgctgagcgccggcgttgctggtccccgacccctggtacccgggcatcgttttttcatcccgggcagctgggaccccgggatgacctaaggaacaaggattcagacgcagactccacggtgaattggccttattcacgtgtgaacgaacgtccaggagaaaaccaaacccgaatgggccaggctctaaccagaggagaccccaaaactgtgatctgcatcagaaaacgaaccagccagccggttcccggctctgccaggtctaggggtgctttattcaagccctgggttcgctccctggtcagcaagtatgaggtatttgcagagggtctagaagatgtgaagggagattagcccgcatttaggactgtgccaaacagagagtgatgactgcttaatgagtacaaagcctctttggggggtgattaaaatgttaaggaattagacggtggtgatgactgtacaactttgtgaatataataaaaaaccacataactgtataaaagggtgaattttatggtatgtgaatgatattttaatttaaaccaaaaatccaaatgacc

SEQ ID NO: 462913 - DNA, 1362 bp, Homo sapiens
atttaaagaattatcatgatcaactgggatttatcctggactacacagggcctggaattcccgtcactccaggatgtaatcctcacatctgaaagaagaaaatgctacatcaagattgaaggtcatgtcttacgatatttgtggaaagctgaaacttgggacaggatgcttgagacaggggaaattacatttctccaaggtgttcattctctgaaataccagccctggagcactatgtccccaggaatgttcacaaaaggtcagcagaagcaccagaagggccagagtagcactgagtcaggaattccacacagtgtttggaacacaaggatgaatcctgatggctcccgctggttgctaggtaacgtctgtttggtacaatctggttcacatcataatggttcttttgccaacaggagctggtaatcaggatggcagtgaggcaggcacttgcttgcagaagaacaggcctagttttttaagaagccacaaaagtgtctttggatgattaggatctaaggggccaacagctttgcaataacagcataaatattgtgggctggatggacaggcaccaaatggggacattccatcctgctgtgtgatgagaaagctgccacttttgaggccttccaaaacaaatcaacactccatatgccagaaggaaaagcccaggaaagacctattccaactggagatggaatacgaagggagaatgaaacaaaactgctccgcttagggaacttggaaaggaaattgaaaaggcaaggcacaggctggaagaaaatatttgaaaaagatttatgtgaacttctttctggattatacaaaatatttttagatattcttacaactctaaaataagataactccttaaaaatctaaattctaccaaaggagagataaagatgacgaatacattcaaagatgctgaaaatcacttatttattattaggaagttacaagctaaagcataatgagataccactacaacctactaaactgactaaaattaatcagactaaccaggtgttggcaagaaacagggacactgagactctcacactgctggaaggaatgtaaaatgctaaaacttctttggaaatgagttcagtaactttttaaacagttgaaaatagacctatcatgcaaaccagcaatcccacttccaggtatttatacaaggaaaatgacaacatatgcccacataaagacttgtgcacaaatgaccgtagcagctttgtgataattgctaaaaactagaaacttgtcaagtgtccaacaggtgagtggacaaactcactatagtatatccatacaattaagtactaaatagcaataaaaaggaactattaatacatt

SEQ ID NO: 462914 - DNA, 1523 bp, Homo sapiens
atttaaagaattatcatgatcaactgggatttatcctggactacacagggcctggaattcccgtcactccaggatgtaatcctcacatctgaaagaagaaaatgctacatcaagattgaaggtcatgtcttacgatatttgtggaaagctgaaacttgggacaggatgcttgagacaggggaaattacatttctccaaggtgttcattctctgaaataccagccctggagcactatgtccccaggaatgttcacaaaaggtcagcagaagcaccagaagggccagagtagcactgagtcaggaattccacacagtgtttggaacacaaggatgaatcctgatggctcccgctggttgctaggtaacgtctgtttggtacaatctggttcacatcataatggttcttttgccaacaggagctggtaatcaggatggcagtgaggcaggcacttgcttgcagaagaacaggcctagttttttaagaagccacaaaagtgtctttggatgattaggatctaaggggccaacagctttgcaataacagcataaatattgtgggctggatggacaggcaccaaatggggacattccatcctgctgtgtgatgagaaagctgccacttttgaggccttccaaaacaaatcaacactccatatgccagaaggaaaagcccaggaaagacctattccaactggagatggtgaatgtcatttcttcaagaagctgagatccagctggtactgccaggtggagagtgagttgggtagctgacctcgggcatggcagccttggtttttggccacttcatggggtgacctgttgagcaaacagcagtggaattctgcagctgtggaccaagatgaatacgaagggagaatgaaacaaaactgctccgcttagggaacttggaaaggaaattgaaaaggcaaggcacaggctggaagaaaatatttgaaaaagatttatgtgaacttctttctggattatacaaaatatttttagatattcttacaactctaaaataagataactccttaaaaatctaaattctaccaaaggagagataaagatgacgaatacattcaaagatgctgaaaatcacttatttattattaggaagttacaagctaaagcataatgagataccactacaacctactaaactgactaaaattaatcagactaaccaggtgttggcaagaaacagggacactgagactctcacactgctggaaggaatgtaaaatgctaaaacttctttggaaatgagttcagtaactttttaaacagttgaaaatagacctatcatgcaaaccagcaatcccacttccaggtatttatacaaggaaaatgacaacatatgcccacataaagacttgtgcacaaatgaccgtagcagctttgtgataattgctaaaaactagaaacttgtcaagtgtccaacaggtgagtggacaaactcactatagtatatccatacaattaagtactaaatagcaataaaaaggaactattaatacatt

SEQ ID NO: 462915 - DNA, 1362 bp, Homo sapiens
gatgtgtatgcctttttctcctattaatctgcctttttttagttcattttcaatgaaccttcagaggatgaaggggaaagctgtccttgctcacccctgcacaagaggatacccgcatttaccagaaacacatgccaactcaattagccaaatgaactggatcagttcccgaaagccctgtgctttcttcctcaccagacctttagtcttcaaaatggtcgtgcctgtgatctcagttccttttttctgctggactctaagggctgcagcagtgctggccccttgcacagccatatgtgaccactgcagaacaatcagttggagagacagtttggactacatggagggtggagataaggacaaagtgaagaatacacaggaaccagtgcctcctcctggaactatgcaactccaagctgcttccatcagctgctaggtccagtagggagggacctactgagaggtgattggattatgggggcggtttcccccatgctgttctcatgatcgtgagtgagttctcatttgatctgatggtttcacgaaaggctctttctcctttgctttctcttctctctcctgctgctatgtgaagaaggtgcctgcttccctttccgctgtgattgtaagtttcctgaggcctcctcagccatgtggaactagctaattaaaaatgtggtgtcctggactcacgaagccagaattgctgaggagatagcccgagaatctgaatttttagcagacatttttttaggtaccttacccgcaggatcatttctgtgaatatccatgaggtgaaaaagtctgggaaacactgtcctagggtgtggggaagagcgagaaaaagatttccgctctggaaggtaaacaaatactctctggagagagaagaggaatgtccctagcagatgtctccagagaagacaagactttaaattccgccagggaaatatacaatgtctaacttctaaggcacatttgccattcaatcatgctttaacccacgttgccagaaatttttgctcactaggttttgactgtacaggaatgtgaaaatattcatgaagagttgttttccaatgctaaagaattgatgtgttttaacagttgaattaattgtattgattatgatcacacctactttttatatatcttcatttctaacgtttctgtacaatcctgcctttccacctgatatagttaggccttgtgtcatcaaccaaatctcatcttgaattgtaatcgccataatccccacgtatttagggagagacctggagggaggtgtttggatcatgggggcggtttcccgcatgctgttctcatgaccatgagattacaattgtttcatacctgaaaatc

SEQ ID NO: 462916 - DNA, 1846 bp, Homo sapiens
  misc_feature (2)..(2): n is a, c, g, or t
  misc_feature (7)..(8): n is a, c, g, or t
  misc_feature (11)..(11): n is a, c, g, or t
anttctnntancagcagtagagatggatggaaccaatggcagcacccaaacccatttcatcctactgggattctctgaccgaccccatctggagaggatcctctttgtggtcatcctgatcgcgtacctcctgaccctcgtaggcaacaccaccatcatcctggtgtcccggctggacccccacctccacacccccatgtacttcttcctcgcccacctttccttcctggacctcagtttcaccaccagctccatcccccagctgctctacaaccttaatggatgtgacaagaccatcagctacatgggctgtgccatccagctcttcctgttcctgggtctgggtggtgtggagtgcctgcttctggctgtcatggcctatgaccggtgtgtggctatctgcaagcccctgcactacatggtgatcatgaaccccaggctctgccggggcttggtgtcagtgacctggggctgtggggtggccaactccttggccatgtctcctgtgaccctgcgcttaccccgctgtgggcaccacgaggtggaccacttcctgcgtgagatgcccgccctgatccggatggcctgcgtcagcactgtggccatcgaaggcaccgtctttgtcctgaaaaaaggtgttgtgctgtcccccttggtgtttatcctgctctcttacagctacattgtgagggctgtgttacaaattcggtcagcatcaggaaggcagaaggccttcggcacctgcggctcccatctcactgtggtctcccttttctatggaaacatcatctacatgtacatgcagccaggagccagttcttcccaggaccagggcatgttcctcatgctcttctacaacattgtcacccccctcctcaatcctctcatctacaccctcagaaacagagaggtgaagggggcactgggaaggttgcttctggggaagagagagctaggaaaggagtaaaggcatctccacctgacttcacctccatccagggccactggcagcatctggaacggctgaattccagctgatattagcccacgactcccaacttgcctttttctggacttttgtgaggctgtttcagttctgacattatgtgtttttgttgttgctcttaaaattgagacggggtctcactctgtcacctagggtggagtgcagtggtgccaccatagctccttcgactattgggcttaagcgatcctcccccacctcagccttccaagtaactgggactacaggtgtgcatcactggcagtgggaattgtggcttttctgtcttctatggagacggggtcttgctgtgttgaccaggctggtcccaaactcctggcctcatgtgatcctcctgccatggcctcctaaagttctgggattacaagtgtgagtcactgtgactggccaacattatgtgatttatgtgtgaactatataacacaaatcatccccaaaacccatcatgatctgtaaagcagctgcaaagaatgaagtgagagaaacagttgtaaagatgagtttccacctacttataccagagtgctaagaggaaataactcttctcaatcagagctttgctttgtttgttgttgtttgctttaaagtctaacacacctgacatgtttcagtcagaatgaccccaaatgcatcactgttctccacgtggtcccaagtgcctctctgtttagggccatcaaatcatggaatgcagcacagtttgatattttctatattcccaattcctacccaaaccttttcatgaaatcgtagagtttgttttaccctttatctggtgtaagattctgcataaaccaagaagtgaacctgtaagttatgatg

SEQ ID NO: 462917 - DNA, 5364 bp, Homo sapiens
tgcgccttgggctctcctgacgcgctgagcgggaccctgaggagccagctggcgcaggctatgggctgggcggcggttgagacagcggcggtattgggaggggtagtgaacgcggtgcttttgggaacgcgggacgggcgacctgtggcgccaggagcgggccgaggcgcggcgcacggatgccgtctggatgggaagttacggtttacagcgaagtccacccagcgtttccgaggtgaaggcgccgcgccaggccggggggcgctgcggctgtcgcaagttttgttgcgagcgacggagggcgaggcggggtggggggttgggagggcatgtgttccggccccgccgaggcttaagttccatgcgttcgattcctcgcttgccgctgccgcccgcagccctcatctcttgggcgctggggaagaaactcgctggcgggtgttctgtggcatcccagggggtggagggacgagcagcttcgggggcacgtcctcgtgtatcctgtggaggaccctgaccccgcaccccaccctcgaggccagaaatcagttgcctctggggacctgagaggcgagaccactcgcgcccctgacttgcaaagttggggtctttattggcctccgggattctgctcctggcggtttctccaggctggtgatgggcaacacatgaggcgcgtttgtagccatcactgaatcacctcatgactagcggggcaggcctctaattcaccgcaggatttccagtaggttggattgtggggttggtgtttgcactccaaagagttggcgtgatttccctgtatctgtctttctggcttgttagatcttctcatttggcgtcctttctccgaagagttaaccaagacgtttggcgtggttttcttgctttcctcctatcttttgctgctagagctgctttcaaaaagaagtcttttcttgcagtgataccttttctttgggttacagtgttgttcatcctttctttgccgaaagaatgaatcccagtgcttcacgaagttaaaggaaagatctgctggtagtgtttagtctttgttctgagctgatatgtgttagtagctttttgtttttaaattttattagtaaaatttcaccagtgaaccagaagctctttttttctgttgtgaaatgctagctttaagatttctgagaactttgtgtcaaagaaatctttgaaaagttactgaagtatacagagaggttcacaattttaaatgtgcaggtggtccgggcgcggtagatcacacctgtaatcccagcactttgggacgccaaggtgggcggatcacttgagcccaggatttccagaccagcctgggcaacgtgccaaaaccctatctctactaaaattacaaaagttagctgtgtgtggtggtgtgtgcctgtagtcccagctacctggtaggctgaggtgggaggatcaccagagcccaggaggttgagattgcagtgagccgtgatcatggcagtgcactcccgcctgggtggcagagtgagaccctgtctccaaaaaaaaaaaaaaaaaaaaaaaagtacagataatgaatttttaccaagtgaaccaccacagatcaagaaatagaacattactagactggggtatatttgtaggagtgacattgttggttttagaggtatatgaatgataaaacttagtattacatattgttgaacgttttcccaaagtggttgtaccatttagcagggatattctggttaccccacaaccttgctgatgcctgtcagttaaaaattattttgccattctagtaggggtgcagtaatgtatcagtgtgatttcattttgcattttcctggtattgagattgagtatcttttattgtcatttgtgtgtcctcttttgtgaagtgcctgttaaatctttttatccagttttcattgatatgcttgtttttctgttgatttgtaatacttttttccggatatgtgtcctttctacgatatatatgtattgcatttccctttttttcaatctgtagcttgccttttcgctcttttaatggtgcttattcatgaatggagattctctaactttttttttttctttttgagacaagatctcactctgttgcccaggctggagtgcagtggcacaatcacagctgaccgcaaccttgacctcccaaggctcaggtgatcctcctgcctcagcccccaggtagctgggacctacagacagggcctcactctattgcccaggctagagtgccgtggcaggatctcagctcactgcaacctccacctcctggctcaagcgatcctcccacctcagcctcctgagtagctgcgactataggagtgtgccaccatgcctggcttaattttcatattttttgtagagatggggattcaacatgtttcccaggcaatctgaaagcaaatcctgtttagatgcaggcgaaggttcctggtgacccaggctctcaccttaccgtcccttaccgtcctcctgagggtgtcctggagcttcagtgctgtgtgttcttggcctccacgctgggggtgccaccaactcccactgtccagggcttccagtggactctccgaggtactgatgtagaaacttccccattcggtgcaccaagagcaacctcacacggtgtgggccgaatgaagagctgccagatcccacagaaatgtgattgataacagtaaagccacactcctcaagtgcctgaaatacccctcattgtcttcttcaggtggcaagggctctggaacagccacataaaggtgagggcaatatttttactgtagttctttcattgattggttgattgatttttttctcttagagggttagcatacatttatctgaaattgaaattcaagaggagagacaggcacctgtactagttttctcttgctgcctattatcacattaccacaaaccagtggtttgaaaccacagaagtctggaatgaagtggccgggttctctgatcagagtcatgtgaggctaaaatccgggaatgggctggctgtgtttttttcctagagctcaagctatttttccaggttcactacagataatgaaagagttcctattcttgtttgtgggggactgagggccctttttctgtgctggctgtcagcggggagacagtctactctgactccagaggccacgtgctttcctccttacctgtctgtttcatctttcaaccaataacaactcatggagtccttctcaagctcccaccttctctgacttcatcttctccaaccagccacacaaagctctgtcatgtatggagtgatgtgattagatcgagttcatgcggtaacctcaccatcttaaagtcatataactggcatataacaacatagtcacaggaatggtgtctcatcaccttaagaggctttagagacaagggtgtggcatgtttggggaccatttcagaaattccatctaccacagtaggacactcacattcccccatctgcaaagtgcatttaccctctcccctgaggtttccagatttcatgtcattaaagcattagttcaacatgaaaaatgtcatgtagaccacatcagatcaaaagtttaaaatcccatctaaaacatccacaccaggtgtgaatgaggcttccgagagtgtccattaagtgcagatccttgacataattcccttacctctgtcgacctgtgaaactgaacaaacagcttatctgcccctaatgtgaaatgatgggacagacatagaataaccactacagtgattctagttcaaaatgagggaacatggaggggataaagaagtcaataacccaaaatagtttggaaatggagctgggcaaaatccagcaggagtttcttagttaggatccacagcctgggactgaccctctgtcctgtgggtctttgcctctgggctctctgctctgcatttcttgaaaccattattatttatcatttttctcacactgttttgcgtatggctcctattgcactcaaaatgtttttgagattcatccatgttgttttgtgtgtcaaaagtttgttcctttagccattccatggaatgaatgtatcacagtttattgatccattcttgtattgatagatatttgaatgtttccagtttttcctattatgaataaaactgctatgaacattcttgtataaatcattttctggacatatgttttaatttctcttggataaatgcttaggaattagtgagtcatagaatagatagttgtttagttctgtaagaatatgccagacattttttcccaaagtgtttatactattgtacattccaaccattaatgtatgaaggtgagaaagcttttgctacttccaaagaggcctctctatatacatgtaattttttctaactggagacaggctgatgacttcagggacatgagcatgggatacctgtcatcaccaccaccataaagttgggattcaggaaggaggttaatcatataaagaatcctgtgaccagtatgagcttctctcaggccacacagggcactcaagtgaacagggcatgggggccctggggtcatggtaagaaagtgtctcattggtaaaaccttttcctctggggaggtaaataaatgatttgtttcttcttggtagcccttgaagataaggatggtcaaacaaaataatatcatacctggagaaactcagatcttgctaagatttactggttgggaatccaaagttaatgccaagaagcagccgccagttgggatcaaatgtgagcctatggatcaaggtgcgtactcaaacacagagagctttctgaaagatgctaccagtagtttttccagggcagagatgggtcctttatttttctctctaatctagcccatatgcttagctgagttttctttgtatcactttaaatgatgatgtcccttgttcaacaattttctaaacattctttagataataattttatgggcattctttattgcattaggcttaaattttttaatgcatcttaaggttttattgcaaaatattgccttgtttcctttttaagatgatacagtttataatatgcaaatttgttgtctgtcccctccctttatgtacatagaaaatgagcaaacaggtggccatgaaacagatggtcatagaattggttcagtggttgtgagtgcagcaacccaagagtgtcttatctgaaataccaccaggaatgtctggacacagtagacaaaggtttttcaactggacgccttaggatacatgcttgcaaaaacaaagtagccaaaaagaaaccagagtcacagaatatcagagccagaggaacatttggaggtaattcagtacctcctccttttcaacctacagggga

SEQ ID NO: 462918 - DNA, 5186 bp, Homo sapiens
tgcgccttgggctctcctgacgcgctgagcgggaccctgaggagccagctggcgcaggctatgggctgggcggcggttgagacagcggcggtattgggaggggtaggtgagggtcgcgaggctgcgtgagcatctgagtgaacgcggtgcttttgggaacgcgggacgggcgacctgtggcgccaggagcgggccgaggcgcggcgcacggatgccgtctggatgggaagttacggtttacagcgaagtccacccagcgtttccgaggtgaaggcgccgcgccaggccggggggcggtgagtccgggacccgcgggtacacagctgggtcctgcggctgtcgcaagttttgttgcgagcgacggagggcgaggcggggtggggggttgggagggcatgtgttccggccccgccgaggcttaagttccatgcgttcgattcctcgcttgccgctgccgcccgcagccctcatctcttgggcgctggggaagaaactcgctggcgggtgttctgtggcatcccagggggtggagggacgagcagcttcgggggcacgtcctcgtgtatcctgtggaggaccctgaccccgcaccccaccctcgaggccagaaatcagttgcctctggggacctgagaggcgagaccactcgcgcccctgacttgcaaagttggggtctttattggcctccgggattctgctcctggcggtttctccaggctggtgatgggcaacacatgaggcgcgtttgtagccatcactgaatcacctcatgactagcggggcaggcctctaattcaccgcaggatttccagtaggttggattgtggggttggtgtttgcactccaaagagttggcgtgatttccctgtatctgtctttctggcttgttagatcttctcatttggcgtcctttctccgaagagttaaccaagacgtttggcgtggttttcttgctttcctcctatcttttgctgctagagctgctttcaaaaagaagtcttttcttgcagtgataccttttctttgggttacagtgttgttcatcctttctttgccgaaagaatgaatcccagtgcttcacgaagttaaaggaaagatctgctggtagtgtttagtctttgttctgagctgatatgtgttagtagctttttgtttttaaattttattagtaaaatttcaccagtgaaccagaagctctttttttctgttgtgaaatgctagctttaagatttctgagaactttgtgtcaaagaaatctttgaaaagttactgaagtatacagagaggttcacaattttaaatgtgcaggtggtccgggcgcggtagatcacacctgtaatcccagcactttgggacgccaaggtgggcggatcacttgagcccaggatttccagaccagcctgggcaacgtgccaaaaccctatctctactaaaattacaaaagttagctgtgtgtggtggtgtgtgcctgtagtcccagctacctggtaggctgaggtgggaggatcaccagagcccaggaggttgagattgcagtgagccgtgatcatggcagtgcactcccgcctgggtggcagagtgagaccctgtctccaaaaaaaaaaaaaaaaaaaaaaaagtacagataatgaatttttaccaagtgaaccaccacagatcaagaaatagaacattactagactggggtatatttgtaggagtgacattgttggttttagaggtatatgaatgataaaacttagtattacatattgttgaacgttttcccaaagtggttgtaccatttagcagggatattctggttaccccacaaccttgctgatgcctgtcagttaaaaattattttgccattctagtaggggtgcagtaatgtatcagtgtgatttcattttgcattttcctggtattgagattgagtatcttttattgtcatttgtgtgtcctcttttgtgaagtgcctgttaaatctttttatccagttttcattgatatgcttgtttttctgttgatttgtaatacttttttccggatatgtgtcctttctacgatatatatgtattgcatttccctttttttcaatctgtagcttgccttttcgctcttttaatggtgcttattcatgaatggagattctctaactttttttttttctttttgagacaagatctcactctgttgcccaggctggagtgcagtggcacaatcacagctgaccgcaaccttgacctcccaaggctcaggtgatcctcctgcctcagcccccaggtagctgggacctacaggcaatctgaaagcaaatcctgtttagatgcaggcgaaggttcctggtgacccaggctctcaccttaccgtcccttaccgtcctcctgagggtgtcctggagcttcagtgctgtgtgttcttggcctccacgctgggggtgccaccaactcccactgtccagggcttccagtggactctccgaggtactgatgtagaaacttccccattcggtgcaccaagagcaacctcacacggtgtgggccgaatgaagagctgccagatcccacagaaatgtgattgataacagtaaagccacactcctcaagtgcctgaaatacccctcattgtcttcttcaggtggcaagggctctggaacagccacataaaggtgagggcaatatttttactgtagttctttcattgattggttgattgatttttttctcttagagggttagcatacatttatctgaaattgaaattcaagaggagagacaggcacctgtactagttttctcttgctgcctattatcacattaccacaaaccagtggtttgaaaccacagaagtctggaatgaagtggccgggttctctgatcagagtcatgtgaggcccaggttcactacagataatgaaagagttcctattcttgtttgtgggggactgagggccctttttctgtgctggctgtcagcggggagacagtctactctgactccagaggccacgtgctttcctccttacctgtctgtttcatctttcaaccaataacaactcatggagtccttctcaagctcccaccttctctgacttcatcttctccaaccagccacacaaagctctgtcatgtatggagtgatgtgattagatcgagttcatgcggtaacctcaccatcttaaagtcatataactggcatataacaacatagtcacaggaatggtgtctcatcaccttaagaggctttagagacaagggtgtggcatgtttggggaccatttcagaaattccatctaccacagtaggacactcacattcccccatctgcaaagtgcatttaccctctcccctgaggtttccagatttcatgtcattaaagcattagttcaacatgaaaaatgtcatgtagaccacatcagatcaaaagtttaaaatcccatctaaaacatccacaccaggtgtgaatgaggcttccgagagtgtccattaagtgcagatccttgacataattcccttacctctgtcgacctgtgaaactgaacaaacagcttatctgcccctaatgtgaaatgatgggacagacatagaataaccactacagtgattctagttcaaaatgagggaacatggaggggataaagaagtcaataacccaaaatagtttggaaatggagctgggcaaaatccagcaggagtttcttagttaggatccacagcctgggactgaccctctgtcctgtgggtctttgcctctgggctctctgctctgcatttcttgaaaccattattatttatcatttttctcacactgttttgcgtatggctcctattgcactcaaaatgtttttgagattcatccatgttgttttgtgtgtcaaaagtttgttcctttagccattccatggaatgaatgtatcacagtttattgatccattcttgtattgatagatatttgaatgtttccagtttttcctattatgaataaaactgctatgaacattcttgtataaatcattttctggacatatgttttaatttctcttggataaatgcttaggaattagtgagtcatagaatagatagttgtttagttctgtaagaatatgccagacattttttcccaaagtgtttatactattgtacattccaaccattaatgtatgaaggtgagaaagcttttgctacttccaaagaggcctctctatatacatgtaattttttctaactggagacaggctgatgacttcagggacatgagcatgggatacctgtcatcaccaccaccataaagttgggattcaggaaggaggttaatcatataaagaatcctgtgaccagtatgagcttctctcaggccacacagggcactcaagtgaacagggcatgggggccctggggtcatggtaagaaagtgtctcattggtaaaaccttttcctctggggaggtaaataaatgatttgtttcttcttggtagcccttgaagataaggatggtcaaacaaaataatatcatacctggagaaactcagatcttgctaagatttactggttgggaatccaaagttaatgccaagaagcagccgccagttgggatcaaatgtgagcctatggatcaaggtgcgtactcaaacacagagagctttctgaaagatgctaccagtagtttttccagggcagagatgggtcctttatttttctctctaatctagcccatatgcttagctgagttttctttgtatcactttaaatgatgatgtcccttgttcaacaattttctaaacattctttagataataattttatgggcattctttattgcattaggcttaaattttttaatgcatcttaaggttttattgcaaaatattgccttgtttcctttttaagatgatacagtttataatatgcaaatttgttgtctgtcccctccctttatgtacatagaaaatgagcaaacaggtggccatgaaacagatggtcatagaattggttcagtggttgtgagtgcagcaacccaagagtgtcttatctgaaataccaccaggaatgtctggacacagtagacaaaggtttttcaactggacgccttaggatacatgcttgcaaaaacaaagtagccaaaaagaaaccagagtcacagaatatcagagccagaggaacatttggaggtaattcagtacctcctccttttcaacctacagggga

SEQ ID NO: 462919 - DNA, 3479 bp, Homo sapiens
tgcgccttgggctctcctgacgcgctgagcgggaccctgaggagccagctggcgcaggctatgggctgggcggcggttgagacagcggcggtattgggaggggtaggtgagggtcgcgaggctgcgtgagcatctgagtgaacgcggtgcttttgggaacgcgggacgggcgacctgtggcgccaggagcgggccgaggcgcggcgcacggatgccgtctggatgggaagttacggtttacagcgaagtccacccagcgtttccgagatctcactctgttgcccaggctggagtgcagtggcacaatcacagctgaccgcaaccttgacctcccaaggctcaggtgatcctcctgcctcagcccccaggtagctgggacctacagacagggcctcactctattgcccaggctagagtgccgtggcaggatctcagctcactgcaacctccacctcctggctcaagcgatcctcccacctcagcctcctgagtagctgcgactataggagtgtgccaccatgcctggcttaattttcatattttttgtagagatggggattcaacatgtttcccaggcaatctgaaagcaaatcctgtttagatgcaggcgaaggttcctggtgacccaggctctcaccttaccgtcccttaccgtcctcctgagggtgtcctggagcttcagtgctgtgtgttcttggcctccacgctgggggtgccaccaactcccactgtccagggcttccagtggactctccgaggtactgatgtagaaacttccccattcggtgcaccaagagcaacctcacacggtgtgggccgaatgaagagctgccagatcccacagaaatgtgattgataacagtaaagccacactcctcaagtgcctgaaatacccctcattgtcttcttcaggtggcaagggctctggaacagccacataaaggtgagggcaatatttttactgtagttctttcattgattggttgattgatttttttctcttagagggttagcatacatttatctgaaattgaaattcaagaggagagacaggcacctgtactagttttctcttgctgcctattatcacattaccacaaaccagtggtttgaaaccacagaagtctggaatgaagtggccgggttctctgatcagagtcatgtgaggcccaggttcactacagataatgaaagagttcctattcttgtttgtgggggactgagggccctttttctgtgctggctgtcagcggggagacagtctactctgactccagaggccacgtgctttcctccttacctgtctgtttcatctttcaaccaataacaactcatggagtccttctcaagctcccaccttctctgacttcatcttctccaaccagccacacaaagctctgtcatgtatggagtgatgtgattagatcgagttcatgcggtaacctcaccatcttaaagtcatataactggcatataacaacatagtcacaggaatggtgtctcatcaccttaagaggctttagagacaagggtgtggcatgtttggggaccatttcagaaattccatctaccacagtaggacactcacattcccccatctgcaaagtgcatttaccctctcccctgaggtttccagatttcatgtcattaaagcattagttcaacatgaaaaatgtcatgtagaccacatcagatcaaaagtttaaaatcccatctaaaacatccacaccaggtgtgaatgaggcttccgagagtgtccattaagtgcagatccttgacataattcccttacctctgtcgacctgtgaaactgaacaaacagcttatctgcccctaatgtgaaatgatgggacagacatagaataaccactacagtgattctagttcaaaatgagggaacatggaggggataaagaagtcaataacccaaaatagtttggaaatggagctgggcaaaatccagcaggagtttcttagttaggatccacagcctgggactgaccctctgtcctgtgggtctttgcctctgggctctctgctctgcatttcttgaaaccattattatttatcatttttctcacactgttttgcgtatggctcctattgcactcaaaatgtttttgagattcatccatgttgttttgtgtgtcaaaagtttgttcctttagccattccatggaatgaatgtatcacagtttattgatccattcttgtattgatagatatttgaatgtttccagtttttcctattatgaataaaactgctatgaacattcttgtataaatcattttctggacatatgttttaatttctcttggataaatgcttaggaattagtgagtcatagaatagatagttgtttagttctgtaagaatatgccagacattttttcccaaagtgtttatactattgtacattccaaccattaatgtatgaaggtgagaaagcttttgctacttccaaagaggcctctctatatacatgtaattttttctaactggagacaggctgatgacttcagggacatgagcatgggatacctgtcatcaccaccaccataaagttgggattcaggaaggaggttaatcatataaagaatcctgtgaccagtatgagcttctctcaggccacacagggcactcaagtgaacagggcatgggggccctggggtcatggtaagaaagtgtctcattggtaaaaccttttcctctggggaggtaaataaatgatttgtttcttcttggtagcccttgaagataaggatggtcaaacaaaataatatcatacctggagaaactcagatcttgctaagatttactggttgggaatccaaagttaatgccaagaagcagccgccagttgggatcaaatgtgagcctatggatcaaggtgcgtactcaaacacagagagctttctgaaagatgctaccagtagtttttccagggcagagatgggtcctttatttttctctctaatctagcccatatgcttagctgagttttctttgtatcactttaaatgatgatgtcccttgttcaacaattttctaaacattctttagataataattttatgggcattctttattgcattaggcttaaattttttaatgcatcttaaggttttattgcaaaatattgccttgtttcctttttaagatgatacagtttataatatgcaaatttgttgtctgtcccctccctttatgtacatagaaaatgagcaaacaggtggccatgaaacagatggtcatagaattggttcagtggttgtgagtgcagcaacccaagagtgtcttatctgaaataccaccaggaatgtctggacacagtagacaaaggtttttcaactggacgccttaggatacatgcttgcaaaaacaaagtagccaaaaagaaaccagagtcacagaatatcagagccagaggaacatttggaggtaattcagtacctcctccttttcaacctacagggga

SEQ ID NO: 462920 - DNA, 3434 bp, Homo sapiens
tgcgccttgggctctcctgacgcgctgagcgggaccctgaggagccagctggcgcaggctatgggctgggcggcggttgagacagcggcggtattgggaggggtaggtgagggtcgcgaggctgcgtgagcatctgagtgaacgcggtgcttttgggaacgcgggacgggcgacctgtggcgccaggagcgggccgaggcgcggcgcacggatgccgtctggatgggaagttacggtttacagcgaagtccacccagcgtttccgaggtgaaggcgccgcgccaggccggggggcggtgagtccgggacccgcgggtacacagctgggtcaacacatgaggcgcgtttgtagccatcactgaatcacctcatgactagcggggcaggcctctaattcaccgcaggatttccaatctcactctgttgcccaggctggagtgcagtggcacaatcacagctgaccgcaaccttgacctcccaaggctcaggtgatcctcctgcctcagcccccaggtagctgggacctacaggcaatctgaaagcaaatcctgtttagatgcaggcgaaggttcctggtgacccaggctctcaccttaccgtcccttaccgtcctcctgagggtgtcctggagcttcagtgctgtgtgttcttggcctccacgctgggggtgccaccaactcccactgtccagggcttccagtggactctccgaggtactgatgtagaaacttccccattcggtgcaccaagagcaacctcacacggtgtgggccgaatgaagagctgccagatcccacagaaatgtgattgataacagtaaagccacactcctcaagtgcctgaaatacccctcattgtcttcttcaggtggcaagggctctggaacagccacataaaggtgagggcaatatttttactgtagttctttcattgattggttgattgatttttttctcttagagggttagcatacatttatctgaaattgaaattcaagaggagagacaggcacctgtactagttttctcttgctgcctattatcacattaccacaaaccagtggtttgaaaccacagaagtctggaatgaagtggccgggttctctgatcagagtcatgtgaggcccaggttcactacagataatgaaagagttcctattcttgtttgtgggggactgagggccctttttctgtgctggctgtcagcggggagacagtctactctgactccagaggccacgtgctttcctccttacctgtctgtttcatctttcaaccaataacaactcatggagtccttctcaagctcccaccttctctgacttcatcttctccaaccagccacacaaagctctgtcatgtatggagtgatgtgattagatcgagttcatgcggtaacctcaccatcttaaagtcatataactggcatataacaacatagtcacaggaatggtgtctcatcaccttaagaggctttagagacaagggtgtggcatgtttggggaccatttcagaaattccatctaccacagtaggacactcacattcccccatctgcaaagtgcatttaccctctcccctgaggtttccagatttcatgtcattaaagcattagttcaacatgaaaaatgtcatgtagaccacatcagatcaaaagtttaaaatcccatctaaaacatccacaccaggtgtgaatgaggcttccgagagtgtccattaagtgcagatccttgacataattcccttacctctgtcgacctgtgaaactgaacaaacagcttatctgcccctaatgtgaaatgatgggacagacatagaataaccactacagtgattctagttcaaaatgagggaacatggaggggataaagaagtcaataacccaaaatagtttggaaatggagctgggcaaaatccagcaggagtttcttagttaggatccacagcctgggactgaccctctgtcctgtgggtctttgcctctgggctctctgctctgcatttcttgaaaccattattatttatcatttttctcacactgttttgcgtatggctcctattgcactcaaaatgtttttgagattcatccatgttgttttgtgtgtcaaaagtttgttcctttagccattccatggaatgaatgtatcacagtttattgatccattcttgtattgatagatatttgaatgtttccagtttttcctattatgaataaaactgctatgaacattcttgtataaatcattttctggacatatgttttaatttctcttggataaatgcttaggaattagtgagtcatagaatagatagttgtttagttctgtaagaatatgccagacattttttcccaaagtgtttatactattgtacattccaaccattaatgtatgaaggtgagaaagcttttgctacttccaaagaggcctctctatatacatgtaattttttctaactggagacaggctgatgacttcagggacatgagcatgggatacctgtcatcaccaccaccataaagttgggattcaggaaggaggttaatcatataaagaatcctgtgaccagtatgagcttctctcaggccacacagggcactcaagtgaacagggcatgggggccctggggtcatggtaagaaagtgtctcattggtaaaaccttttcctctggggaggtaaataaatgatttgtttcttcttggtagcccttgaagataaggatggtcaaacaaaataatatcatacctggagaaactcagatcttgctaagatttactggttgggaatccaaagttaatgccaagaagcagccgccagttgggatcaaatgtgagcctatggatcaaggtgcgtactcaaacacagagagctttctgaaagatgctaccagtagtttttccagggcagagatgggtcctttatttttctctctaatctagcccatatgcttagctgagttttctttgtatcactttaaatgatgatgtcccttgttcaacaattttctaaacattctttagataataattttatgggcattctttattgcattaggcttaaattttttaatgcatcttaaggttttattgcaaaatattgccttgtttcctttttaagatgatacagtttataatatgcaaatttgttgtctgtcccctccctttatgtacatagaaaatgagcaaacaggtggccatgaaacagatggtcatagaattggttcagtggttgtgagtgcagcaacccaagagtgtcttatctgaaataccaccaggaatgtctggacacagtagacaaaggtttttcaactggacgccttaggatacatgcttgcaaaaacaaagtagccaaaaagaaaccagagtcacagaatatcagagccagaggaacatttggaggtaattcagtacctcctccttttcaacctacagggga

SEQ ID NO: 462921 - DNA, 2893 bp, Homo sapiens
aataaatactaagggaactcagaggccagtgccagcatgggtcctccgtatgctgaacgccggtcccctgggcccatttttctttctctgtactttgtctctgtgtctctttcttttccaagtctctccttccacctaatgagaaacgcccacaggtgtggaggggcaacccatcccttcactgaaccatttttattcttccagaaatgtgattgataacagtaaagccacactcctcaagtgcctgaaatacccctcattgtcttcttcaggtggcaagggctctggaacagccacataaaggtgagggcaatatttttactgtagttctttcattgattggttgattgatttttttctcttagagggttagcatacatttatctgaaattgaaattcaagaggagagacaggcacctgtactagttttctcttgctgcctattatcacattaccacaaaccagtggtttgaaaccacagaagtctggaatgaagtggccgggttctctgatcagagtcatgtgaggctaaaatccgggaatgggctggctgtgtttttttcctagagctcaagctatttttccaggttcactacagataatgaaagagttcctattcttgtttgtgggggactgagggccctttttctgtgctggctgtcagcggggagacagtctactctgactccagaggccacgtgctttcctccttacctgtctgtttcatctttcaaccaataacaactcatggagtccttctcaagctcccaccttctctgacttcatcttctccaaccagccacacaaagctctgtcatgtatggagtgatgtgattagatcgagttcatgcggtaacctcaccatcttaaagtcatataactggcatataacaacatagtcacaggaatggtgtctcatcaccttaagaggctttagagacaagggtgtggcatgtttggggaccatttcagaaattccatctaccacagtaggacactcacattcccccatctgcaaagtgcatttaccctctcccctgaggtttccagatttcatgtcattaaagcattagttcaacatgaaaaatgtcatgtagaccacatcagatcaaaagtttaaaatcccatctaaaacatccacaccaggtgtgaatgaggcttccgagagtgtccattaagtgcagatccttgacataattcccttacctctgtcgacctgtgaaactgaacaaacagcttatctgcccctaatgtgaaatgatgggacagacatagaataaccactacagtgattctagttcaaaatgagggaacatggaggggataaagaagtcaataacccaaaatagtttggaaatggagctgggcaaaatccagcaggagtttcttagttaggatccacagcctgggactgaccctctgtcctgtgggtctttgcctctgggctctctgctctgcatttcttgaaaccattattatttatcatttttctcacactgttttgcgtatggctcctattgcactcaaaatgtttttgagattcatccatgttgttttgtgtgtcaaaagtttgttcctttagccattccatggaatgaatgtatcacagtttattgatccattcttgtattgatagatatttgaatgtttccagtttttcctattatgaataaaactgctatgaacattcttgtataaatcattttctggacatatgttttaatttctcttggataaatgcttaggaattagtgagtcatagaatagatagttgtttagttctgtaagaatatgccagacattttttcccaaagtgtttatactattgtacattccaaccattaatgtatgaaggtgagaaagcttttgctacttccaaagaggcctctctatatacatgtaattttttctaactggagacaggctgatgacttcagggacatgagcatgggatacctgtcatcaccaccaccataaagttgggattcaggaaggaggttaatcatataaagaatcctgtgaccagtatgagcttctctcaggccacacagggcactcaagtgaacagggcatgggggccctggggtcatggtaagaaagtgtctcattggtaaaaccttttcctctggggaggtaaataaatgatttgtttcttcttggtagcccttgaagataaggatggtcaaacaaaataatatcatacctggagaaactcagatcttgctaagatttactggttgggaatccaaagttaatgccaagaagcagccgccagttgggatcaaatgtgagcctatggatcaaggtgcgtactcaaacacagagagctttctgaaagatgctaccagtagtttttccagggcagagatgggtcctttatttttctctctaatctagcccatatgcttagctgagttttctttgtatcactttaaatgatgatgtcccttgttcaacaattttctaaacattctttagataataattttatgggcattctttattgcattaggcttaaattttttaatgcatcttaaggttttattgcaaaatattgccttgtttcctttttaagatgatacagtttataatatgcaaatttgttgtctgtcccctccctttatgtacatagaaaatgagcaaacaggtggccatgaaacagatggtcatagaattggttcagtggttgtgagtgcagcaacccaagagtgtcttatctgaaataccaccaggaatgtctggacacagtagacaaaggtttttcaactggacgccttaggatacatgcttgcaaaaacaaagtagccaaaaagaaaccagagtcacagaatatcagagccagaggaacatttggaggtaattcagtacctcctccttttcaacctacagggga

SEQ ID NO: 462922 - DNA, 3041 bp, Homo sapiens
tgcgccttgggctctcctgacgcgctgagcgggaccctgaggagccagctggcgcaggctatgggctgggcggcggttgagacagcggcggtattgggaggggtaggtgagggtcgcgaggctgcgtgagcatctgagtgaacgcggtgcttttgggaacgcgggacgggcgacctgtggcgccaggagcgggccgaggcgcggcgcacggatgccgtctggatgggaagttacggtttacagcgaagtccacccagcgtttccgaggtgaaggcgccgcgccaggccggggggcggtgagtccgggacccgcgggtacacagctgggtcctgcggctgtcgcaagttttgttgcgagcgacggagggcgaggcggggtggggggttgggagggcatgtgttccggccccgccgaggcttaagttccatgcgttcgattcctcgcttgccgctgccgcccgcagccctcatctcttgggcgctggggaagaaactcgctggcgggtgttctgtggcatcccagggggtggagggacgagcagcttcgggggcacgtcctcgtgtatcctgtggaggaccctgaccccgcaccccaccctcgaggccagaaatcagttgcctctggggacctgagaggcgagaccactcgcgcccctgacttgcaaagttggggtctttattggcctccgggattctgctcctggcggtttctccaggctggtgatgggcaacacatgaggcgcgtttgtagccatcactgaatcacctcatgactagcggggcaggcctctaattcaccgcaggatttccagtaggttggattgtggggttggtgtttgcactccaaagagttggcgtgatttccctgtatctgtctttctggcttgttagatcttctcatttggcgtcctttctccgaagagttaaccaagacgtttggcgtggttttcttgctttcctcctatcttttgctgctagagctgctttcaaaaagaagtcttttcttgcagtgataccttttctttgggttacagtgttgttcatcctttctttgccgaaagaatgaatcccagtgcttcacgaagttaaaggaaagatctgctggtagtgtttagtctttgttctgagctgatatgtgttagtagctttttgtttttaaattttattagtaaaatttcaccagtgaaccagaagctctttttttctgttgtgaaatgctagctttaagatttctgagaactttgtgtcaaagaaatctttgaaaagttactgaagtatacagagaggttcacaattttaaatgtgcaggtggtccgggcgcggtagatcacacctgtaatcccagcactttgggacgccaaggtgggcggatcacttgagcccaggatttccagaccagcctgggcaacgtgccaaaaccctatctctactaaaattacaaaagttagctgtgtgtggtggtgtgtgcctgtagtcccagctacctggtaggctgaggtgggaggatcaccagagcccaggaggttgagattgcagtgagccgtgatcatggcagtgcactcccgcctgggtggcagagtgagaccctgtctccaaaaaaaaaaaaaaaaaaaaaaaagtacagataatgaatttttaccaagtgaaccaccacagatcaagaaatagaacattactagactggggtatatttgtaggagtgacattgttggttttagaggtatatgaatgataaaacttagtattacatattgttgaacgttttcccaaagtggttgtaccatttagcagggatattctggttaccccacaaccttgctgatgcctgtcagttaaaaattattttgccattctagtaggggtgcagtaatgtatcagtgtgatttcattttgcattttcctggtattgagattgagtatcttttattgtcatttgtgtgtcctcttttgtgaagtgcctgttaaatctttttatccagttttcattgatatgcttgtttttctgttgatttgtaatacttttttccggatatgtgtcctttctacgatatatatgtattgcatttccctttttttcaatctgtagcttgccttttcgctcttttaatggtgcttattcatgaatggagattctctaactttttttttttctttttgagacaagatctcactctgttgcccaggctggagtgcagtggcacaatcacagctgaccgcaaccttgacctcccaaggctcaggtgatcctcctgcctcagcccccaggtagctgggacctacagacagggcctcactctattgcccaggctagagtgccgtggcaggatctcagctcactgcaacctccacctcctggctcaagcgatcctcccacctcagcctcctgagtagctgcgactataggagtgtgccaccatgcctggcttaattttcatattttttgtagagatggggattcaacatgtttcccaggcaatctgaaagcaaatcctgtttagatgcaggcgaaggttcctggtgacccaggctctcaccttaccgtcccttaccgtcctcctgagggtgtcctggagcttcagtgctgtgtgttcttggcctccacgctgggggtgccaccaactcccactgtccagggcttccagtggactctccgaggtactgatgtagaaacttccccattcggtgcaccaagagcaacctcacacggtgtgggccgaatgaagagctgccagatcccacagcccttgaagataaggatggtcaaacaaaataatatcatacctggagaaactcagatcttgctaagatttactggttgggaatccaaagttaatgccaagaagcagccgccagttgggatcaaatgtgagcctatggatcaagaccgttacctggcacgctggccacaatctacctcactcttatcagagtctgagctactggcagtgctttcagctctgagttgaggcacctcgaaccttgtttttgtggtgaaggatcctaaagtgctgtgggagtgatcacatttttcacaacagtaa

SEQ ID NO: 462923 - DNA, 5376 bp, Homo sapiens
tgcgccttgggctctcctgacgcgctgagcgggaccctgaggagccagctggcgcaggctatgggctgggcggcggttgagacagcggcggtattgggaggggtaggtgagggtcgcgaggctgcgtgagcatctgagtgaacgcggtgcttttgggaacgcgggacgggcgacctgtggcgccaggagcgggccgaggcgcggcgcacggatgccgtctggatgggaagttacggtttacagcgaagtccacccagcgtttccgaggtgaaggcgccgcgccaggccggggggcggtgagtccgggacccgcgggtacacagctgggtcctgcggctgtcgcaagttttgttgcgagcgacggagggcgaggcggggtggggggttgggagggcatgtgttccggccccgccgaggcttaagttccatgcgttcgattcctcgcttgccgctgccgcccgcagccctcatctcttgggcgctggggaagaaactcgctggcgggtgttctgtggcatcccagggggtggagggacgagcagcttcgggggcacgtcctcgtgtatcctgtggaggaccctgaccccgcaccccaccctcgaggccagaaatcagttgcctctggggacctgagaggcgagaccactcgcgcccctgacttgcaaagttggggtctttattggcctccgggattctgctcctggcggtttctccaggctggtgatgggcaacacatgaggcgcgtttgtagccatcactgaatcacctcatgactagcggggcaggcctctaattcaccgcaggatttccagtaggttggattgtggggttggtgtttgcactccaaagagttggcgtgatttccctgtatctgtctttctggcttgttagatcttctcatttggcgtcctttctccgaagagttaaccaagacgtttggcgtggttttcttgctttcctcctatcttttgctgctagagctgctttcaaaaagaagtcttttcttgcagtgataccttttctttgggttacagtgttgttcatcctttctttgccgaaagaatgaatcccagtgcttcacgaagttaaaggaaagatctgctggtagtgtttagtctttgttctgagctgatatgtgttagtagctttttgtttttaaattttattagtaaaatttcaccagtgaaccagaagctctttttttctgttgtgaaatgctagctttaagatttctgagaactttgtgtcaaagaaatctttgaaaagttactgaagtatacagagaggttcacaattttaaatgtgcaggtggtccgggcgcggtagatcacacctgtaatcccagcactttgggacgccaaggtgggcggatcacttgagcccaggatttccagaccagcctgggcaacgtgccaaaaccctatctctactaaaattacaaaagttagctgtgtgtggtggtgtgtgcctgtagtcccagctacctggtaggctgaggtgggaggatcaccagagcccaggaggttgagattgcagtgagccgtgatcatggcagtgcactcccgcctgggtggcagagtgagaccctgtctccaaaaaaaaaaaaaaaaaaaaaaaagtacagataatgaatttttaccaagtgaaccaccacagatcaagaaatagaacattactagactggggtatatttgtaggagtgacattgttggttttagaggtatatgaatgataaaacttagtattacatattgttgaacgttttcccaaagtggttgtaccatttagcagggatattctggttaccccacaaccttgctgatgcctgtcagttaaaaattattttgccattctagtaggggtgcagtaatgtatcagtgtgatttcattttgcattttcctggtattgagattgagtatcttttattgtcatttgtgtgtcctcttttgtgaagtgcctgttaaatctttttatccagttttcattgatatgcttgtttttctgttgatttgtaatacttttttccggatatgtgtcctttctacgatatatatgtattgcatttccctttttttcaatctgtagcttgccttttcgctcttttaatggtgcttattcatgaatggagattctctaactttttttttttctttttgagacaagatctcactctgttgcccaggctggagtgcagtggcacaatcacagctgaccgcaaccttgacctcccaaggctcaggtgatcctcctgcctcagcccccaggtagctgggacctacagacagggcctcactctattgcccaggctagagtgccgtggcaggatctcagctcactgcaacctccacctcctggctcaagcgatcctcccacctcagcctcctgagtagctgcgactataggagtgtgccaccatgcctggcttaattttcatattttttgtagagatggggattcaacatgtttcccaggcaatctgaaagcaaatcctgtttagatgcaggcgaaggttcctggtgacccaggctctcaccttaccgtcccttaccgtcctcctgagggtgtcctggagcttcagtgctgtgtgttcttggcctccacgctgggggtgccaccaactcccactgtccagggcttccagtggactctccgaggtactgatgtagaaacttccccattcggtgcaccaagagcaacctcacacggtgtgggccgaatgaagagctgccagatcccacagaaatgtgattgataacagtaaagccacactcctcaagtgcctgaaatacccctcattgtcttcttcaggtggcaagggctctggaacagccacataaaggtgagggcaatatttttactgtagttctttcattgattggttgattgatttttttctcttagagggttagcatacatttatctgaaattgaaattcaagaggagagacaggcacctgtactagttttctcttgctgcctattatcacattaccacaaaccagtggtttgaaaccacagaagtctggaatgaagtggccgggttctctgatcagagtcatgtgaggcccaggttcactacagataatgaaagagttcctattcttgtttgtgggggactgagggccctttttctgtgctggctgtcagcggggagacagtctactctgactccagaggccacgtgctttcctccttacctgtctgtttcatctttcaaccaataacaactcatggagtccttctcaagctcccaccttctctgacttcatcttctccaaccagccacacaaagctctgtcatgtatggagtgatgtgattagatcgagttcatgcggtaacctcaccatcttaaagtcatataactggcatataacaacatagtcacaggaatggtgtctcatcaccttaagaggctttagagacaagggtgtggcatgtttggggaccatttcagaaattccatctaccacagtaggacactcacattcccccatctgcaaagtgcatttaccctctcccctgaggtttccagatttcatgtcattaaagcattagttcaacatgaaaaatgtcatgtagaccacatcagatcaaaagtttaaaatcccatctaaaacatccacaccaggtgtgaatgaggcttccgagagtgtccattaagtgcagatccttgacataattcccttacctctgtcgacctgtgaaactgaacaaacagcttatctgcccctaatgtgaaatgatgggacagacatagaataaccactacagtgattctagttcaaaatgagggaacatggaggggataaagaagtcaataacccaaaatagtttggaaatggagctgggcaaaatccagcaggagtttcttagttaggatccacagcctgggactgaccctctgtcctgtgggtctttgcctctgggctctctgctctgcatttcttgaaaccattattatttatcatttttctcacactgttttgcgtatggctcctattgcactcaaaatgtttttgagattcatccatgttgttttgtgtgtcaaaagtttgttcctttagccattccatggaatgaatgtatcacagtttattgatccattcttgtattgatagatatttgaatgtttccagtttttcctattatgaataaaactgctatgaacattcttgtataaatcattttctggacatatgttttaatttctcttggataaatgcttaggaattagtgagtcatagaatagatagttgtttagttctgtaagaatatgccagacattttttcccaaagtgtttatactattgtacattccaaccattaatgtatgaaggtgagaaagcttttgctacttccaaagaggcctctctatatacatgtaattttttctaactggagacaggctgatgacttcagggacatgagcatgggatacctgtcatcaccaccaccataaagttgggattcaggaaggaggttaatcatataaagaatcctgtgaccagtatgagcttctctcaggccacacagggcactcaagtgaacagggcatgggggccctggggtcatggtaagaaagtgtctcattggtaaaaccttttcctctggggaggtaaataaatgatttgtttcttcttggtagcccttgaagataaggatggtcaaacaaaataatatcatacctggagaaactcagatcttgctaagatttactggttgggaatccaaagttaatgccaagaagcagccgccagttgggatcaaatgtgagcctatggatcaaggtgcgtactcaaacacagagagctttctgaaagatgctaccagtagtttttccagggcagagatgggtcctttatttttctctctaatctagcccatatgcttagctgagttttctttgtatcactttaaatgatgatgtcccttgttcaacaattttctaaacattctttagataataattttatgggcattctttattgcattaggcttaaattttttaatgcatcttaaggttttattgcaaaatattgccttgtttcctttttaagatgatacagtttataatatgcaaatttgttgtctgtcccctccctttatgtacatagaaaatgagcaaacaggtggccatgaaacagatggtcatagaattggttcagtggttgtgagtgcagcaacccaagagtgtcttatctgaaataccaccaggaatgtctggacacagtagacaaaggtttttcaactggacgccttaggatacatgcttgcaaaaacaaagtagccaaaaagaaaccagagtcacagaatatcagagccagaggaacatttggaggtaattcagtacctcctccttttcaacctacagggga

SEQ ID NO: 462924 - DNA, 2954 bp, Homo sapiens
tgcgccttgggctctcctgacgcgctgagcgggaccctgaggagccagctggcgcaggctatgggctgggcggcggttgagacagcggcggtattgggaggggtaggtgagggtcgcgaggctgcgtgagcatctgagtgaacgcggtgcttttgggaacgcgggacgggcgacctgtggcgccaggagcgggccgaggcgcggcgcacggatgccgtctggatgggaagttacggtttacagcgaagtccacccagcgtttccgaggtgaaggcgccgcgccaggccggggggcggtgagtccgggacccgcgggtacacagctgggtcctgcggctgtcgcaagttttgttgcgagcgacggagggcgaggcggggtggggggttgggagggcatgtgttccggccccgccgaggcttaagttccatgcgttcgattcctcgcttgccgctgccgcccgcagccctcatctcttgggcgctggggaagaaactcgctggcgggtgttctgtggcatcccagggggtggagggacgagcagcttcgggggcacgtcctcgtgtatcctgtggaggaccctgaccccgcaccccaccctcgaggccagaaatcagttgcctctggggacctgagaggcgagaccactcgcgcccctgacttgcaaagttggggtctttattggcctccgggattctgctcctggcggtttctccaggctggtgatgggcaacacatgaggcgcgtttgtagccatcactgaatcacctcatgactagcggggcaggcctctaattcaccgcaggatttccagtaggttggattgtggggttggtgtttgcactccaaagagttggcgtgatttccctgtatctgtctttctggcttgttagatcttctcatttggcgtcctttctccgaagagttaaccaagacgtttggcgtggttttcttgctttcctcctatcttttgctgctagagctgctttcaaaaagaagtcttttcttgcagtgataccttttctttgggttacagtgttgttcatcctttctttgccgaaagaatgaatcccagtgcttcacgaagttaaaggaaagatctgctggtagtgtttagtctttgttctgagctgatatgtgttagtagctttttgtttttaaattttattagtaaaatttcaccagtgaaccagaagctctttttttctgttgtgaaatgctagctttaagatttctgagaactttgtgtcaaagaaatctttgaaaagttactgaagtatacagagaggttcacaattttaaatgtgcaggtggtccgggcgcggtagatcacacctgtaatcccagcactttgggacgccaaggtgggcggatcacttgagcccaggatttccagaccagcctgggcaacgtgccaaaaccctatctctactaaaattacaaaagttagctgtgtgtggtggtgtgtgcctgtagtcccagctacctggtaggctgaggtgggaggatcaccagagcccaggaggttgagattgcagtgagccgtgatcatggcagtgcactcccgcctgggtggcagagtgagaccctgtctccaaaaaaaaaaaaaaaaaaaaaaaagtacagataatgaatttttaccaagtgaaccaccacagatcaagaaatagaacattactagactggggtatatttgtaggagtgacattgttggttttagaggtatatgaatgataaaacttagtattacatattgttgaacgttttcccaaagtggttgtaccatttagcagggatattctggttaccccacaaccttgctgatgcctgtcagttaaaaattattttgccattctagtaggggtgcagtaatgtatcagtgtgatttcattttgcattttcctggtattgagattgagtatcttttattgtcatttgtgtgtcctcttttgtgaagtgcctgttaaatctttttatccagttttcattgatatgcttgtttttctgttgatttgtaatacttttttccggatatgtgtcctttctacgatatatatgtattgcatttccctttttttcaatctgtagcttgccttttcgctcttttaatggtgcttattcatgaatggagattctctaactttttttttttctttttgagacaagatctcactctgttgcccaggctggagtgcagtggcacaatcacagctgaccgcaaccttgacctcccaaggctcaggtgatcctcctgcctcagcccccaggtagctgggacctacaggcaatctgaaagcaaatcctgtttagatgcaggcgaaggttcctggtgacccaggctctcaccttaccgtcccttaccgtcctcctgagggtgtcctggagcttcagtgctgtgtgttcttggcctccacgctgggggtgccaccaactcccactgtccagggcttccagtggactctccgaggtactgatgtagaaacttccccattcggtgcaccaagagcaacctcacacggtgtgggccgaatgaagagctgccagatcccacagcccttgaagataaggatggtcaaacaaaataatatcatacctggagaaactcagatcttgctaagatttactggttgggaatccaaagttaatgccaagaagcagccgccagttgggatcaaatgtgagcctatggatcaagaaaatgagcaaacaggtggccatgaaacagatggtcatagaattggttcagtggttgtgagtgcagcaacccaagagtgtcttatctgaaataccaccaggaatgtctggacacagtagacaaaggtttttcaactggacgccttaggatacatgcttgcaaaaacaaagtagccaaaaagaaaccagagtcacagaatatcagagccagaggaacatttggaggtaattcagtacctcctccttttcaacctacagggga

SEQ ID NO: 462925 - DNA, 2610 bp, Homo sapiens
tgcgccttgggctctcctgacgcgctgagcgggaccctgaggagccagctggcgcaggctatgggctgggcggcggttgagacagcggcggtattgggaggggtaggtgagggtcgcgaggctgcgtgagcatctgagtgaacgcggtgcttttgggaacgcgggacgggcgacctgtggcgccaggagcgggccgaggcgcggcgcacggatgccgtctggatgggaagttacggtttacagcgaagtccacccagcgtttccgaggtgaaggcgccgcgccaggccggggggcggtgagtccgggacccgcgggtacacagctgggtcctgcggctgtcgcaagttttgttgcgagcgacggagggcgaggcggggtggggggttgggagggcatgtgttccggccccgccgaggcttaagttccatgcgttcgattcctcgcttgccgctgccgcccgcagccctcatctcttgggcgctggggaagaaactcgctggcgggtgttctgtggcatcccagggggtggagggacgagcagcttcgggggcacgtcctcgtgtatcctgtggaggaccctgaccccgcaccccaccctcgaggccagaaatcagttgcctctggggacctgagaggcgagaccactcgcgcccctgacttgcaaagttggggtctttattggcctccgggattctgctcctggcggtttctccaggctggtgatgggcaacacatgaggcgcgtttgtagccatcactgaatcacctcatgactagcggggcaggcctctaattcaccgcaggatttccagtaggttggattgtggggttggtgtttgcactccaaagagttggcgtgatttccctgtatctgtctttctggcttgttagatcttctcatttggcgtcctttctccgaagagttaaccaagacgtttggcgtggttttcttgctttcctcctatcttttgctgctagagctgctttcaaaaagaagtcttttcttgcagtgataccttttctttgggttacagtgttgttcatcctttctttgccgaaagaatgaatcccagtgcttcacgaagttaaaggaaagatctgctggtagtgtttagtctttgttctgagctgatatgtgttagtagctttttgtttttaaattttattagtaaaatttcaccagtgaaccagaagctctttttttctgttgtgaaatgctagctttaagatttctgagaactttgtgtcaaagaaatctttgaaaagttactgaagtatacagagaggttcacaattttaaatgtgcaggtggtccgggcgcggtagatcacacctgtaatcccagcactttgggacgccaaggtgggcggatcacttgagcccaggatttccagaccagcctgggcaacgtgccaaaaccctatctctactaaaattacaaaagttagctgtgtgtggtggtgtgtgcctgtagtcccagctacctggtaggctgaggtgggaggatcaccagagcccaggaggttgagattgcagtgagccgtgatcatggcagtgcactcccgcctgggtggcagagtgagaccctgtctccaaaaaaaaaaaaaaaaaaaaaaaagtacagataatgaatttttaccaagtgaaccaccacagatcaagaaatagaacattactagactggggtatatttgtaggagtgacattgttggttttagaggtatatgaatgataaaacttagtattacatattgttgaacgttttcccaaagtggttgtaccatttagcagggatattctggttaccccacaaccttgctgatgcctgtcagttaaaaattattttgccattctagtaggggtgcagtaatgtatcagtgtgatttcattttgcattttcctggtattgagattgagtatcttttattgtcatttgtgtgtcctcttttgtgaagtgcctgttaaatctttttatccagttttcattgatatgcttgtttttctgttgatttgtaatacttttttccggatatgtgtcctttctacgatatatatgtattgcatttccctttttttcaatctgtagcttgccttttcgctcttttaatggtgcttattcatgaatggagattctctaactttttttttttctttttgagacaagatctcactctgttgcccaggctggagtgcagtggcacaatcacagctgaccgcaaccttgacctcccaaggctcaggtgatcctcctgcctcagcccccaggtagctgggacctacaggcaatctgaaagcaaatcctgtttagatgcaggcgaaggttcctggtgacccaggctctcaccttaccgtcccttaccgtcctcctgagggtgtcctggagcttcagtgctgtgtgttcttggcctccacgctgggggtgccaccaactcccactgtccagggcttccagtggactctccgaggtactgatgtagaaacttccccattcggtgcaccaagagcaacctcacacggtgtgggccgaatgaagagctgccagatcccacaggtaaaaaccctgaggcattgccagctcgatggagtcagagagtcctttttctattatga

SEQ ID NO: 462926 - DNA, 1929 bp, Homo sapiens
ggatgtgccttccagctacttttaatgacttccttctcagcaggagagatatttatcctcactgccatgtcctatgaccgctatgtagccatctgctgtcccctgaactacgaggtattggagttggtgcatgtttaagcatttcttgtttcatctgtattgtgatctcttacattatatcttctccactgtactgaagatccctaccactaaaggctgctttctgtgatctacactgtgatgcctccagtatttaaccctgtaacctacagcctgcggaacaatgacatgaaatgtgctctgataaggttgctgcagaaaacatatggtcaggaggcttacttcatttaacactttcaagttctgtcagtgatacagtgccttacagatcacaagaaactttccttatttgtaactttggaaagacctgagaaaagaaagcaatatactcaaattattttttccctgaagaaataaatactcaagagcctaactgactatttctaagtcacttaattgcattacatcaggataatacatagtgttatagtaatcatttggtattcttctatgacaaagcatttctgcctttgtattataactttctgaaagaattggttctgtttaacatgatgctttcatctttggtctcttaataacccattttctctattttattcactgagaacaaattaaaaatgctgaggtgattcaatgagtgcagtataatgcatttgcattatactacccagataaaattcacatgactcccctgagaatctagctagagctgagcaagaacaatactaggcaaaaataacacacgacagtggatacatgcagtagctttgggtttatgcgggaaacaacattcggcgttggtgaacgcgagggactgtgtgattgggttaaagggctcagtgcggggactctgttttctggtttcagtaccacaatggacacaggcaacaaaactctgccccaggactttctcttactgggctttcctggttctcaaactcttcagctctctctctttatgctttttctggtgatgtacatcctcacagttagtggtaatgtggctatcttgatgttggtgagcacctcccatcagttgcatacccccatgtacttctttctgagcaacctctccttcctggagatttggtataccacagcagcagtgcccaaagcactggccatcctactggggagaagtcagaccatatcatttacaagctgtcttttgcagatgtactttgttttctcattaggctgcacagagtacttcctcctggcagccatggcttatgaccgctgtcttgccatctgctatcctttacactacggagccatcatgagtagcctgctctcagcgcagctggccctgggctcctgggtgtgtggtttcgtggccattgcagtgcccacagccctcatcagtggcctgtccttctgtggcccccgtgccatcaaccacttcttctgtgacattgcaccctggattgccctggcctgcaccaacacacaggcagtagagcttgtggcctttgtgattgctgttgtggttatcctgagttcatgcctcatcacctttgtctcctatgtgtacatcatcagcaccatcctcaggatcccctctgccagtggccggagcaaagccttctccacgtgctcctcgcatctcaccgtggtgctcatttggtatgggtccacagttttccttcacgtccgcacctctatcaaagatgccttggatctgatcaaagctgtccacgtcctgaacactgtggtgactccagttttaaaccccttcatctatacgcttcgtaataaggaagtaagagagactctgctgaagaaatggaagggaaaataaatctcctctaccacaacagatgtcctgtaaatggtctctgcatctat

SEQ ID NO: 462927 - DNA, 484 bp, Homo sapiens
ggatgtgccttccagctacttttaatgacttccttctcagcaggagagatatttatcctcactgccatgtcctatgaccgctatgtagccatctgctgtcccctgaactacgaggtgattcatgtgcccattagagcttgagaagcactgcttggaagccccttctgccatcaatgagcaccatcctcaggatcccctctgccagtggccggagcaaagccttctccacgtgctcctcgcatctcaccgtggtgctcatttggtatgggtccacagttttccttcacgtccgcacctctatcaaagatgccttggatctgatcaaagctgtccacgtcctgaacactgtggtgactccagttttaaaccccttcatctatacgcttcgtaataaggaagtaagagagactctgctgaagaaatggaagggaaaataaatctcctctaccacaacagatgtcctgtaaatggtctctgcatctat

SEQ ID NO: 462928 - DNA, 1174 bp, Homo sapiens
ttccccaaaatggagaattcagaagaagcagcttcacatttcctgaaagacttctgtgccacatggttgctaagcactgagagcacaaagataattaagctgattccctgtcctcagcacacccataagcctcagctgcgctcagaaaatgagggaatgagaagaaagtggaattggacagaaagccttgcttttgaatcctggctcctgcatgtattagcaaatgactcaacacatctgagcctcagtttcttcagcaatgcagtggggacaataacatctacccctcagagctgttatgaggactcaaaagatactctgtcctgtggtttggtacccaagctggtctctttggggctcagtctggtgctggttgatgggtgtggccaccccatacctactcctgcagccttttcaaagagaaggaagcttcagtgtgagcactttgaagcatctgcttactgatctgaagcctcctcaaaagttacaccaaggcccgttttgctgtcctgctcactggatccctctgctgaagaaaaaggggtcaaggataacccagacacattcatggggtgggctgctaggggtgccaggtagatgcagctgccccaaggtcggggactcaggaacttgggctctacggcatcccaccccttcctcacatctggtgtgctctggcagagtcctggctctctccaagctggtcaccaagactttcctcatacatttaaccaatctttacacaggacctccgctgacctgagcacttcctgcatgaaaggggctcaataccaaggaagaaaacagatacatgcaccctttctaagtagcaaaactgggttcaaatcctcggctacatcacttatgtgagatgaagtcccactatattgccaaggctggacttgaatccctaagctcaagtagtgttcccacctcaccctcccaagtaactgagactacaggtgcacaccactgtaccagcataattgcatatcttatcaatcaatccacagccactaaatacctactgaggtatctgtgtcccctgggctttttccaagagctttcaatatggttagatttgtttattaaatttgcataaatatgtgatatgagtagttatatattcatgtgatcatttgttcatttgtaaatattaattaaatgccttttt

SEQ ID NO: 462929 - DNA, 459 bp, Homo sapiens
cctaagaagatgtagataaagtgactgcaaggacctccgctgacctgagcacttcctgcatgaaaggggctcaataccaaggaagaaaacagatacatgcaccctttctaagtagcaaaactgggttcaaatcctcggctacatcacttatgtgagatgaagtcccactatattgccaaggctggacttgaatccctaagctcaagtagtgttcccacctcaccctcccaagtaactgagactacaggtgcacaccactgtaccagcataattgcatatcttatcaatcaatccacagccactaaatacctactgaggtatctgtgtcccctgggctttttccaagagctttcaatatggttagatttgtttattaaatttgcataaatatgtgatatgagtagttatatattcatgtgatcatttgttcatttgtaaatattaattaaatgccttttt

SEQ ID NO: 462930 - DNA, 472 bp, Homo sapiens
tttcttctctctagtggcaaggggggaaatgaggagaccttccaatgtcttctctaccaagtgaatctctgactctacaagtttccttcccaagacactgtggtccagggctacctcccttacagcctacatgacaacatgtgcaaattatttgtcagcatctaattgcaagaacggtgagtcctccgtgcctcattggaggccataaatgggtaattggagccatggttagtgggctgaggtcacacttttctgctggttaagatgcagacaccacaggcataagccgtcccctttaagacttttactggctaaaaagggcaagaacactctgttccaagaagcagaaagcaaaagaaacacagacttccttgctcctggtgtttagatctatgagcctactcttatcatatctcaagttttaatcccaaagacaagatcaagatcatgtccatacttcttaggcttaagg

SEQ ID NO: 462931 - DNA, 1155 bp, Homo sapiens
tttcttctctctagtggcaaggggggaaatgaggagaccttccaatgtcttctctaccaagtgaatctctgactctacaagtttccttcccaagacactgtggtccagggctacctcccttacagcctacatgacaacatgtgcaaattatttgtcagcatctaattgcaagaacgatgaggaaaccaaggcacagaggttaaacaacgtgtccaagccacgtagcaagtaaacaattgagccaggctccaaatccaaacgttctggcgtcagagtcctataaagatttttttggcctaatgtgaggaagtactttctaagaataagagtttaccaattaaaagggggttgctgttttatgaagatatttaaaccaaggctgaggggccattttcaagggatgctgactcggtaaaagttctttggcagcaagcatcagaaaccaaatgtaacaactttaagctaaaaaataaaaagaaggaagaggaagaagagaagatggggttgagggaggaggacaggaaaaaaaaggagaagaaaggtgaagaggaaacaacgggatggccatcgtctaagataacctgttttcactgtggagcacaggctctgaaggggacacagccaaaccacaccagctcattagcatcttcagctctgccatggcatagggcatgtctgctcatactccacttgacaagcctttcctctgcccagctccaagcatgccgtctgcagacaaaggccttgaagaggctgcatgtgtccttgaccctcactgacagcacttgcttctggactcagagggagccccagggaatgccccggccaccttccgcctgtttcaaggctttaccatccaagatcactggcaatgaacttgcaggaccaagggagcctgcaggaggaatgatctccaggaaccaccaccccttccaggagccaccgtttaagggcttgagaatggccctctcttcccctgccaactgttctttgatcctctagaacagtgttttttaaacacagcaaatcacagctcattagtgagacatgaaatcaatttagtgagctgaaatcaccatattttatcttaaaagagaaaagaaaatagtttgcgttgcacaaagtaaagaatttacccatcaaagaaaagcacct

SEQ ID NO: 462932 - DNA, 1056 bp, Homo sapiens
tgccgcaacatgaaaagtgacaaccatagcttcttaggggactcccctaaagccttcatccttctgggtgtgtctgacaggccgtggctggaactccctctctttgtggtcctcctgctgtcctatgtgctggccatgttggggaacgtcgccatcatcctggcatcccgggtggatcctcaactccacagccccatgtacatcttcctcagtcacctgtccttcctggacctctgctacaccaccacgacagtccctcagatgctggtcaacatgggcagttcccagaagaccatcagctatggaggctgcactgagcaatatgcaaccttccactggctgggatgcaccggagggcatcgtcctggccgccatggccctggaccgctacgtggccatctgcaagcccctgcactatgccgttctcatgcaccgtgctctctgtcagcagctcgtggctctggcctggctcagtggcttcggcaactccttcgtgcaggtggtcctgacggtgcaattgccattctgcgggcggcaggtgctgaacaactttttctgtgaggtgccggccgtgatcaagctgtcgtgtgctgacaccgctgtgaatgacaccatactggctgtgctggtggccttcttcgtgttggtgcccctggctctcatccttctctcctatggctttattgcccgggcagtgctcaggatccagtcctccaagggacgacacaaggcctttgggacgtgttcctcccacctgatgatcgtctccctcttctacctacctgcgatttacatgtatctgcagcccccttccagctactcccaagagcagggcaaatttatttctctcttctattccataatcacccccactctcaatcccttcacctacaccctgagaaataaagatatgaagggggctctgaggagacttctggccaggatctggaggctcttatacacaagatgaagctgaaatacaatcttattttacttacaatgaataagtgtttttctccatatacttaaatctccacaaattttacacgacttttt

SEQ ID NO: 462933 - DNA, 1543 bp, Homo sapiens
ggtggcagacatgggagagacaggcaagctgcaaagggaagtcgacgaaataaaattaaagccctacaatcgtgttcgtgtcaatgtagatggggtgcccccctcggtttgctcacagaggtgggtgtgagatcctacaggacggtctggaagacatcccatggaaggcactttattttgcccagaagctggaggaaaagcagaagggcgctgaacactgactaagaggagagagcgcacattacatggagaccatggtccccataccagaaacatgagagtagagagaagcaaagccagcatcgtggagccagtccctttatccaggatcttggagggatacagtcttctgtagaaattaaataaagactgaattcttcaatgggtattttgagaagagagccactgtaagcttatacactgtgaattgcaaaatgttactgcctctgggtggacaggttttaaaaagacttttttttttcctcctggcatggctgacagagggaaggctgggtttcaatcccatctttcccttcccttgcccagtgcttctttatgtgcacaacctgcacaactatatgtggtttgcaaacacgcataagcaaagactaacagcttctgaaacaaactctgaataaaagagggagcatattaaggcagatggcagaggaggtgagcagcatgggcagatagaagcatcacagagactacaagaagaatgtgccagaccggctcatagtggccacactgattaagaattaccatcagctctttaggatttggaaacttggaaacacattgtgtgttcttcctggtttgttatagagtatgtgtatgtacttctttctcttaaaaatatttatttttaaagaattgacttataaaattatatgtatttgtcatgtataacacaatattttgaagtacagtcctgtgtcataaggatatgttctgagaaatccatcaattttgtcattgtataaacatgatagagtgtatttacacaaacctaggtggtataaactactacacacctaggctacataatgtagcctattgctcctaggctataaacctgtataacatgctactgtactaaatactatagacaatagtcacatactggtgagtatttgcgtatcaaaacatatctaaatatagaaaagatgcagtaaaaatatggtattacaatcttatgagaccactatagtatatgaggtccatcattgattaaaacatagttatatggtgcatgactgtatatatgcattgtggaatggttaaatctagctaactaacaaatgtgttatatcacatagttattatttttgaggtgagaatacaatattcactctcttagcattttttaagaatacagtatattaactatagtcaccatgctgaatggtagatctctggaactaatttctcctatctaagtgtgattatgtaccctttgaccaacatctttctaaccccaccccacaaacaccccataataaagcctcttgtaaccaccattttactcctttttctatgagaa

SEQ ID NO: 462934 - DNA, 1869 bp, Homo sapiens
  misc_feature (281)..(281): n is a, c, g, or t
  misc_feature (283)..(283): n is a, c, g, or t
  misc_feature (285)..(285): n is a, c, g, or t
ggtgccaagccagcatctagacatgaacattctaggcacggaggccaattttacctccaaagtatctctggactccgtctcaacatccctgtccccgctgctcagcagaagtaccatctctgagaagcatatttttcaacttattgtaaatgaagcctatagggctgcatggggcagggaaattatacataatttatccaaatatttgttctttctgagagaggagtatgagagtagggatgcagctgtggggctcatagagacacttaatggagacacgncnancaattcccacaacacccctggaacatgtcttcttcaacctttaagtcaacctaatgaaatgattcaccttggagtcactaaaatgtttcatgtacttcagagttgctgccatatggttcccataaaggttctgccaaaattcccatacattagtttgccaagtatgctgctggatgttcattcagcactagtgtttaacaaaagcccggttttaaaatcagaggatatgagttgggggggccttgagggcgctgaacactgactaagaggagagagcgcacattacatggagaccatggtccccataccagaaacatgagagtagagagaagcaaagccagcatcgtggagccagtccctttatccaggatcttggagggatacagtcttctgtagaaattaaataaagactgaattcttcaatgggtattttgagaagagagccactgtaagcttatacactgtgaattgcaaaatgttactgcctctgggtggacaggttttaaaaagacttttttttttcctcctggcatggctgacagagggaaggctgggtttcaatcccatctttcccttcccttgcccagtgcttctttatgtgcacaacctgcacaactatatgtggtttgcaaacacgcataagcaaagactaacagcttctgaaacaaactctgaataaaagagggagcatattaaggcagatggcagaggaggtgagcagcatgggcagatagaagcatcacagagactacaagaagaatgtgccagaccggctcatagtggccacactgattaagaattaccatcagctctttaggatttggaaacttggaaacacattgtgtgttcttcctggtttgttatagagtatgtgtatgtacttctttctcttaaaaatatttatttttaaagaattgacttataaaattatatgtatttgtcatgtataacacaatattttgaagtacagtcctgtgtcataaggatatgttctgagaaatccatcaattttgtcattgtataaacatgatagagtgtatttacacaaacctaggtggtataaactactacacacctaggctacataatgtagcctattgctcctaggctataaacctgtataacatgctactgtactaaatactatagacaatagtcacatactggtgagtatttgcgtatcaaaacatatctaaatatagaaaagatgcagtaaaaatatggtattacaatcttatgagaccactatagtatatgaggtccatcattgattaaaacatagttatatggtgcatgactgtatatatgcattgtggaatggttaaatctagctaactaacaaatgtgttatatcacatagttattatttttgaggtgagaatacaatattcactctcttagcattttttaagaatacagtatattaactatagtcaccatgctgaatggtagatctctggaactaatttctcctatctaagtgtgattatgtaccctttgaccaacatctttctaaccccaccccacaaacaccccataataaagcctcttgtaaccaccattttactcctttttctatgagaa

SEQ ID NO: 462935 - DNA, 1468 bp, Homo sapiens
  misc_feature (24)..(24): n is a, c, g, or t
agcggagaagctggaggaaaagcngaagatacattagtttgccaagtatgctgctggatgttcattcagcactagtgtttaacaaaagcccggttttaaaatcagaggatatgagttgggggggccttgagggcgctgaacactgactaagaggagagagcgcacattacatggagaccatggtccccataccagaaacatgagagtagagagaagcaaagccagcatcgtggagccagtccctttatccaggatcttggagggatacagtcttctgtagaaattaaataaagactgaattcttcaatgggtattttgagaagagagccactgtaagcttatacactgtgaattgcaaaatgttactgcctctgggtggacaggttttaaaaagacttttttttttcctcctggcatggctgacagagggaaggctgggtttcaatcccatctttcccttcccttgcccagtgcttctttatgtgcacaacctgcacaactatatgtggtttgcaaacacgcataagcaaagactaacagcttctgaaacaaactctgaataaaagagggagcatattaaggcagatggcagaggaggtgagcagcatgggcagatagaagcatcacagagactacaagaagaatgtgccagaccggctcatagtggccacactgattaagaattaccatcagctctttaggatttggaaacttggaaacacattgtgtgttcttcctggtttgttatagagtatgtgtatgtacttctttctcttaaaaatatttatttttaaagaattgacttataaaattatatgtatttgtcatgtataacacaatattttgaagtacagtcctgtgtcataaggatatgttctgagaaatccatcaattttgtcattgtataaacatgatagagtgtatttacacaaacctaggtggtataaactactacacacctaggctacataatgtagcctattgctcctaggctataaacctgtataacatgctactgtactaaatactatagacaatagtcacatactggtgagtatttgcgtatcaaaacatatctaaatatagaaaagatgcagtaaaaatatggtattacaatcttatgagaccactatagtatatgaggtccatcattgattaaaacatagttatatggtgcatgactgtatatatgcattgtggaatggttaaatctagctaactaacaaatgtgttatatcacatagttattatttttgaggtgagaatacaatattcactctcttagcattttttaagaatacagtatattaactatagtcaccatgctgaatggtagatctctggaactaatttctcctatctaagtgtgattatgtaccctttgaccaacatctttctaaccccaccccacaaacaccccataataaagcctcttgtaaccaccattttactcctttttctatgagaa

SEQ ID NO: 462936 - DNA, 725 bp, Homo sapiens
ggtggcagacatgggagagacaggcaagctgcaaagggaagtcgacgaaataaaattaaagccctacaatcgtgttcgtgtcaatgtagatggggtgcccccctcggtttgctcacagaggtgggtgtgagatcctacaggacggtctggaagacatcccatggaaggcactttattttgcccagaagctggaggaaaagcagaagagtgctgattggtgcatttacaatcctttagctagacagaaaagttcttcaagtccccacttgacccagaaagtccagctggcttcacctcttaaaactactccacctgaggtttttagataaaaaagaattgtactcaaggaattgaagctatggagcctctgccacatctggacctgattttgatgacaagatcctgtacctcaagcccgagactaatttcataatttgatgaatctttctggagagtcatgggaggaatgtaaacaatttgtggccaaaggagaattatggtagtttgaagatgtggatacaaattatttgacattcttctcatagaaaggtaactccatagctgggagccaagtctcgaagccccatgaggggaagtggatacatctcagaattggggtttcctgatacacacgactgcatccttcatctgccaggccctgacattgtttactggagaagatgtcataggaaattgggctatgtcattgagccactggagtcaca

SEQ ID NO: 462937 - DNA, 1002 bp, Homo sapiens
ctctcctcaaccaccatcttatcaaaggtgacaagagtcacctttgctccagttcccagcaagtgtggtgtcagcacagcggcaggtcaccgttcaggaaggacccttgtaccgcatggagggctcccacatcactatctggtgcaatgtgagtggctcccagggacctcctgagcagaatttccagtggtccatttacctgccttcgtcgccagagcgagaggtgcagatcgtcagcaccatggacccttccttcccctatgccatctacacccagcgcgtccgcggagggaagatcttcatagaaagagtccaggggaacccaaccctattgcacatcacagatcttcaggcccgggatgccggagaatatgaatgccacacacccagcaccgataagcaatactttgggagttacagtgcaaagatgaacctagtgggtaaggagaagctgtcttcacgtcgccagcactccctgcagaccactgccatgccccagactctgcacagagtggagcaggacccactggagctcacttgtgaggtggcctcggagaccgttcagcacagccacctgtctgtggcctggctctggcagaaagttggcgagaagcccgtggaggtcatctccctgagccgagatttcatgcttcactctggcagcgaatatgcccagaggcagagcctgggggaggtgcggctggacaagctggggaggaccaccttctgcctcaccatcttccacctgcagccttctgaccagggcgagttctactgcgaggccgctgagtggatccaggatccggatgggtcgtggtatgctatgacccgaaagcgttccgagggagcagtggtcaacgtccagccaactggtcagtccctctgagcctcttgtcctgtcctttacttggtggtgaaagctgtcagatactgggagaatgtggagactccttctttgggcacctctaccagggcagcaggttttcatgtgaagttaaagcc

SEQ ID NO: 462938 - DNA, 326 bp, Homo sapiens
cgtcgaccgggccgcgtcgactgctacaacatggacgttatgctaagtgaaataaaccagttccgaaaggacaaatacacccatttccacttatatggggtatctaacgtcaaactcagaagaacaaagtactgcggtatttgccacaagctggtggaggagaaaatgagttgttcaatgggtattgagtgtcagccacgcaagatggaaaagcttttattacaatttttattgtgataaaaacacataaaatttaccctttcacatactttgtgtgtaccgaagagtattgttaactataggcactctttttatacaacaaatct

SEQ ID NO: 462939 - DNA, 2086 bp, Homo sapiens
tggtctgcattggggtcttgctctgttgcctagggtgtggagtgcggtggcatgatcatgcctcactatagccttgacctcctgggctcaagcgatcctcccacctgagtctcctgagtacctgggaccacaggcacatgctaacgcacccagttaatttttttattcgtagagccgaggtctcactatgttgcccagactggtctcaagctcttgggctcaagcagtcctcctgcctcagcctcccaaagtgccaggattacaggtgtgagccaccacacccagtccaaaaagtgattttctaattccatagtttcttctacatttcttaactggaattttgtaaggaagagttatccttattcatttatttacccatttacttgtaggagcatgtatcataaattcttaatctatggggtgtagttagctactgtaaatttgatgcacatatttttccagattcaataagtaggatccccatcaagctatcttctgaatctttaaaaatgtattctccttatttcatgggtatataattattttctgggcaacagtttgttcatggtacatttgtctccagccctagactcagaaaaatgtaatttattttaatggagaatactatttagaagctgcagtctctgtgtagggaggtgttcctaggtaatagtgccctggcttttaggtcttctctatggaggatatggcaaagacatacaaaattatatatacgtatccacacattaataactctatttctatattaaaaacatgaccacaagccaacacttttaattccactgcagcactgctgggttatttcttgctttccaaattcccttgtctgtagctatctttcatcacttgcaaaaatagcacgtgctcaatcctagattaaaatataagctactctcagaattgataactcataccactctttttaaaaatcaactaaccagaattcagtttttattcacagttcttatctttagctcagggcgtaatataaaagcactaggtttaaaacttacttggtcagcagcaatccacttctaggtacatgtccaaaggaactgaagaaagcatctcaatgtgtgaatgcctacctgtgttcattgcagcattattcagaagagccaagaggtggaagcaaagtaaatgtccattgacagatgaattggtaaacaaaatgcattatatacatacaatgcaatatcatttagccttaaaaacaaaattctgccatatgctacaacatggacgttatgctaagtgaaataaaccagttccgaaaggacaaatacacccatttccacttatatggggtatctaacgtcaaactcagaagaacaaagtactgcggtatttgccacaagctggtggaggagaaaatgagttgttcaatgggtattgagtgtcagccacgcaagatggaaaagctttttgagatttgttgtataaaaatatgcctatagttaacaatactcttcggtacacacaaagtatgtgaaagggtaaattttatgtgtttttatcacaataaaaattgtaataaaagaagttacttgggtcaattttgtgctttttacccccctcttcattgttgaatttttatccatttgatacaaagttcatttcagtaattcctgttaattttccattttgtgtcacaccttgctccaggccatctgcatatatacgtgcaggtcacacgggttatgatggcttagcttgggcttggaggcctgacattccagtcttcttatattaatcagaaaaacaaaatagtggtgaagtgttggggggcaatgaaaattttggggggagctatggagagataatgggcaatgtttctcaaggctgcttcaagtgggatgaggggcaacatgggaacctagagtgggagagattaaactgaagaaagattttgagaaaaggggtgatattgtggggttgttaaaaggagtatttgttgtatagaatgattggtgatggcctggatgtggttttgtatgaattgagaaactaaacggaagacacaaggtctgaataagagaaggagaaaaacaagtattagaggact

SEQ ID NO: 462940 - DNA, 2048 bp, Homo sapiens
ggctgggtgcggtggctcacgcctgtaatcccagcactttgggaggctgagaagcgatcctcccacctgagtctcctgagtacctgggaccacaggcacatgctaacgcacccagttaatttttttattcgtagagccgaggtctcactatgttgcccagactggtctcaagctcttgggctcaagcagtcctcctgcctcagcctcccaaagtgccaggattacaggtgtgagccaccacacccagtccaaaaagtgattttctaattccatagtttcttctacatttcttaactggaattttgtaaggaagagttatccttattcatttatttacccatttacttgtaggagcatgtatcataaattcttaatctatggggtgtagttagctactgtaaatttgatgcacatatttttccagattcaataagtaggatccccatcaagctatcttctgaatctttaaaaatgtattctccttatttcatgggtatataattattttctgggcaacagtttgttcatggtacatttgtctccagccctagactcagaaaaatgtaatttattttaatggagaatactatttagaagctgcagtctctgtgtagggaggtgttcctaggtaatagtgccctggcttttaggtcttctctatggaggatatggcaaagacatacaaaattatatatacgtatccacacattaataactctatttctatattaaaaacatgaccacaagccaacacttttaattccactgcagcactgctgggttatttcttgctttccaaattcccttgtctgtagctatctttcatcacttgcaaaaatagcacgtgctcaatcctagattaaaatataagctactctcagaattgataactcataccactctttttaaaaatcaactaaccagaattcagtttttattcacagttcttatctttagctcagggcgtaatataaaagcactaggtttaaaacttacttggtcagcagcaatccacttctaggtacatgtccaaaggaactgaagaaagcatctcaatgtgtgaatgcctacctgtgttcattgcagcattattcagaagagccaagaggtggaagcaaagtaaatgtccattgacagatgaattggtaaacaaaatgcattatatacatacaatgcaatatcatttagccttaaaaacaaaattctgccatatgctacaacatggacgttatgctaagtgaaataaaccagttccgaaaggacaaatacacccatttccacttatatggggtatctaacgtcaaactcagaagaacaaagtactgcggtatttgccacaagctggtggaggagaaaatgagttgttcaatgggtattgagtgtcagccacgcaagatggaaaagctttttgagatttgttgtataaaaatatgcctatagttaacaatactcttcggtacacacaaagtatgtgaaagggtaaattttatgtgtttttatcacaataaaaattgtaataaaagaagttacttgggtcaattttgtgctttttacccccctcttcattgttgaatttttatccatttgatacaaagttcatttcagtaattcctgttaattttccattttgtgtcacaccttgctccaggccatctgcatatatacgtgcaggtcacacgggttatgatggcttagcttgggcttggaggcctgacattccagtcttcttatattaatcagaaaaacaaaatagtggtgaagtgttggggggcaatgaaaattttggggggagctatggagagataatgggcaatgtttctcaaggctgcttcaagtgggatgaggggcaacatgggaacctagagtgggagagattaaactgaagaaagattttgagaaaaggggtgatattgtggggttgttaaaaggagtatttgttgtatagaatgattggtgatggcctggatgtggttttgtatgaattgagaaactaaacggaagacacaaggtctgaataagagaaggagaaaaacaagtattagaggact

SEQ ID NO: 462941 - DNA, 1982 bp, Homo sapiens
ggtgggatttatagtaataaattagtttaagattgcaggccaggcccagtggctcacacatataatcccagcactttgggaggttaaggtggacagatcactcgagctcttgggctcaagcagtcctcctgcctcagcctcccaaagtgccaggattacaggtgtgagccaccacacccagtccaaaaagtgattttctaattccatagtttcttctacatttcttaactggaattttgtaaggaagagttatccttattcatttatttacccatttacttgtaggagcatgtatcataaattcttaatctatggggtgtagttagctactgtaaatttgatgcacatatttttccagattcaataagtaggatccccatcaagctatcttctgaatctttaaaaatgtattctccttatttcatgggtatataattattttctgggcaacagtttgttcatggtacatttgtctccagccctagactcagaaaaatgtaatttattttaatggagaatactatttagaagctgcagtctctgtgtagggaggtgttcctaggtaatagtgccctggcttttaggtcttctctatggaggatatggcaaagacatacaaaattatatatacgtatccacacattaataactctatttctatattaaaaacatgaccacaagccaacacttttaattccactgcagcactgctgggttatttcttgctttccaaattcccttgtctgtagctatctttcatcacttgcaaaaatagcacgtgctcaatcctagattaaaatataagctactctcagaattgataactcataccactctttttaaaaatcaactaaccagaattcagtttttattcacagttcttatctttagctcagggcgtaatataaaagcactaggtttaaaacttacttggtcagcagcaatccacttctaggtacatgtccaaaggaactgaagaaagcatctcaatgtgtgaatgcctacctgtgttcattgcagcattattcagaagagccaagaggtggaagcaaagtaaatgtccattgacagatgaattggtaaacaaaatgcattatatacatacaatgcaatatcatttagccttaaaaacaaaattctgccatatgctacaacatggacgttatgctaagtgaaataaaccagttccgaaaggacaaatacacccatttccacttatatggggtatctaacgtcaaactcagaagaacaaagtactgcggtatttgccacaagctggtggaggagaaaatgagttgttcaatgggtattgagtgtcagccacgcaagatggaaaagctttttgagatttgttgtataaaaatatgcctatagttaacaatactcttcggtacacacaaagtatgtgaaagggtaaattttatgtgtttttatcacaataaaaattgtaataaaagaagttacttgggtcaattttgtgctttttacccccctcttcattgttgaatttttatccatttgatacaaagttcatttcagtaattcctgttaattttccattttgtgtcacaccttgctccaggccatctgcatatatacgtgcaggtcacacgggttatgatggcttagcttgggcttggaggcctgacattccagtcttcttatattaatcagaaaaacaaaatagtggtgaagtgttggggggcaatgaaaattttggggggagctatggagagataatgggcaatgtttctcaaggctgcttcaagtgggatgaggggcaacatgggaacctagagtgggagagattaaactgaagaaagattttgagaaaaggggtgatattgtggggttgttaaaaggagtatttgttgtatagaatgattggtgatggcctggatgtggttttgtatgaattgagaaactaaacggaagacacaaggtctgaataagagaaggagaaaaacaagtattagaggact

SEQ ID NO: 462942 - DNA, 1901 bp, Homo sapiens
ttttttttgagacatggtctcccttttgcccaggctggagtgtagtacagttatagcccattgcagcctcaaacttacgggtgtgagccaccacacccagtccaaaaagtgattttctaattccatagtttcttctacatttcttaactggaattttgtaaggaagagttatccttattcatttatttacccatttacttgtaggagcatgtatcataaattcttaatctatggggtgtagttagctactgtaaatttgatgcacatatttttccagattcaataagtaggatccccatcaagctatcttctgaatctttaaaaatgtattctccttatttcatgggtatataattattttctgggcaacagtttgttcatggtacatttgtctccagccctagactcagaaaaatgtaatttattttaatggagaatactatttagaagctgcagtctctgtgtagggaggtgttcctaggtaatagtgccctggcttttaggtcttctctatggaggatatggcaaagacatacaaaattatatatacgtatccacacattaataactctatttctatattaaaaacatgaccacaagccaacacttttaattccactgcagcactgctgggttatttcttgctttccaaattcccttgtctgtagctatctttcatcacttgcaaaaatagcacgtgctcaatcctagattaaaatataagctactctcagaattgataactcataccactctttttaaaaatcaactaaccagaattcagtttttattcacagttcttatctttagctcagggcgtaatataaaagcactaggtttaaaacttacttggtcagcagcaatccacttctaggtacatgtccaaaggaactgaagaaagcatctcaatgtgtgaatgcctacctgtgttcattgcagcattattcagaagagccaagaggtggaagcaaagtaaatgtccattgacagatgaattggtaaacaaaatgcattatatacatacaatgcaatatcatttagccttaaaaacaaaattctgccatatgctacaacatggacgttatgctaagtgaaataaaccagttccgaaaggacaaatacacccatttccacttatatggggtatctaacgtcaaactcagaagaacaaagtactgcggtatttgccacaagctggtggaggagaaaatgagttgttcaatgggtattgagtgtcagccacgcaagatggaaaagctttttgagatttgttgtataaaaatatgcctatagttaacaatactcttcggtacacacaaagtatgtgaaagggtaaattttatgtgtttttatcacaataaaaattgtaataaaagaagttacttgggtcaattttgtgctttttacccccctcttcattgttgaatttttatccatttgatacaaagttcatttcagtaattcctgttaattttccattttgtgtcacaccttgctccaggccatctgcatatatacgtgcaggtcacacgggttatgatggcttagcttgggcttggaggcctgacattccagtcttcttatattaatcagaaaaacaaaatagtggtgaagtgttggggggcaatgaaaattttggggggagctatggagagataatgggcaatgtttctcaaggctgcttcaagtgggatgaggggcaacatgggaacctagagtgggagagattaaactgaagaaagattttgagaaaaggggtgatattgtggggttgttaaaaggagtatttgttgtatagaatgattggtgatggcctggatgtggttttgtatgaattgagaaactaaacggaagacacaaggtctgaataagagaaggagaaaaacaagtattagaggact

SEQ ID NO: 462943 - DNA, 1557 bp, Homo sapiens
tggtctgcattggggtcttgctctgttgcctagggtgtggagtgcggtggcatgatcatgcctcactatagccttgacctcctgggctcaagcgatcctcccacctgagtctcctgagtacctgggaccacaggcacatgctaacgcacccagttaatttttttattcgtagagccgaggtctcactatgttgcccagactggtctcaagctcttgggctcaagcagtcctcctgcctcagcctcccaaagtgccaggattacaggtgtgagccaccacacccagtccaaaaagtgattttctaattccatagtttcttctacatttcttaactggaattttgtaaggaagagttatccttattcatttatttacccatttacttgtaggagcatgtatcataaattcttaatctatggggtgtagttagctactgtaaatttgatgcacatatttttccagattcaataagtaggatccccatcaagctatcttctgaatctttaaaaatgtattctccttatttcatgggtatataattattttctgggcaacagtttgttcatggtacatttgtctccagccctagactcagaaaaatgtaatttattttaatggagaatactatttagaagctgcagtctctgtgtagggaggtgttcctaggtaatagtgccctggcttttaggtcttctctatggaggatatggcaaagacatacaaaattatatatacgtatccacacattaataactctatttctatattaaaaacatgaccacaagccaacacttttaattccactgcagcactgctgggttatttcttgctttccaaattcccttgtctgtagctatctttcatcacttgcaaaaatagcacgtgctcaatcctagattaaaatataagctactctcagaattgataactcataccactctttttaaaaatcaactaaccagaattcagtttttattcacagttcttatctttagctcagggcgtaatataaaagcactaggtttaaaacttacttggtcagcagcaatccacttctaggtacatgtccaaaggaactgaagaaagcatctcaatgtgtgaatgcctacctgtgttcattgcagcattattcagaagagccaagaggtggaagcaaagtaaatgtccattgacagatgaattggtaaacaaaatgcattatatacatacaatgcaatatcatttagccttaaaaacaaaattctgccatatgctacaacatggacgttatgctaagtgaaataaaccagttccgaaaggacaaatacacccatttccacttatatggggtatctaacgtcaaactcagaagaacaaagtactgcggtatttgccacaagctggtggaggagaaaatgagttgttcaatgggtattgagtgtcagccacgcaagatggaaaagctttttgagatttgttgtataaaaatatgcctatagttaacaatactcttcggtacacacaaagtatgtgaaagggtaaattttatgtgtttttatcacaataaaaattgtaata

SEQ ID NO: 462944 - DNA, 2047 bp, Homo sapiens
tggtctgcattggggtcttgctctgttgcctagggtgtggagtgcggtggcatgatcatgcctcactatagccttgacctcctgggctcaagcgatcctcccacctgagtctcctgagtacctgggaccacaggcacatgctaacgcacccagttaatttttttattcgtagagccgaggtctcactatgttgcccagactggtctcaagctcttgggctcaagcagtcctcctgcctcagcctcccaaagtgccaggattacaggtgtgagccaccacacccagtccaaaaagtgattttctaattccatagtttcttctacatttcttaactggaattttgtaaggaagagttatccttattcatttatttacccatttacttgtaggagcatgtatcataaattcttaatctatggggtgtagttagctactgtaaatttgatgcacatatttttccagattcaataagtaggatccccatcaagctatcttctgaatctttaaaaatgtattctccttatttcatgggtatataattattttctgggcaacagtttgttcatggtacatttgtctccagccctagactcagaaaaatgtaatttattttaatggagaatactatttagaagctgcagtctctgtgtagggaggtgttcctaggtaatagtgccctggcttttaggtcttctctatggaggatatggcaaagacatacaaaattatatatacgtatccacacattaataactctatttctatattaaaaacatgaccacaagccaacacttttaattccactgcagcactgctgggttatttcttgctttccaaattcccttgtctgtagctatctttcatcacttgcaaaaatagcacgtgctcaatcctagattaaaatataagctactctcagaattgataactcataccactctttttaaaaatcaactaaccagaattcagtttttattcacagttcttatctttagctcagggcgtaatataaaagcactaggtttaaaacttacttggtcagcagcaatccacttctaggtacatgtccaaaggaactgaagaaagcatctcaatgtgtgaatgcctacctgtgttcattgcagcattattcagaagagccaagaggtggaagcaaagtaaatgtccattgacagatgaattggtaaacaaaatgcattatatacatacaatgcaatatcatttagccttaaaaacaaaattctgccatattccgaaaggacaaatacacccatttccacttatatggggtatctaacgtcaaactcagaagaacaaagtactgcggtatttgccacaagctggtggaggagaaaatgagttgttcaatgggtattgagtgtcagccacgcaagatggaaaagctttttgagatttgttgtataaaaatatgcctatagttaacaatactcttcggtacacacaaagtatgtgaaagggtaaattttatgtgtttttatcacaataaaaattgtaataaaagaagttacttgggtcaattttgtgctttttacccccctcttcattgttgaatttttatccatttgatacaaagttcatttcagtaattcctgttaattttccattttgtgtcacaccttgctccaggccatctgcatatatacgtgcaggtcacacgggttatgatggcttagcttgggcttggaggcctgacattccagtcttcttatattaatcagaaaaacaaaatagtggtgaagtgttggggggcaatgaaaattttggggggagctatggagagataatgggcaatgtttctcaaggctgcttcaagtgggatgaggggcaacatgggaacctagagtgggagagattaaactgaagaaagattttgagaaaaggggtgatattgtggggttgttaaaaggagtatttgttgtatagaatgattggtgatggcctggatgtggttttgtatgaattgagaaactaaacggaagacacaaggtctgaataagagaaggagaaaaacaagtattagaggact

SEQ ID NO: 462945 - DNA, 3786 bp, Homo sapiens
cgccatcttttccggcgctggctccgcatggtcagtgccatttcgcctttatcgtggtggagtccaccctggctgtggggctgtcggtcctccttgcgcggccagtggctagaggccgcaggctcagtgggtcccagtcaggagccaggtcgggaagtgtgtttgtcccgactccgcgcgttttctggagtggtttcatccgctgtgctcccttcttcaaaagcttggaaagcaacctttgacctattcaaactcagtctgtctcttgactggaggaggagaaggaaaagttgagcacattgccaaccggagttccccaagaatggcaagttaaaaccaaagtgtcagcacctcaacaacatttttttttggcttaacaaaacatcaaacggcatacaaatgatgggactgtctagttgcaggaaaacaagctcaggcctcctgctgatcctattttatggcagaaatccacaatggaggggaactctgtgactttatggaaaatggagaaatcttcagtgaacactcatgccttaatgcacacatgggaactgaaaatacaggggacacttatgactgtgatgagtatggagaaaactttcccatgttacacaacagtgcccctgctggagagacactttctgtgttgaatcagtgcagaaaagccttcagcctgccaccaaatgttcaccagagaacgtggataggagacaaatcctttgaatacagtgactgtgaggaagcctttgttgatcagtcacatcttcaggcaaataggataactcacaatggagaaacactctatgaacagaagcaatgtgggagagcttttacttactccacaagccatgctgtgtctgttaaaatgcatactgtagaaaaaccctacgaatgtaaggaatgtggaaaattctttagatattcttcatatcttaatagtcacatgcgaacccatactggggagaaaccctatgaatgtaaggaatgtgggaaatgcttcactgtttcttcacacctagttgaacatgtaagaattcatactggagagaaaccttatcaatgtaaggaatgtggaagagccttcgctgggcgctcaggccttactaaacatgtacgaatacacactggagagaagccctatgaatgtaacgaatgtgggaaagcctacaataggttttatctactaactgaacattttaaaactcacacagaggagaagccctttgaatgtaaggtatgtggaaaatccttcagaagctcttcatgccttaagaatcactttagaattcacactggaataaaaccctataaatgtaaggagtgtgggaaagcattcaagcttacataatcatgtaaaaatccatactggagagaagccctatgaatgtaaggactgtgggaaagcctttgctacatcttcacaactcattgaacatataagaactcacactggagagaaaccgtatatatgtaaggaatgtgggaaaaccttccgtgcttcttcacatctacagaaacatgttagaattcacactggagagaaaccctatatatgtaacgaataagaagcattattagtggcagctatagccttatgaaatgtatttcttaaataataagacttgaaagtcagaattattccagaatccatgggctgcggttagcagacatgaaaacgccaatcttgtttatacctccataagagctcttggttagtaggttcattatcagtggtaatattttgaaaggaatctctgaacagtatgttttacagtgggcttaaaatattcagtaaaccatgctgtaaatagatgtaaatagataccacaggaagagtagatgtagcataattcttaactggctcttggatttttggaatggactttactgtttacccggctgatcttgaacttaaaacctcaagtgatgctcccctatctgcctcccaacactctgggattacaggtgtgagccaccacacccagtccaaaaagtgattttctaattccatagtttcttctacatttcttaactggaattttgtaaggaagagttatccttattcatttatttacccatttacttgtaggagcatgtatcataaattcttaatctatggggtgtagttagctactgtaaatttgatgcacatatttttccagattcaataagtaggatccccatcaagctatcttctgaatctttaaaaatgtattctccttatttcatgggtatataattattttctgggcaacagtttgttcatggtacatttgtctccagccctagactcagaaaaatgtaatttattttaatggagaatactatttagaagctgcagtctctgtgtagggaggtgttcctaggtaatagtgccctggcttttaggtcttctctatggaggatatggcaaagacatacaaaattatatatacgtatccacacattaataactctatttctatattaaaaacatgaccacaagccaacacttttaattccactgcagcactgctgggttatttcttgctttccaaattcccttgtctgtagctatctttcatcacttgcaaaaatagcacgtgctcaatcctagattaaaatataagctactctcagaattgataactcataccactctttttaaaaatcaactaaccagaattcagtttttattcacagttcttatctttagctcagggcgtaatataaaagcactaggtttaaaacttacttggtcagcagcaatccacttctaggtacatgtccaaaggaactgaagaaagcatctcaatgtgtgaatgcctacctgtgttcattgcagcattattcagaagagccaagaggtggaagcaaagtaaatgtccattgacagatgaattggtaaacaaaatgcattatatacatacaatgcaatatcatttagccttaaaaacaaaattctgccatatgctacaacatggacgttatgctaagtgaaataaaccagttccgaaaggacaaatacacccatttccacttatatggggtatctaacgtcaaactcagaagaacaaagtactgcggtatttgccacaagctggtggaggagaaaatgagttgttcaatgggtattgagtgtcagccacgcaagatggaaaagctttttgagatttgttgtataaaaatatgcctatagttaacaatactcttcggtacacacaaagtatgtgaaagggtaaattttatgtgtttttatcacaataaaaattgtaataaaagaagttacttgggtcaattttgtgctttttacccccctcttcattgttgaatttttatccatttgatacaaagttcatttcagtaattcctgttaattttccattttgtgtcacaccttgctccaggccatctgcatatatacgtgcaggtcacacgggttatgatggcttagcttgggcttggaggcctgacattccagtcttcttatattaatcagaaaaacaaaatagtggtgaagtgttggggggcaatgaaaattttggggggagctatggagagataatgggcaatgtttctcaaggctgcttcaagtgggatgaggggcaacatgggaacctagagtgggagagattaaactgaagaaagattttgagaaaaggggtgatattgtggggttgttaaaaggagtatttgttgtatagaatgattggtgatggcctggatgtggttttgtatgaattgagaaactaaacggaagacacaaggtctgaataagagaaggagaaaaacaagtattagaggact

SEQ ID NO: 462946 - DNA, 2579 bp, Homo sapiens
cgccatcttttccggcgctggctccgcatggtcagtgccatttcgcctttatcgtggtggagtccaccctggctgtggggctgtcggtcctccttgcgcggccagtggctagaggccgcaggctcagtgggtcccagtcaggagccaggtcgggaagtgtgtttgtcccgactccgcgcgttttctggagtggtttcatccgctgtgctcccttcttcaaaagcttggaaagcaacctttgacctattcaaactcagtctgtctcttgactggaggaggagaaggaaaagttgagcacattgccaaccggagttccccaagaatggcaagttaaaaccaaagtgtcagcacctcaacaacatttttttttggcttaacaaaacatcaaacggcatacaaatgatgggactgtctagttgcaggaaaacaagctcaggcctcctgctgatcctattttatggcagaaatccacaatggaggggaactctgtgactttatggaaaatggagaaatcttcagtgaacactcatgccttaatgcacacatgggaactgaaaatacaggggacacttatgactgtgatgagtatggagaaaactttcccatgttacacaacagtgcccctgctggagagacactttctgtgttgaatcagtgcagaaaagccttcagcctgccaccaaatgttcaccagagaacgtggataggagacaaatcctttgaatacagtgactgtgaggaagcctttgttgatcagtcacatcttcaggcaaataggataactcacaatggagaaacactctatgaacagaagcaatgtgggagagcttttacttactccacaagccatgctgtgtctgttaaaatgcatactgtagaaaaaccctacgaatgtaaggaatgtggaaaattctttagatattcttcatatcttaatagtcacatgcgaacccatactggggagaaaccctatgaatgtaaggaatgtgggaaatgcttcactgtttcttcacacctagttgaacatgtaagaattcatactggagagaaaccttatcaatgtaaggaatgtggaagagccttcgctgggcgctcaggccttactaaacatgtacgaatacacactggagagaagccctatgaatgtaacgaatgtgggaaagcctacaataggttttatctactaactgaacattttaaaactcacacagaggagaagccctttgaatgtaaggtatgtggaaaatccttcagaagctcttcatgccttaagaatcactttagaattcacactggaataaaaccctataaatgtaaggagtgtgggaaagcattcaagcttacataatcatgtaaaaatccatactggagagaagccctatgaatgtaaggactgtgggaaagcctttgctacatcttcacaactcattgaacatataagaactcacactggagagaaaccgtatatatgtaaggaatgtgggaaaaccttccgtgcttcttcacatctacagaaacatgttagaattcacactggagagaaaccctatatatgtaacgaataagaagcattattagtggcagctatagccttatgaaatgtatttcttaaataataagacttgaaagtcagaattattccagaatccatgggctgcggttagcagacatgaaaacgccaatcttgtttatacctccataagagctcttggttagtaggttcattatcagtggtaatattttgaaaggaatctctgaacagtatgttttacagtgggcttaaaatattcagtaaaccatgctgtaaatagatgtaaatagataccacaggaagagtagatgtagcataattcttaactggctcttggatttttggaatggactttactgtttacccggctgatcttgaacttaaaacctcaagtgatgctcccctatctgcctcccaacactctgggattacaggtgtgagccactgcacctggctcttatcttggcttttgacatgactttctcactgaggttaatcatttccagcttttgatctaaagtgagaaatttgcaactccttctttcacttgaacagttagaggccattgtggggtaatgaattggcctaatttcaatattgtccctcagggaattaggaggcctgggaagaggaggagagaggggagagtggccagttggtggagcagtgagaacatagcatttgttaagtttgctgtcttcgaaggttgtggtttgtggtaccccaaaacaattaaaataggaacatcaaagatcacagagcagccgggcacggtggctcacacctgtaatcccagcaccttgagaggctgaggtgagtgaatcatgaggtcaggagttcgagaccagcctggccaccatggtgaaaccccgtctctactaaaaatacaaaaaattagccgggcatggtggcaggcacctatagtcccagctattcaggaggctgaggcaggagaatcacttgaatccaggaggtggaggttagagtgagctgagatcacaccactgcactccagcccaggtgacagagtgagattccttctcaaaaa

SEQ ID NO: 462947 - DNA, 3589 bp, Homo sapiens
caccacggcttccggtgtcatggctgcttgaagtcccgggagtcggtgaggcggctgcaggtccctccctgcggagccgctggtccggctggcggagatgtgaccgcgggcccggccggcctgcctcaggcgtcgcgtcagctcccgtgtccgtgcccttaacccacaccgatggcgggatccggctgcgcctggggcgcggagccgccgcgttttctggaggccttcgggcggctgtggcaggtacagagccgtctgggtagcggctcctccgcctcggtgtatcgggttcgctgctgcggcaaccctggctcgccccccggcgccctcaagcagttcttgccgccaggaaccaccggggctgcggcctctgccgccgagtatggtttccgcaaagagagggcggcgctggaacagttgcagggtcacagaaacatcgtgactttgtatggagtgtttacaatccacttttctccaaatgtgccatcacgctgtctgttgcttgaactcctggatgtcagtgtttcggaattgctcttatattccagtcaccagggttgttccatgtggatgatacagcattgtgcccgagatgttttggaggcccttgcttttcttcatcatgagggctatgtccatgcggacctcaaaccacgtaacatattgtggagtgcagagaatgaatgttttaaactcattgactttggacttagcttcaaagaaggcaatcaggatgtaaagtatattcagacagacgggtatcgggctccagaagcagaattgcaaaattgcttggcccaggctggcctgcagagtgatacagaatgtacctcagctgttgatctgtggagcctaggaatcattttactggaaatgttctcaggaatgaaactgaaacatacagtcagatctcaggaatggaaggcaaacagttctgctattattgatcacatatttgccagtaaagcagtggtgaatgccgcaattccagcctatcacctaagagaccttatcaaaagcatgcttcatgatgatccaagcagaagaattcctgctgaaatggcattgtgcagcccattctttagcattccttttgcccctcatattgaagatctggtcatgcttcccactccagtgctaagactgctgaatgtgctggatgatgattatcttgagaatgaagaggaatatgaagatgttgtagaagatgtaaaagaggagtgtcaaaaatatggaccagtggtatctctacttgttccaaaggaaaatcctggcagaggacaagtctttgttgagtatgcaaatgctggtgattccaaagctgcgcagaaattactgactggaaggatgtttgatgggaagtttgttgtggctacattctacccgctgagtgcctacaagaggggatatctgtatcaaaccttgctttaatcagtaacctaaggactgtttcctttttctcctcttccatttcttgggttattccacatatgaatgcaggactacccccttaccattttaagaaggtactttatacatttatttaatcctactaatgtgcagccattgcccaagcagtgactgcgttgcatacatttggcactgagtaggacaagacctctcagctatacattgaggggttttagagcatccatgtgggcaacccttttttgtgcgggagagcaggtgttgctcttcagtatgtagcctaaaaaaatcttaattatttcatggatcatgaagcaaggatgaataatatcatgtcttggtaaatactaacaaatttgttaggtttggtgacatcatttacagattatttctttatgttgtccagtggttcttccttattgttgatatccataagctggcactggatgctctcagtaatgttaagtaattgtcaagcagcagttacctactgtgttcttaacactgagttgtgaattttttcttaaagcagtactgtagtactgaatattcctttaaaggaactgcagtgagcctatctaagtttttttaaattaaggcttttaaaatagaaagctgatgcttgatcttgcacaatttttatgtctagtatgtatgcttgagtgaatgtgcgagtatgaatgattagagaaaatttgagtcagtgtactttatagtgtgaatcctgtgagctaatacagtctatacttatttcttccctacctgtttcacatccgtaagatttaagatatacattttttgagaggtagtctgtctgatacaatgtaaatgacaaaacataattcctgagaggcccagaacaaactggagtctagcctggagttaaattgagacttctaaaatgattggaacaaagactaagttgtgccagatgtaaatcaacccctcttttagtttactttagactttgtattagctcatcttttttgtagtaaatctatagttttaaggtttctcaagatgtggctctacctactatgatgaaaattgaagtgggtcaaaagaattagatgtacagtgaagggaaaagaaaaaaaatgggcgaagagagggtggaaaataaaaggattcttttttcttcctttctgtttctcgtatccctgctccctttttcctccccttccctcattctttgcctctatccttagctgaagacaaactagaggagcagcatcccaggtagtttggcttttgactgcaaggtagttaagaaaggtgtagatataatgaggtagaagtagaaaggaagaaaaactcaaagaattcttaaaaggattcatagcaacataatgtgtccctgagtagaggatgctgctatgcgtgagttcatggacacaagttgattacatggtttttagaattataattatggattcttcttatttcatggtaggttgtctttaaagatataaaaattaggatgcctttatgaagcactgattataccaaaaaaaaaagacaagttatatacaggttattaatttttttatttatttattttttcctaaggaaaaagtcttctatctttccctgctggaagcctcctcatatttccttatgtttgccatgcaggttgctgagagtccagttagaatttgcattttacagaatgaaatactttaccccattcaaacaattattgtttgacattttagttatttataattgtcaaattcaggactctcctttaatgtttattatgaaaccaaatttggcataaggaggctgatttatgaattaccaaagggtcttgtggcatgttccccaatacatgcccttagaaggaagaactattattttttattttggccctttcaggagttgattataaattggtttgttttcaagtcagaattcaagtgggcagaacccgtattgtgaagacctaaactttcctaaatgttcatatgggtagcagattttgtggtgattagaaacatcaggtccttaaatacgatgaacatgggatacaaaggaattctttataagggcaagtatcctaagttagcacatttacttttctctcccctccgcccccaaaagaaaaatccttacaaataaactgcagctcttaaaagaccatgtatataaaaagtatttc

SEQ ID NO: 462948 - DNA, 3253 bp, Homo sapiens
agcgggtcgtgcagatgaagcctccaggtaccaggcttccaagaaaatagattgtaaatgtttcttaccagaccgaaggtctgtgttgaccttaaccggagagtgactttgtatggagtgtttacaatccacttttctccaaatgtgccatcacgctgtctgttgcttgaactcctggatgtcagtgtttcggaattgctcttatattccagtcaccagggttgttccatgtggatgatacagcattgtgcccgagatgttttggaggcccttgcttttcttcatcatgagggctatgtccatgcggacctcaaaccacgtaacatattgtggagtgcagagaatgaatgttttaaactcattgactttggacttagcttcaaagaaggcaatcaggatgtaaagtatattcagacagacgggtatcgggctccagaagcagaattgcaaaattgcttggcccaggctggcctgcagagtgatacagaatgtacctcagctgttgatctgtggagcctaggaatcattttactggaaatgttctcaggaatgaaactgaaacatacagtcagatctcaggaatggaaggcaaacagttctgctattattgatcacatatttgccagtaaagcagtggtgaatgccgcaattccagcctatcacctaagagaccttatcaaaagcatgcttcatgatgatccaagcagaagaattcctgctgaaatggcattgtgcagcccattctttagcattccttttgcccctcatattgaagatctggtcatgcttcccactccagtgctaagactgctgaatgtgctggatgatgattatcttgagaatgaagaggaatatgaagatgttgtagaagatgtaaaagaggagtgtcaaaaatatggaccagtggtatctctacttgttccaaaggaaaatcctggcagaggacaagtctttgttgagtatgcaaatgctggtgattccaaagctgcgcagaaattactgactggaaggatgtttgatgggaagtttgttgtggctacattctacccgctgagtgcctacaagaggggatatctgtatcaaaccttgctttaatcagtaacctaaggactgtttcctttttctcctcttccatttcttgggttattccacatatgaatgcaggactacccccttaccattttaagaaggtactttatacatttatttaatcctactaatgtgcagccattgcccaagcagtgactgcgttgcatacatttggcactgagtaggacaagacctctcagctatacattgaggggttttagagcatccatgtgggcaacccttttttgtgcgggagagcaggtgttgctcttcagtatgtagcctaaaaaaatcttaattatttcatggatcatgaagcaaggatgaataatatcatgtcttggtaaatactaacaaatttgttaggtttggtgacatcatttacagattatttctttatgttgtccagtggttcttccttattgttgatatccataagctggcactggatgctctcagtaatgttaagtaattgtcaagcagcagttacctactgtgttcttaacactgagttgtgaattttttcttaaagcagtactgtagtactgaatattcctttaaaggaactgcagtgagcctatctaagtttttttaaattaaggcttttaaaatagaaagctgatgcttgatcttgcacaatttttatgtctagtatgtatgcttgagtgaatgtgcgagtatgaatgattagagaaaatttgagtcagtgtactttatagtgtgaatcctgtgagctaatacagtctatacttatttcttccctacctgtttcacatccgtaagatttaagatatacattttttgagaggtagtctgtctgatacaatgtaaatgacaaaacataattcctgagaggcccagaacaaactggagtctagcctggagttaaattgagacttctaaaatgattggaacaaagactaagttgtgccagatgtaaatcaacccctcttttagtttactttagactttgtattagctcatcttttttgtagtaaatctatagttttaaggtttctcaagatgtggctctacctactatgatgaaaattgaagtgggtcaaaagaattagatgtacagtgaagggaaaagaaaaaaaatgggcgaagagagggtggaaaataaaaggattcttttttcttcctttctgtttctcgtatccctgctccctttttcctccccttccctcattctttgcctctatccttagctgaagacaaactagaggagcagcatcccaggtagtttggcttttgactgcaaggtagttaagaaaggtgtagatataatgaggtagaagtagaaaggaagaaaaactcaaagaattcttaaaaggattcatagcaacataatgtgtccctgagtagaggatgctgctatgcgtgagttcatggacacaagttgattacatggtttttagaattataattatggattcttcttatttcatggtaggttgtctttaaagatataaaaattaggatgcctttatgaagcactgattataccaaaaaaaaaagacaagttatatacaggttattaatttttttatttatttattttttcctaaggaaaaagtcttctatctttccctgctggaagcctcctcatatttccttatgtttgccatgcaggttgctgagagtccagttagaatttgcattttacagaatgaaatactttaccccattcaaacaattattgtttgacattttagttatttataattgtcaaattcaggactctcctttaatgtttattatgaaaccaaatttggcataaggaggctgatttatgaattaccaaagggtcttgtggcatgttccccaatacatgcccttagaaggaagaactattattttttattttggccctttcaggagttgattataaattggtttgttttcaagtcagaattcaagtgggcagaacccgtattgtgaagacctaaactttcctaaatgttcatatgggtagcagattttgtggtgattagaaacatcaggtccttaaatacgatgaacatgggatacaaaggaattctttataagggcaagtatcctaagttagcacatttacttttctctcccctccgcccccaaaagaaaaatccttacaaataaactgcagctcttaaaagaccatgtatataaaaagtatttc

SEQ ID NO: 462949 - DNA, 689 bp, Homo sapiens
cctctgtgggcctgcacgcactctccaaccagtgctgatgagatgaaccaggttccctggtgctgcatcatctctgacctctcctttattcccagtggctcccatgcatccaaggtatgccagttgggcgtcaagttagagagagagagagagcttcagaaaaaacttacattgaagagaggattccttgttttgactacgtgtgtttctgctgtcttaggcagccaacatattggtttacatggatctggaggattatgcacactagtgttgagtttcattgcagggacaaaatggtcccaagaaaagatgaaagtccgaaagattattacaaatgtatgggatatttttcaaccacttctttttggtttagttggagcagaagtatctgtttcactgcttgaatcaaatattgttggtaagaataattagagcacaaaaaatatgaaattcaaaaatatttaagaaaattataaatacatttatttttatttacaatatatctttgaatggctacaaggaccttcttcagaaacacatgttgatacactgtcatattttcctattgctcttcctttacactgtgtgctctttttttttaaaccaaggacagccctgaatatcttccctgagttttctaaggaaataaatataagatttctttcctgagggaacatatttgatatgat

SEQ ID NO: 462950 - DNA, 590 bp, Homo sapiens
  misc_feature (11)..(13): n is a, c, g, or t
  misc_feature (17)..(17): n is a, c, g, or t
  misc_feature (21)..(21): n is a, c, g, or t
  misc_feature (53)..(54): n is a, c, g, or t
aaaaagaaaannngccnaacncccccacaggaaaaaggaattaaaaaaaacannaaccctaaaaaacttacattgaagagaggattccttgttttgactacgtgtgtttctgctgtcttaggcagccaacatattggtttacatggatctggaggattatgcacactagtgttgagtttcattgcagggacaaaatggtcccaagaaaagatgaaagtccgaaagattattacaaatgtatgggatatttttcaaccacttctttttggtttagttggagcagaagtatctgtttcactgcttgaatcaaatattgttggtaagaataattagagcacaaaaaatatgaaattcaaaaatatttaagaaaattataaatacatttatttttatttacaatatatctttgaatggctacaaggaccttcttcagaaacacatgttgatacactgtcatattttcctattgctcttcctttacactgtgtgctctttttttttaaaccaaggacagccctgaatatcttccctgagttttctaaggaaataaatataagatttctttcctgagggaacatatttgatatgat

SEQ ID NO: 462951 - DNA, 5864 bp, Homo sapiens
atttgctcttttggtgaacaaggttcacatttattgccaaaagatgtctactctcctggaaaacatctttgccataattaatcttttcaagcaatattcaaaaaaagataaaaacactgacacattgagtaaaaaagagctgaaggaacttctggaaaaggaatttcggcaaatcctgaagaatccagatgacccagatatggttgatgtcttcatggatcacttggatatagaccacaacaagaaaattgacttcactgagtttcttctgatggtattcaagttggctcaagcatattatgagtctaccagaaaagagaatttaccgatatcaggacacaagcacagaaagcacagtcatcatgataaacatgaagataataaacaggaagaaaacaaagaaaacagaaaaagaccctcaagtctggaaagaagaaacaatagaaaagggaataagggaagatccaagagcccaagagaaacaggggggaaaaggcatgaatctagttctgaaaaaaaagaaagaaaaggatattcacctactcatagagaagaagaatatggaaaaaaccatcataactcaagtaaaaaagagaaaaacaagactgaaaatactagattaggagacaataggaagaggctaagtgaaagacttgaagagaaagaagacaatgaagaaggagtatatgattatgaaaatacaggaagaatgactcaaaaatggatacaatcaggccatattgccacatattacacaatccaggatgaagcctatgacaccactgatagtctattagaagaaaacaaaatatatgaaagatcaaggtcatctgatggcaaatcatcatctcaagtgaacaggtcaagacatgaaaatacaagccaggtaccattgcaggagtccaggacaagaaagcgtaggggatccagagttagccaggacagggacagtgagggacactcagaagactctgagaggcactctgggtcggcttccagaaaccatcatggatctgcgtgggagcagtcaagagatggctccagacaccccaggtcccatgatgaagacagagccagtcatgggcactctgcagacagctccagacaatcaggcactcgtcacgcagagacttcctctcgtggacagactgcatcatcccatgaacaggcaagatcaagtccaggagaaagacatggatccggccaccagcagtcagcagacagctccagacactcagccactgggcgcgggcaagcttcatctgcagtcagcgatcgtggacaccgggggtctagcggtagtcaggccagtgacagtgagggacattcagaaaactcagacacacaatcagtgtcaggccacggaaaggctgggctgagacagcagagccaccaagagtccacacgtggccggtcaggggaacggtctggacgttcagggtcttccctctaccaggtgagcactcatgaacagcctgactctgcccatggacggaccgggaccagcactggaggaagacaaggatcgcaccacgagcaggcacgagacagctccaggcattcagcgtcccaagagggtcaggacaccattcgtggacacccggggtcaagcagaggaggaaggcagggatcccaccacgagcaatcggtaaataggtctggacactcaggttcccatcacagccacaccacatcccagggaaggtctgatgcctcccatgggcagtcaggatccagaagtgcaagcagacaaacacgaaatgaggaacaatcaggagacggcaccaggcactcagggtcacgtcatcatgaagcttcctctcaggctgacagctctagacactcacaggtgggccagggacaatcatcggggcccaggacaagtaggaaccagggatccagtgttagccaggacagtgacagtcagggacactcagaagactctgagaggtggtctgggtctgcttccagaaaccatcatggatctgctcaggagcagtcaagagatggctccagacaccccaggtcccatcacgaagacagagctggtcatgggcactctgcagacagctccagaaaatcaggcactcgtcacacacagaattcctctagtggacaggctgcgtcatcccatgaacaggcaagatcaagtgcaggagaaagacatggatcccgccaccagctccagtcagcagacagctccagacactcaggcactgggcacggacaagcttcatctgcagtcagagacagtggacaccgagggtccagtggtagtcaggccactgacagtgagggacattcagaagactcagacacacagtcagtgtcaggccatggacaggctggtcaccatcagcagagccaccaagagtccgcacgtgaccggtcaggggaaaggtctcgacgttcagggtctttcctctaccaggacaccattcgtggacacccggggtcaagcagaagaggaaggcaggggtcccaccacgagcaatcggtagataggtctggacactcagggtcccatcacagccacaccacatcccagggaaggtctgatgcctcccgtgggcagtcaggatccagaagtgcaagcagaacaacacgtaatgaggaacaatcaagagacggctccaggcactcagggtcacgtcaccatgaagcttcctctcatgccgacatctctagacactcacaggcaggccagggacaatcagaggggtccaggacaagcaggcgccagggatccagtgttagccaggacagtgacagtgagggacattcagaagactctgagaggtggtctgggtctgcttccagaaaccatcgtggatctgctcaggagcagtcaagacatggctccagacaccccaggtcccatcacgaagacagagccggtcacgggcactctgcagacagctccagacaatcaggaactcctcacgcagagacttcctctggtggacaggctgcgtcatcccatgaacaggcaagatcaagtccaggagaaagacacggatcccgccaccagcagtcagcagacagctccagacactcaggcattccgcgcagacaagcttcatctgcagtcagagacagtggacactgggggtccagtggtagtcaggccagtgatagtgagggacattcagaggagtcagacacacagtcagtgtcaggccatggacaggatgggccccatcagcagagccaccaagagtccgcacgtgactggtcagggggaaggtctggacgttcagggtctttcatctaccaggtgagcactcatgaacagtctgagtctgcccatgggcggaccaggaccagcactggacgaagacaaggatcccaccacgagcaggcacgagacagctccaggcactcagcgtcccaagagggtcaggacaccattcgtgcacacccggggtcaaggagaggaggaaggcagggatcccaccatgagcaatcggtagatagatctggacactcagggtcccatcacagccacaccacatcccagggaaggtctgatgcctcccatgggcagtcaggatccagaagtgcaagcagacaaactcgtaaggacaaacaatcaggagacggctccaggcactcagggtcacgtcaccatgaagctgcctcttgggctgacagctctagacactcacaggtgggacaggaacaatcatcggggtccaggacaagcaggcaccagggatccagtgttagccaggacagtgacagtgagagacactcagacgactccgagaggttgtctgggtctgcttccagaaaccatcatggatcttctcgggagcagtcaagagatggctccagacaccctgggttccatcaagaagacagagccagtcacgggcactctgcagacagctccagacaatcaggcactcatcacacagagtcttcctctcatggacaggctgtgtcatcccatgaacaggcaagatcaagtccaggagaaagacatggatcccgccaccagcagtcagcagacagctccagacactcaggcattgggcacagacaagcttcatctgcagtcagagacagtggacaccgagggtccagtggtagtcaggtcactaacagtgagggacattcagaagactcagacacacagtcagtgtcagcccacggacaagctgggccccatcagcagagccacaaagagtccgcacgtggccagtcaggggaaagctctggacgttcaaggtctttcctctaccaggtgagctctcatgaacagtctgagtccacacacggacagactgcacccagcactggaggaagacaaggatcccgccatgagcaggcacgaaacagctctaggcactcagcatcccaagacggtcaggacaccattcgtggacacccggggtcaagcagaggaggaaggcagggatcctaccacgagcaatcagtagataggtctggacactcagggtaccatcacagccacaccacaccccagggaaggtctgatgcctcccatgggcagtcaggacccagaagtgcaagcaggcaaacaagaaatgaggaacaatcaggagacggctccaggcactcagggtcacgtcaccatgaaccttccactcgggccggcagctctagacactcacaggtgggccagggagaatcagcggggtccaagacaagcaggcgccagggatccagtgttagtcaggacagggacagtgagggacactcagaagactctgagaggcggtctgagtcggcttccagaaaccattatggatctgctcgggagcagtcaagacatggctccaggaaccccaggtcccatcaagaagatagagccagtcatgggcactctgcagagagctccagacaatcaggcactcgtcatgcagagacttcctctggtggacaggctgcatcatcccaggaacaggcaaggtcaagtccaggagaaagacatggatcccgccaccagcagtcagcagacagctccacagactcaggcactgggcgcagacaagattcatctgtagtcggagacagtggaaaccgagggtccagtggtagccaggccagtgacagcgagggacactcagaagagtcagacacacagtcagtgtcagcccacggacaggctgggccccatcagcagagccaccaagagtccacacgtggccagtcaggggaaaggtctggacgttcagggtctttcctctaccaggtgagcactcatgaacagtctgagtccgcccatggacgcacagggcccagcactggaggaagacaaagatcccgccacgagcaggcacgagacagctccaggcactcagcgtcccaagagggtcaggacaccattcgtggacacccagggtcaagcagaggaggaaggcagggatcccactatgagcaatcggtagatagttctggacactcagggtctcatcacagccacaccacgtcccaggaaaggtctgatgtctcccgtgggcagtcaggatccagaagtgtcagcagacaaacacgtaatgagaaacaatcaggagacggctccaggcactcagggtcgcgtcaccatgaagcttcctctcgggccgacagctctagacactcgcaggtgggccagggacaatcatcagggcccaggacaagcaggaaccagggatccagtgttagccaggacagtgacagtcagggacactcagaagactctgagaggtggtctgggtctgcttccagaaaccatcttggatctgcttgggagcagtcaagagatggctccagacaccctgggtcccatcacgaagacagagccggctgcgtcatcccatgaacaggcaagatcaagtgcaggagaaagacatgga

SEQ ID NO: 462952 - DNA, 5595 bp, Homo sapiens
gcggccgcctactactactaaattcgcggccgcgtcgacccagaaaagagaatttaccgatatcaggacacaagcacagaaagcacagtcatcatgataaacatgaagataataaacaggaagaaaacaaagaaaacagaaaaagaccctcaagtctggaaagaagaaacaatagaaaagggaataagggaagatccaagagcccaagagaaacaggggggaaaaggcatgaatctagttctgaaaaaaaagaaagaaaaggatattcacctactcatagagaagaagaatatggaaaaaaccatcataactcaagtaaaaaagagaaaaacaagactgaaaatactagattaggagacaataggaagaggctaagtgaaagacttgaagagaaagaagacaatgaagaaggagtatatgattatgaaaatacaggaagaatgactcaaaaatggatacaatcaggccatattgccacatattacacaatccaggatgaagcctatgacaccactgatagtctattagaagaaaacaaaatatatgaaagatcaaggtcatctgatggcaaatcatcatctcaagtgaacaggtcaagacatgaaaatacaagccaggtaccattgcaggagtccaggacaagaaagcgtaggggatccagagttagccaggacagggacagtgagggacactcagaagactctgagaggcactctgggtcggcttccagaaaccatcatggatctgcgtgggagcagtcaagagatggctccagacaccccaggtcccatgatgaagacagagccagtcatgggcactctgcagacagctccagacaatcaggcactcgtcacgcagagacttcctctcgtggacagactgcatcatcccatgaacaggcaagatcaagtccaggagaaagacatggatccggccaccagcagtcagcagacagctccagacactcagccactgggcgcgggcaagcttcatctgcagtcagcgatcgtggacaccgggggtctagcggtagtcaggccagtgacagtgagggacattcagaaaactcagacacacaatcagtgtcaggccacggaaaggctgggctgagacagcagagccaccaagagtccacacgtggccggtcaggggaacggtctggacgttcagggtcttccctctaccaggtgagcactcatgaacagcctgactctgcccatggacggaccgggaccagcactggaggaagacaaggatcgcaccacgagcaggcacgagacagctccaggcattcagcgtcccaagagggtcaggacaccattcgtggacacccggggtcaagcagaggaggaaggcagggatcccaccacgagcaatcggtaaataggtctggacactcaggttcccatcacagccacaccacatcccagggaaggtctgatgcctcccatgggcagtcaggatccagaagtgcaagcagacaaacacgaaatgaggaacaatcaggagacggcaccaggcactcagggtcacgtcatcatgaagcttcctctcaggctgacagctctagacactcacaggtgggccagggacaatcatcggggcccaggacaagtaggaaccagggatccagtgttagccaggacagtgacagtcagggacactcagaagactctgagaggtggtctgggtctgcttccagaaaccatcatggatctgctcaggagcagtcaagagatggctccagacaccccaggtcccatcacgaagacagagctggtcatgggcactctgcagacagctccagaaaatcaggcactcgtcacacacagaattcctctagtggacaggctgcgtcatcccatgaacaggcaagatcaagtgcaggagaaagacatggatcccgccaccagctccagtcagcagacagctccagacactcaggcactgggcacggacaagcttcatctgcagtcagagacagtggacaccgagggtccagtggtagtcaggccactgacagtgagggacattcagaagactcagacacacagtcagtgtcaggccatggacaggctggtcaccatcagcagagccaccaagagtccgcacgtgaccggtcaggggaaaggtctcgacgttcagggtctttcctctaccaggacaccattcgtggacacccggggtcaagcagaagaggaaggcaggggtcccaccacgagcaatcggtagataggtctggacactcagggtcccatcacagccacaccacatcccagggaaggtctgatgcctcccgtgggcagtcaggatccagaagtgcaagcagaacaacacgtaatgaggaacaatcaagagacggctccaggcactcagggtcacgtcaccatgaagcttcctctcatgccgacatctctagacactcacaggcaggccagggacaatcagaggggtccaggacaagcaggcgccagggatccagtgttagccaggacagtgacagtgagggacattcagaagactctgagaggtggtctgggtctgcttccagaaaccatcgtggatctgctcaggagcagtcaagacatggctccagacaccccaggtcccatcacgaagacagagccggtcacgggcactctgcagacagctccagacaatcaggaactcctcacgcagagacttcctctggtggacaggctgcgtcatcccatgaacaggcaagatcaagtccaggagaaagacacggatcccgccaccagcagtcagcagacagctccagacactcaggcattccgcgcagacaagcttcatctgcagtcagagacagtggacactgggggtccagtggtagtcaggccagtgatagtgagggacattcagaggagtcagacacacagtcagtgtcaggccatggacaggatgggccccatcagcagagccaccaagagtccgcacgtgactggtcagggggaaggtctggacgttcagggtctttcatctaccaggtgagcactcatgaacagtctgagtctgcccatgggcggaccaggaccagcactggacgaagacaaggatcccaccacgagcaggcacgagacagctccaggcactcagcgtcccaagagggtcaggacaccattcgtgcacacccggggtcaaggagaggaggaaggcagggatcccaccatgagcaatcggtagatagatctggacactcagggtcccatcacagccacaccacatcccagggaaggtctgatgcctcccatgggcagtcaggatccagaagtgcaagcagacaaactcgtaaggacaaacaatcaggagacggctccaggcactcagggtcacgtcaccatgaagctgcctcttgggctgacagctctagacactcacaggtgggacaggaacaatcatcggggtccaggacaagcaggcaccagggatccagtgttagccaggacagtgacagtgagagacactcagacgactccgagaggttgtctgggtctgcttccagaaaccatcatggatcttctcgggagcagtcaagagatggctccagacaccctgggttccatcaagaagacagagccagtcacgggcactctgcagacagctccagacaatcaggcactcatcacacagagtcttcctctcatggacaggctgtgtcatcccatgaacaggcaagatcaagtccaggagaaagacatggatcccgccaccagcagtcagcagacagctccagacactcaggcattgggcacagacaagcttcatctgcagtcagagacagtggacaccgagggtccagtggtagtcaggtcactaacagtgagggacattcagaagactcagacacacagtcagtgtcagcccacggacaagctgggccccatcagcagagccacaaagagtccgcacgtggccagtcaggggaaagctctggacgttcaaggtctttcctctaccaggtgagctctcatgaacagtctgagtccacacacggacagactgcacccagcactggaggaagacaaggatcccgccatgagcaggcacgaaacagctctaggcactcagcatcccaagacggtcaggacaccattcgtggacacccggggtcaagcagaggaggaaggcagggatcctaccacgagcaatcagtagataggtctggacactcagggtaccatcacagccacaccacaccccagggaaggtctgatgcctcccatgggcagtcaggacccagaagtgcaagcaggcaaacaagaaatgaggaacaatcaggagacggctccaggcactcagggtcacgtcaccatgaaccttccactcgggccggcagctctagacactcacaggtgggccagggagaatcagcggggtccaagacaagcaggcgccagggatccagtgttagtcaggacagggacagtgagggacactcagaagactctgagaggcggtctgagtcggcttccagaaaccattatggatctgctcgggagcagtcaagacatggctccaggaaccccaggtcccatcaagaagatagagccagtcatgggcactctgcagagagctccagacaatcaggcactcgtcatgcagagacttcctctggtggacaggctgcatcatcccaggaacaggcaaggtcaagtccaggagaaagacatggatcccgccaccagcagtcagcagacagctccacagactcaggcactgggcgcagacaagattcatctgtagtcggagacagtggaaaccgagggtccagtggtagccaggccagtgacagcgagggacactcagaagagtcagacacacagtcagtgtcagcccacggacaggctgggccccatcagcagagccaccaagagtccacacgtggccagtcaggggaaaggtctggacgttcagggtctttcctctaccaggtgagcactcatgaacagtctgagtccgcccatggacgcacagggcccagcactggaggaagacaaagatcccgccacgagcaggcacgagacagctccaggcactcagcgtcccaagagggtcaggacaccattcgtggacacccagggtcaagcagaggaggaaggcagggatcccactatgagcaatcggtagatagttctggacactcagggtctcatcacagccacaccacgtcccaggaaaggtctgatgtctcccgtgggcagtcaggatccagaagtgtcagcagacaaacacgtaatgagaaacaatcaggagacggctccaggcactcagggtcgcgtcaccatgaagcttcctctcgggccgacagctctagacactcgcaggtgggccagggacaatcatcagggcccaggacaagcaggaaccagggatccagtgttagccaggacagtgacagtcagggacactcagaagactctgagaggtggtctgggtctgcttccagaaaccatcttggatctgcttgggagcagtcaagagatggctccagacaccctgggtcccatcacgaagacagagccggctgcgtcatcccatgaacaggcaagatcaagtgcaggagaaagacatgga

SEQ ID NO: 462953 - DNA, 1376 bp, Homo sapiens
gtggtttagaagaagattgtttttctggattcagctccaacaaagtttgtcctgcaggtcttggtgctgtgccatggtccttctcgccaataatattcagcctggataccccgctggtcataatggctacactaggagccagcccagggctctcctggagcacaggacacctgttcagtgcagaggactcagtggagtctcgctctgtcacccaggctggagtgcagtggtgccatcttggctcactgcaacctctgcctcccacacgccaccatgcctgggtaatttttgtatttttagtagagacagagtttcaccatgttggcgaggatggtctcaatctcctgacttcatgatctacctgcctcggcctcccaaaagtgctgcgattataggcatgagccactctgcacagcctagacttcaagcttttagaatagcgtctctctctctctctctctctctctctctctctctccctctttctctgtctccctcccattgtataaccaatgtctttgtataaaaccaacttagttctgtgagaagagttgtacgtttttaatatttttgttctttttgtagactgcaggaacaaaaatagccttcctatagtaaggtggcaattcacattaagaatgtagataagcaaatttaaacttttaaatgtaatttgtctaaaaaaattgaaaaacagtgtatagtaaaaatctctcttccaaccaacggaaagtacttttatgtaagatcctttaagttactgacttgaatctttacgtaaggtaacatgtctttttatacacctgctattaataatgtttccttgattttgaacaatttgattatgttatcccttagtgtaattttcttcatgtttcttgtgcttggggtttgctgagtttcttggatcctttctaatctgccttagttcatccaatgtaattttcatctcaaatgtttttgtctttgaaagtttgattttggcttttcttgtttatctcccatgtctctatttaatgttttgattatatgagatacatgtataaaaacagttttaatgtcctcctctgctaattttaacatctatttaagttctgggtcagttttgattgattattttcagtttgcatcatgattgtctgctgctttttatgcctggtaatccttatttagttgtaaaatttaccgacaaaagcaaagtgacaaaaggagataggaaatatcatgaaaacaatttctctaaaaaaaaaaaaacttatgatgcctaatcccctgaataaagacatttaagcctttcttgcttcatatttagacaaaaatcttcctgcttatgttcctatttcatctctgaaaacagtgtaagcaaccagttgtcc

SEQ ID NO: 462954 - DNA, 853 bp, Homo sapiens
gtggtttagaagaagattgtttttctggattcagctccaacaaagtttgtcctgcaggtcttggtgctgtgccatggtccttctcgccaataatattcagcctggataccccgctggtcataatggctacactaggagccagcccagggctctcctggagcacaggacacctgttcagtgcagaggactcagtggagtctcgctctgtcacccaggctggagtgcagtggtgccatcttggctcactgcaacctctgcctcccacacgccaccatgcctgggtaatttttgtatttttagtagagacagagtttcaccatgttggcgaggatggtctcaatctcctgacttcatgatctacctgcctcggcctcccaaaagtgctgcgattataggcatgagccactctgcacagcctagacttcaagcttttagaatagcgtctctctctctctctctctctctctctctctctttctctgtatgggcctcattccttctactacaaataaggaaaatgaccacctggaaacccaaggcccaccacatcccagcggagccacccccgctgaaagaaacccagcttctccctcaagcatctacacatccatcccggcccgaactccatctgacccttgtgagacatgcttccacacctcggtggaccactgaggctcgggaattcagcataatgatgggcacttctggggtcatgggccttccctgtagctaaggtgacaaaaggacagactggtctggaatgtccatgccagcctggcattacactgcccagcccttgatcatggctgttttctggagctagcttgtgttctatgacctgaaatatcagggg

SEQ ID NO: 462955 - DNA, 1711 bp, Homo sapiens
accagttacctggccccacccatcaccgctctcttcctgctggccatcttctgcaagagggtcacagagcccggagctttctggggcctcgtgtttggcctgggagtggggcttctgcgtatgatcctggagttctcatacccagcgccagcctgtggggaggtggaccggaggccagcagtgctgaaggacttccactacctgtactttgcaatcctcctctgcgggctcactgccatcctcacacgcctcacatggtggactcggaactgccccctctctgagctggagaaggaggcccacgagagcacaccggagatatccgagaggccagccggggagtgccctgcaggaggtggagcggcagagaactcgagcctgggccaggagcagcctgaagccccaagcaggtcctggggaaagttgctctggagctggttctgtgggctctctggaacaccggagcaggccctgagcccagcagagaaggctgcgctagaacagaagctgacaagcattgaggaggagccactctggagacatgtctgcaacatcaatgctgtccttttgctggccatcaacatcttcctctggggctattttgcgtgattccacagacctggcttcagtgtagacagattaaacaaagcccaagcctgtcagccacagaaacaggctctcctcttactttgctgtctaaactggagatcacagaagtcaagactgcaagctcccctgaagagaatccaactcaacctgcacacttgacaagtggagaaacagaagcccagagagagcactgggtttgttcaggaccacccagaaggtgtcacacggggtttccccactctttctgatatattgccttacagacctacctcaaacacactgtttccaccctcttcttgaatgtattcagtagcctttactgaatgtgtgtcttgagagtagaaaaatggaggatacaagaaaaggagcaggaagaaatttgcaaaaatccaagagcacctttgctcccccttatcctccttcctcttcccctttctagttcccctacctctctatctttctattctcaccaataatctctttgttgcatgaatttacccaggagagtcctatatttccattggtggctccacagtggtggctgtcagacccgaaggggtggggagccaagggtggactttaagcatggtgacagatggtattttgggcagaaagctcttagacaatggactatccaaagcactatttaaattctgcctcttcctactctctaacccaaatatgcacaaactctctatggccttgagaagcagttggagagacatgacttgttaaaacctcaaggaatcaagacatgttactctgtatttaagggtaagccccacagcgggcagcacaaacagcctgggagccactgtgcctgtgcttctctgtccttctccctttgcttgccatgaatccgcataccttggaatacactgtgaccccagttaagtgtcccttcgccaggaagctgccgcaacgtccagacctgggtcaagttcccactcctgctcccatagccttgacctgcttctgtcacagcactgatcacactgagatggaagactccagggggcaaggaccaagggccatatcccaagtgactttgtacccagaaaataacagctgttcaataaatgtgtattgagttaattagttc

SEQ ID NO: 462956 - DNA, 1166 bp, Homo sapiens
accagttacctggccccacccatcaccgctctcttcctgctggccatcttctgcaagagggtcacagagcccggagctttctggggcctcgtgtttggcctgggagtggggcttctgcgtatgatcctggagttctcatacccagcgccagcctgtggggaggtggaccggaggccagcagtgctgaaggacttccactacctgtactttgcaatcctcctctgcgggctcactgccatcctcacacgcctcacatggtggactcggaactgccccctctctgagctggagaaggaggcccacgagagcacaccggagatatccgagaggccagccggggagtgccctgcaggaggtggagcggcagagaactcgagcctgggccaggagcagcctgaagccccaagcaggtcctggggaaagttgctctggagctggttctgtgggctctctggaacaccggagcaggccctgagcccagcagagaaggctgcgctagaacagaagctgacaagcattgaggaggagccactctggagacatgtctgcaacatcaatgctgtccttttgctggccatcaacatcttcctctggggctattttgcgtgattccacagacctggcttcagtgtagacagattaaacaaagcccaagcctgtcagccacagaaacaggctctcctcttactttgctgtctaaactggagatcacagaagtcaagactgcaagctcccctgaagagaatccaactcaacctgcacacttgacaagtggagaaacagaagcccagagagagcactgggtttgttcaggaccacccagaaggtgtcacacggggtttccccactctttctgatatattgccttacagacctacctcaaacacactgtttccaccctcttcttgaatgtattcagtagcctttactgaatgtgtgtcttgagagtagaaaaatggaggatacaagaaaaggagcaggaagaaatttgcaaaaatccaagagcacctttgctcccccttatcctccttcctcttcccctttctagttcccctacctctctatctttctattctcaccaataatctctttgttgcatgaatttacccaggagagtcctatatttccattggtgggaatagaaagatttttaggggggaaacggg

SEQ ID NO: 462957 - DNA, 1658 bp, Homo sapiens
accagttacctggccccacccatcaccgctctcttcctgctggccatcttctgcaagagggtcacagagcccggagctttctggggcctcgtgtttggcctgggagtggggcttctgcgtatgatcctggagttctcatacccagcgccagcctgtggggaggtggaccggaggccagcagtgctgaaggacttccactacctgtactttgcaatcctcctctgcgggctcactgccatcctcacacgcctcacatggtggactcggaactgccccctctctgagctggagaaggaggcccacgagagcacaccggagatatccgagaggccagccggggagtgccctgcaggaggtggagcggcagagaactcgagcctgggccaggagcagcctgaagccccaagcaggtcctggggaaagttgctctggagctggttctgtgggctctctggaacaccggagcaggccctgagcccagcagagaaggctgcgctagaacagaagctgacaagcattgaggaggagccactctggagacatgtctgcaacatcaatgctgtccttttgctggccatcaacatcttcctctggggctattttgcgtgattccacagacctggcttcagtgtagacagattaaacaaagcccaagcctgtcagccacagaaacaggctctcctcttactttgctgtctaaactggagatcacagaagtcaagactgcaagctcccctgaagagaatccaactcaacctgcacacttgacaagtggagaaacagaagcccagagagagcactgggtttgttcaggaccacccagaaggtgtcacacggggtttccccactctttctgatatattgccttacagacctacctcaaacacactgtttccaccctcttcttgaatgtattcagtagcctttactgaatgtgtgtcttgagagtagaaaaatggaggatacaagaaaaggagcaggaagaaatttgcaaattcccctacctctctatctttctattctcaccaataatctctttgttgcatgaatttacccaggagagtcctatatttccattggtggctccacagtggtggctgtcagacccgaaggggtggggagccaagggtggactttaagcatggtgacagatggtattttgggcagaaagctcttagacaatggactatccaaagcactatttaaattctgcctcttcctactctctaacccaaatatgcacaaactctctatggccttgagaagcagttggagagacatgacttgttaaaacctcaaggaatcaagacatgttactctgtatttaagggtaagccccacagcgggcagcacaaacagcctgggagccactgtgcctgtgcttctctgtccttctccctttgcttgccatgaatccgcataccttggaatacactgtgaccccagttaagtgtcccttcgccaggaagctgccgcaacgtccagacctgggtcaagttcccactcctgctcccatagccttgacctgcttctgtcacagcactgatcacactgagatggaagactccagggggcaaggaccaagggccatatcccaagtgactttgtacccagaaaataacagctgttcaataaatgtgtattgagttaattagttc

SEQ ID NO: 462958 - DNA, 1395 bp, Homo sapiens
ttaggagatatacctaatgttaaatgatgagttaatgggtgaagcacaccaatgtggacatgtatacatatgtaactaagctgcacgttgtgcacgtctcagagaagtttgttattaccgactttctgaagcctacttctgtcagctcgtcaaagtcattctctatcctgctttgttccattgctggcgaggagctgcgatcctttggaggagaagggatgaatctgcaggagtctgaagaggaggaagtcccccaggagtcctgggatgaaggttattcgactctctcaattcctcctgaaaggttggcctcgtaccagtcttacagcagcacatttcactcattagaggaacagcaagtctgcatggctgttgacataggcagacatcggtgggatcaagtgaaaaaggaggaccaagaggcaacaggtcccaggctcagcagggagctgctggatgagaaagagcctgaagtcttgcaggactcactggatagatgttattcaactccttcagtttatcttggactgactgactcatgccagccctacagaagtgccttttacgtattggagcaacagcgtattggcttggctgttgacatggatgaaattgaaaagtaccaagaagtggaagaagaccaagacccatcatgccccaggctcagcagggagctgctggctgagaaagagcctgaagtcttgcaggactcactggatagatgttattcgactccttcaggttatcttgaactgcctgacttaggccagccctacagaagtgctgtttactcattggaggaacagtaccttggcttggctcttgacgtggacagaattaaaaaggaccaagaagaggaagaagaccaaggcccaccgtgccccaggctcagcagggagctgctggaggtagtagagcctgaagtcttgcaggactcactggatgttattcaactccttccagttgtcttgaacagcctgactcctgccagccctacggaagttccttttatgcattggaggaaaaacatgttggcttttctcttgacgtgggagaaattgaaaagaaggggaaggggaagaaaagaaggggaagaagatcaaagaagaaaagaagaaggggaagaaaagaaggggaagaagatcaaaacccaccatgccccaggctcagcagcgtgctgatggaagtggaagtgcctgaagtcttacaggactcactggatagatattattcgactccatcaatgtactttgaactacctgactcattccagcactacagaagtgtgttttactcatttgaggaacagcacatcagctttgcccttgacatggacaataggttttttactttgacggtgagaagtctccacctggtcttccagatgggagtcat

SEQ ID NO: 462959 - DNA, 2766 bp, Homo sapiens
cggcggtctaagggctgcctccccgccactccttgtccggaccccgcgcccggggcctcccgccgccgcggcgcctcctcagagagcccgggtcagctgcccctgtggccgcggctggtcccaaactcactgaatcgggaactctggtctgggtacagaaatcggggtgattctgatgcaggcgagagttggagaaccaatgtcgtagttcatcagcctccgaaagcatcctttgctctctttccagaaaggaagagcatctctgccattcgtgtctcaaggacaagcgcttcagcctcgttctctgtgagctgatctgtggatcgcggcgtgtcgggcgacatggaggaagaaagaaaaactgctgagttacagaaaaatagaatacaggactcagtagtctttgaggatgtggctgtggactttacccaggaggaatgggctttgctggatcttgctcagagaaacctctacagagatgtgatgctggaaaacttccagaacctggcctcactagggtatccgctacacacaccccatctgatctcccagtgggaacaagaggaggacctgcagacagtgaagagagaacttatccagggcatctttatgggagagcaccgggaaggcaagaacccttgggagaaactgttttggttgggggaaaaaataaacttaaaaaatcatatggtagagaacatctatgaatgttatgaagaaaatcaagatggacagactttcagccaagttccaaatcttgattcactcaagagaaatactgaagtaaaatcctgtgaatgccatgagtgtggaaaggccttcgtggatcattcatcccttaagagtcacatcaggtctcatactggaagcaaaccctatcagtgcaaggaatgtgggaaggccttccattttcttgcttgtttcaagaagcatatgaaaacccccactgaagagaagccctatgaatgtaaggaatgtaccaaagccttcagctgttcctcattctttagggcacatatgaagattcacatcggaaagacaaactatgaatgtaaagaatgtgggaaaggttttagttgttcctcatcgctcacagaacacaaaagaattcacagtggagataagccttatgaatgtaaggaatgtgggaaggccttcagttgttcctcctcactctccaaacacaaaagaattcacagtggagataagccatatgaatgtaaggaatgtgggaaggcctttagctcttcctctcaccttataatacatataagaattcacactggagagaagccttatgaatgtaaagagtgtgggaaggccttcagcgagtcctcaaaactcactgtacatgggaggacacatactggagagaaaccctataaatgtaaggaatgtgggaaagcctacaattgtccctcctccttaagtatccatatgagaaaacacactggagaaaaaccgtatgaatgtctggaatgtggaaaggccttctaccttcccacttcccttaatacacatgtgaaaaatcaaagtcgagagaaaccctatgaatgtaaggaatgtgggaaggcctttagttgtccctcgtcctttagagcacatgtgagagatcacactggaaagatacagtatgaatgtaaggagtgtgggaagacctttagtcgttcctcatccctcaccgaacacctaagaactcacagcggagagaagccgtatgaatgtaaagaatgtgggaaagcctttattagttcctcccaccttacagtacatatcagaactcacactggagagaaaccctatgaatgtaagaaatgtgggaaagcctttatttatccctcagcccttaggatccacatgagaacgcacactggggaaaaaccctatgaatgtaaggaatgtgggaaagcatttcgtcattcttcataccttactgtacatgcaagaatgcacactggagagaaaccctttgaatgtctggaatgtggaaaagctttcagttgtccctcatcctttcgaaggcatgtgagaagccacactggagagaaaccctatgaatgtaaggaatgtgggaaagcctttgtttgtcctgcctactttcgaaggcatgtgaaaactcacactagagaaaacatataaatgtaaggaatatgggaatgtctgcaaagcttcagatcctaggcaacatgtgagatctcatactgtggagacaccctatgaatgtaagaaagtaggaaattgttgctcatcgttttgaagatttgaggacactttagagaaaccctgtgtatgtaagtcatgtgctaaagcctttatgaacattgcttattatgtataagaaaatctctactagaaatgaagatcagtgcctcatccttaaagtagaatgctggctcgttgattaccagtgttttctgataggaacattgaaggtgataaatttaccttttcagctctagccacatactttttagtatgaggtgctttaattttggttctgatgtaaatatgatttccattacaaaatcttttggatcatggaggacacgaaatattttttctgtataggcagcagtggtcttttttaaaaaagtggtttctaattaatgttcattgttctttaaatgggtagtcgttataatattgacaaaccaatataatattgacaaaccaaaaaccaaatattgatttttgttgatgttttgtttttagtctacatggcagataatggaacttgcccactcaatatttttcttcctattcttt

SEQ ID NO: 462960 - DNA, 3558 bp, Homo sapiens
gaagaagttggatgccatgaccctcattaaagaagtgacatgggcttctgtcattgcagacatgtccatcttcgggcactgccctgcccatgatgacttctacttggttgtgtgtaaccactgcagccaagtggtgaagcctcaagctttccagaagcactgcgcccctgccagctctcagaaatgccatgtagtgaatgggcagggcccagcttgtagggccccaggttccacgaaaacctcctccagggagaagggccaggggtcccggagccgtggccaccagcctcctgagaagacccagaaggacaacctctgccagccagggggcctcaccaaggactcccctggaaaacctcccatggctcccccttctaaagaacctcctggcagagagaacatcgagatcatccccagtgaggggtccagtcactgggctgaaggcagccctcctgaaaaggagcccagtgggaccaggctgccccctaaaacccaccggaagatggctcggaaggagtgcgacctcaacaggcagtgtggggtaataaatccagagaccaaaaagatctgtacccgcctgttgacctgcaagatccactcagtacaccagcgccgggaagtccagggccgggccaaggactttgacgtgctggtggcagagctgaaggccaactcccgcaaaggggagtctcccaaggagaagagcccagggcgcaaggagcaagttctcgagcgcccctcccaggagctcccctcctcagtccaggttgtagcagcggtggctgctcccagcagcaccttctctgttcgtgccaagcagacctacccatactgtgcactgcccaggtcccgggcctcctccgagagtgaattggatgatgaaggcccctgtggtggtgatggggacccaggcctgttccccttccccatgccccggggtgggacccaggcctccagcgaagagagtgaggaggaggggacatctgacgacctccacccaccccctgactgccattatgcaacccggcccccacggccacaggcgttctgcacctttgggagccggctggtgagcccaggatgctatgtgtttagccgccggctggaccggttctgctcagcactcagctccatgctggaacggcacctcagcacacacatgtggaagaagatcccaccggcagctgaacctccagctcaccttgtcaactccccgttatctgctcccctgagcccatcctctacaggcacctgcccccgccttccaggtccaaccctgagacctgcctgctcagcctccatgccccccaccaaggacaaccttgtccccagctaccctgcaggctcccccagcgtggcggctgcctgtagccaggcagagtgcatgggcgggagccaggctatcacctcaccactgcctgccaacacgccatccccgtccttcagcaagctgccgccttccaaggccagcaagtcatccaaaggcaaggacggggtggaggtggaggccccttctcgaaagcggaagttatcccctggccctaccactcttaaacggacctgcatcctggagcccactggaaaagggaaaccctctggctgtaggggcctctcggccaaaactaaaacagccctgagcatggggcttaatgggacaatggggccaagagtgaagcgggcagggcccctggactgtcgtggctcccctcatcagctccccacaccagtcaaggcttctcagctggagaaccggggagcagctggacacccagccaaggccctgccaaccaactgcctctctgaggaggaggtggccaagaagcggaaaaacctggccacttattgccggccagtgaaggccaagcactgtcaggctggtgcccctgctgatgtggcctgctctgtgcgccgcaagaagccaggcccggccctggcctttgaggagaagtgctctacactgaaggtactggagctacctctgttccctgaaggaaagggagtttgagtccctgggtcacagcctaacatgccgagcagcaagtcaaaagcccattaacgagaaagtgcctgcccactgcaacggagccgccagcacctcctcccctccagatccgggccccaggctgctgccgctttttataactttatattattttttttaagaaaaaaagctctttaaaatacctcaagactgtctccctgttctgttgctgctatgaaaatataaaaacagaaacatagaaaaggaaggaaaaaaaataacaaaatgagtgtccttactgtccccagccctaccctgggaggctgagatgataggcagccagactccagctcccatagcttgcctgcaaaagtctcttatgctcattattattattattgtcatcttgtcattttcaatagtgtgaaaaatgtttgtgtcactggggtagtctttccagacaggatgatgaggcgtgtggctctgaatgagtaaggcttcctgagtcttgacaccagagacgactatggtcccattgggaagagaaactcgagagggggagctgcacttctggctctttctaggatccttgccccgagggtctgggaattggcttgtgacccttttctggtccttcagcaaccctaggcatccatccctccctgaattattgcctgcttttcttcagctgttcctgcagcctcattttctcagccacttagggagcttgagctgggttggtcattgctgttgggatattcctgttttctattggacagccttccttccctgcctgtgggtttgcctttaaggaaggggtagaacctttcccagggaggcctccttgggttgaaccaccccttttttggaggcaggaagggaaaaggcatcatcacttgcagaactggtggtgtgggaggccacaggagtgtgggaggccttggtccttcaggatcacctggctcctcagggctgagcagctgctgaggaggcggcagggctgggagtgccctagtttttccatttatctcgctggggaccactcccgtgcagatgcgagaggagacttgcatttccctcctttggtccaccaggttcaaggcactatattttggcgatgtcctttcctattctccttgctcttaggcatggaggaagcttgttccctgaacaagacaaaatgaggtgacaggagacagtgcacagccagggaaatccagtactactagaaatcggctccaaacacttgtttcacagtcttggttcagcgtaccaagtgtgtgatttggggtttcactgaaatcgtttgccacgaaagtaatttccacaggctgcttgggatttaggcccttgtagacagacacacagatacaaatgaaggtgggctgggaactgttcggtccccttctgcctccgggctctcgcgggagcgggcctctccggggcactcgcgtttcccccccagcccccagagggcgctgtgggccactccgccgcactgccggcggcgtccccggggaggagcctctcctgcagccgccaccgcctccgcgatcgcaaacccggaagacgtgttc

SEQ ID NO: 462961 - DNA, 3480 bp, Homo sapiens
gaagaagttggatgccatgaccctcattaaagaagtgacatgggcttctgtcattgcagacatgtccatcttcgggcactgccctgcccatgatgacttctacttggttgtgtgtaaccactgcagccaagtggtgaagcctcaagctttccagaagcactgcgcccctgccagctctcagaaatgccatgtagtgaatgggcagggcccagcttgtagggccccaggttccacgaaaacctcctccagggagaagggccaggggtcccggagccgtggccaccagcctcctgagaagacccagaaggacaacctctgccagccagggggcctcaccaaggactcccctggaaaacctcccatggctcccccttctaaagaacctcctggcagagagaacatcgagatcatccccagtgaggggtccagtcactgggctgaaggcagccctcctgaaaaggagcccagtgggaccaggctgccccctaaaacccaccggaagatggctcggaaggagtgcgacctcaacaggcagtgtggggtaataaatccagagaccaaaaagatctgtacccgcctgttgacctgcaagatccactcagtacaccagcgccgggaagtccagggccgggccaaggactttgacgtgctggtggcagagctgaaggccaactcccgcaaaggggagtctcccaaggagaagagcccagggcgcaaggagcaagttctcgagcgcccctcccaggagctcccctcctcagtccaggttgtagcagcggtggctgctcccagcagcaccttctctgttcgtgccaagcagacctacccatactgtgcactgcccaggtcccgggcctcctccgagagtgaattggatgatgaaggcccctgtggtggtgatggggacccaggcctgttccccttccccatgccccggggtgggacccaggcctccagcgaagagagtgaggaggaggggacatctgacgacctccacccaccccctgactgccattatgcaacccggcccccacggccacaggcgttctgcacctttgggagccggctggtgagcccaggatgctatgtgtttagccgccggctggaccggttctgctcagcactcagctccatgctggaacggcacctcagcacacacatgtggaagaagatcccaccggcagctgaacctccagctcaccttgtcaactccccgttatctgctcccctgagcccatcctctacaggcacctgcccccgccttccaggtccaaccctgagacctgcctgctcagcctccatgccccccaccaaggacaaccttgtccccagctaccctgcaggctcccccagcgtggcggctgcctgtagccaggcagagtgcatgggcgggagccaggctatcacctcaccactgcctgccaacacgccatccccgtccttcagcaagctgccgccttccaaggccagcaagtcatccaaaggcaaggacggggtggaggtggaggccccttctcgaaagcggaagttatcccctggccctaccactcttaaacggacctgcatcctggagcccactggaaaagggaaaccctctggctgtaggggcctctcggccaaaactaaaacagccctgagcatggggcttaatgggacaatggggccaagagtgaagcgggcagggcccctggactgtcgtggctcccctcatcagctccccacaccagtcaaggcttctcagctggagaaccggggagcagctggacacccagccaaggccctgccaaccaactgcctctctgaggaggaggtggccaagaagcggaaaaacctggccacttattgccggccagtgaaggccaagcactgtcaggctggtgcccctgctgatgtggcctgctctgtgcgccgcaagaagccaggcccggccctggcctttgaggagaagtgctctacactgaagtcaaaagcccattaacgagaaagtgcctgcccactgcaacggagccgccagcacctcctcccctccagatccgggccccaggctgctgccgctttttataactttatattattttttttaagaaaaaaagctctttaaaatacctcaagactgtctccctgttctgttgctgctatgaaaatataaaaacagaaacatagaaaaggaaggaaaaaaaataacaaaatgagtgtccttactgtccccagccctaccctgggaggctgagatgataggcagccagactccagctcccatagcttgcctgcaaaagtctcttatgctcattattattattattgtcatcttgtcattttcaatagtgtgaaaaatgtttgtgtcactggggtagtctttccagacaggatgatgaggcgtgtggctctgaatgagtaaggcttcctgagtcttgacaccagagacgactatggtcccattgggaagagaaactcgagagggggagctgcacttctggctctttctaggatccttgccccgagggtctgggaattggcttgtgacccttttctggtccttcagcaaccctaggcatccatccctccctgaattattgcctgcttttcttcagctgttcctgcagcctcattttctcagccacttagggagcttgagctgggttggtcattgctgttgggatattcctgttttctattggacagccttccttccctgcctgtgggtttgcctttaaggaaggggtagaacctttcccagggaggcctccttgggttgaaccaccccttttttggaggcaggaagggaaaaggcatcatcacttgcagaactggtggtgtgggaggccacaggagtgtgggaggccttggtccttcaggatcacctggctcctcagggctgagcagctgctgaggaggcggcagggctgggagtgccctagtttttccatttatctcgctggggaccactcccgtgcagatgcgagaggagacttgcatttccctcctttggtccaccaggttcaaggcactatattttggcgatgtcctttcctattctccttgctcttaggcatggaggaagcttgttccctgaacaagacaaaatgaggtgacaggagacagtgcacagccagggaaatccagtactactagaaatcggctccaaacacttgtttcacagtcttggttcagcgtaccaagtgtgtgatttggggtttcactgaaatcgtttgccacgaaagtaatttccacaggctgcttgggatttaggcccttgtagacagacacacagatacaaatgaaggtgggctgggaactgttcggtccccttctgcctccgggctctcgcgggagcgggcctctccggggcactcgcgtttcccccccagcccccagagggcgctgtgggccactccgccgcactgccggcggcgtccccggggaggagcctctcctgcagccgccaccgcctccgcgatcgcaaacccggaagacgtgttc

SEQ ID NO: 462962 - DNA, 576 bp, Homo sapiens
ggcgcaggcgcccagaggcgcacaggagacctcaggcccagactccactccccagctgtgaaaggactgctggccagacccccaagctagcccgccaggcctccatagagctgcccagcatggctgcatccagtaccaagagttggtgggagacgggtgaggtacaggctcagtctgcggccaagactccgtcctgcaagatggactctgtgactacatgactaataaaatatggcagaaatgacaccatgcagtttccaagcccaggccttaggagacaggcagcttccagttcagtcttttggagggtcagctctggggccctcagccatcacgcatggagtccaaccaccctgagacgtcatgctggagacccacctgtggatgccccagtcaagagtcactgctgagcccagcctcccagccacccccacccagggcaccagaccacggagcttctggccaaggcttcaccaacttcacttgatgctgtgaggaacagaactgcccatccaagccctgccagaatttctaacccacaaagccacgagtcacaataaatgctatgggacaaaa

SEQ ID NO: 462963 - DNA, 1212 bp, Homo sapiens
ctccatctcatgccccaggcccaaggacacacaccccagctgagaccttgctcacatagaggggctgggacatgggaacatggggagcaacatggccaggcttctcctccatggaaaccctccacctcctcaatactctgccccagctctgcgccgccctccatttggaggggctgggtcgtgagtgggggcgtgagtgagcatgagggcccctgcaccccaggctctgcctccccacgtggaacgaggcccagcagcccccagccaggtggctactactgcattcaatcagtgcccctccatctaacaaatactccctcatataatcagtactcctccatccaatcaatattccttcatcaacacctttctatacaaccaatagtcctccatctaatcaatgctcctccatccaaccaatactctgcaatttaaccactgtccctccatccattcaatgtccctccatccatcccatggtcccccagccctaccccatgagcagcatggaggcagacccacatctgtcttgtgcgccatcatctccctgatgctcttcaggaaagggaggtgtctcacaattgcattgaatggaggaaggcacatctttccagtgatccccactctagggctgcattgggaaatcgctcccagggaaaacacaaacacaaagcagagggttgcccagtgtgaccctctgatgtgaccacggtggctgtccactaaggtaatcctgatgcttttcctcctctgcagactgctggccagacccccaagctagcccgccaggcctccatagagctgcccagcatggctgcatccagtaccaagagttggtgggagacgggtgaggtacaggctcagtctgcggccaagactccgtcctgcaaggatattgtggctggagacatgagcaagaaaagcctctgggagcagaagggaggctccaagacctcatcaacaattaaggtagagcctaaatgtggttggtgcaggcaggaaatattaacttatttcattgtcacacgaaaccagaagacataaaacagttaaaataggccaggcacagtggctcacacctgtaatcccagcactttgggaggccgaggcgggtggatcacgaggtcaggaggagaccatcctggccaacgtggtgaaacttggtctatactaaaaatacaaaaaaaaaaaaaaaaaaaaattagccgagcg

SEQ ID NO: 462964 - DNA, 954 bp, Homo sapiens
caaggctcccaaggcctgagtgggcaggtagcacccaggtatagaccttccacgtgcagcacccaggacacagccagcatgaactgggcatttctgcagggcctgctgagtggcgtgaacaagtactccacagtgctgagccgcatctggctgtctgtggtgttcatctttcgtgtgctggtgtacgtggtggcagcggaggaggtgtgggacgatgagcagaaggactttgtctgcaacaccaagcagcccggctgccccaacgtctgctatgacgagttcttccccgtgtcccacgtgcgcctctgggccctacagctcatcctggtcacgtgcccctcactgctcgtggtcatgcacgtggcctaccgcgaggaacgcgagcgcaagcaccacctgaaacacgggcccaatgccccgtccctgtacgacaacctgagcaagaagcggggcggactgtggtggacgtacttgctgagcctcatcttcaaggccgccgtggatgctggcttcctctatatcttccaccgcctctacaaggattatgacatgccccgcgtggtggcctgctccgtggagccttgcccccacactgtggactgttacatctcccggcccacggagaagaaggtcttcacctacttcatggtgaccacagctgccatctgcatcctgctcaacctcagtgaagtcttctacctggtgggcaagaggtgcatggagatcttcggccccaggcaccggcggcctcggtgccgggaatgcctacccgatacgtgcccaccatatgtcctctcccagggagggcaccctgaggatgggaactctgtcctaatgaaggctgggtcggccccagtggatgcagcacaggtcccggataggtgagtcccctctgacggtgggagggtcacggctgagagcaagccagggatgggaatctgtcaaggtgcccaa

SEQ ID NO: 462965 - DNA, 2847 bp, Homo sapiens
aagagggataattcctcccaagatcaatttagcaaaatagcggcactgtcgggatcacacattcaggtcctgaatgtgaggctgccagcagtttcattaacctaatcccaggctccttcctcccgcacctgagggttgctcaggcctccctcaaactagccaatgagaagtgcacgggtcctggtcgcctaggaaaccgcgtgacaacaagatggcggcgctgcgggacggctagcggccctgcgtgggagttcctgacagctggattctagaagtagaactatgagctcacctttggcctcccttagcaagacccgaaaagtgcccctgccctcggagcctatgaatcctgggaggcgaggaatccgcatctatggagatgaagatgaggtggacatgttgagtgatgggtgtggctcagaagaaaagatctcagtcccttcctgctatggcggcataggtgcccctgtgagtcggcaagtccctgcatcccatgactcggagctgatggccttcatgacgaggaagttgtgggacctggagcagcaggtgaaggcccagactgatgagatactgtccaaggatcagaagatagcggccctagaggacctggtgcagaccctccggccacacccagccgaggcaaccctgcagcggcaggaggaactggagacgatgtgtgtgcagctgcagcggcaggtcagggagatggagcggttcctcagtgactatggcctgcagtgggtgggcgagcccatggaccaggaggactcagagagcaagacagtctcagagcatggcgagagggactggatgacagccaagaagttctggaagccaggggactcattggcgccccctgaggtggactttgacaggctgctggccagcctgcaggatcttagtgagctggtggtagagggtgacacccaagtgacaccagtgcccggcggggcacggctgcgtaccctcgagcccatcccgctgaagctctaccggaatggcatcatgatgttcgacgggcccttccagcccttctacgatccctccacacagcgctgcctccgagacatattggatggcttctttccctcagagctccagcgactgtaccccaatggggtcccctttaaggtgataagctgctcctcaaaccacacctttggggattttgaagggagtggggatacacagcctccccagacacctcccattctgaggggaagccgctgcactccctgggggaccccagtctgatgccctccaggaggataagtctgaagccgggctgggaagggagcggagaggcccgaaacagagcagcaggcagcgccctctgctggcaccctggagacagcctcggctgcggggcccctgccttctagtcctccccagctttcaggacaccttgacaacctggggtccctgcagaagtggcccggctgtcccccaagtctcctgaagctatctgggtagggtgggaggcagtgctgtgagccacaaatgcaaagcagaggggacagatgttgggactcaaagacatgaggtagagctggccccatgggtaggtgccaccaccagagcccatgaggcttcgtgttctagaaggtggtgggttagtgccgcactgagggcgtgtccgggagggagcatgtgtcaccagggctcaggaaacagcatgagtcatgacgcgggggtgtttaaggcattcgtgccacagcggggacctcggagctatgccttgataaggcaagtgaggttacatgtacgatgatgcggtttgtgctgcagactggaaaaaagcaggggctttgtcctctcctgaccccctcacactctgccttcacggtaggctcctgagaggggggtctccaaggagggtgtcagtactgcagcttcagctggcgtggatggggtgcttacaggagcagcagggctgagggagatgacagcagtacgaaccgtggctctcctgaggcctgggtttcctcatatgtaaaatgggggttgcattagaccatacccttggcctgtgtttaggcaaatagggatgaaagtggggccaagggctgaagagctgggtccgctgccgtcgttgcccttctttcttgccaggtgagtgacttgcgcaatcaggtctacctggaggatggactggaccccttcccaggcgagggccgtgtggtgggcaggcagcggatgcacaaggccttggacagggtggaggagcacccaggctccaggatgactgctgagaaatttctgaacaggctccccaagtttgtgatccggcaaggcgaggtgattgacatccggggccccatcagggacaccttgcagaactgctgcccattgcctgcccggatccaggagattgtggtggagacgcccaccttggccgctgagcgagagaggagccaggagtcacccaacacgccggcacccccgctctccatgctgcgcatcaagtctgagaatggggaacaggccttcctactgatgatgcagcctgacaacaccattggggacgtgcgagctctgctagcgcaggccagggtcatggatgcctctgcctttgagatcttcagcacattcccgcccaccctctaccaggacgatacactcacgctgcaggctgcaggccttgtgcccaaagcagcactgctgctgcgggcacgccgagccccgaagtccagcctgaaattcagtcctggtccctgtcccggtcccggtcccggccccagtcccggtcccggtcccggctccagtccctgtcccggacccagtcccagcccccaataaagcacccgccccctcaaaaaacaaaaaaggggtgggtaaaaacac

SEQ ID NO: 462966 - DNA, 2972 bp, Homo sapiens
aagagggataattcctcccaagatcaatttagcaaaatagcggcactgtcgggatcacacattcaggtcctgaatgtgaggctgccagcagtttcattaacctaatcccaggctccttcctcccgcacctgagggttgctcaggcctccctcaaactagccaatgagaagtgcacgggtcctggtcgcctaggaaaccgcgtgacaacaagatggcggcgctgcgggacggctagcggccctgcgtgtactttcccaagcaccaccaggccaaaggtctctcagttcagagcagaaagccgtatacccagaggagcaggcagataacagaaacttccagaaacctctgtggagacagtggaagaggcaaaagggagttcctgacagctggattctagaagtagaactatgagctcacctttggcctcccttagcaagacccgaaaagtgcccctgccctcggagcctatgaatcctgggaggcgaggaatccgcatctatggagatgaagatgaggtggacatgttgagtgatgggtgtggctcagaagaaaagatctcagtcccttcctgctatggcggcataggtgcccctgtgagtcggcaagtccctgcatcccatgactcggagctgatggccttcatgacgaggaagttgtgggacctggagcagcaggtgaaggcccagactgatgagatactgtccaaggatcagaagatagcggccctagaggacctggtgcagaccctccggccacacccagccgaggcaaccctgcagcggcaggaggaactggagacgatgtgtgtgcagctgcagcggcaggtcagggagatggagcggttcctcagtgactatggcctgcagtgggtgggcgagcccatggaccaggaggactcagagagcaagacagtctcagagcatggcgagagggactggatgacagccaagaagttctggaagccaggggactcattggcgccccctgaggtggactttgacaggctgctggccagcctgcaggatcttagtgagctggtggtagagggtgacacccaagtgacaccagtgcccggcggggcacggctgcgtaccctcgagcccatcccgctgaagctctaccggaatggcatcatgatgttcgacgggcccttccagcccttctacgatccctccacacagcgctgcctccgagacatattggatggcttctttccctcagagctccagcgactgtaccccaatggggtcccctttaaggtgataagctgctcctcaaaccacacctttggggattttgaagggagtggggatacacagcctccccagacacctcccattctgaggggaagccgctgcactccctgggggaccccagtctgatgccctccaggaggataagtctgaagccgggctgggaagggagcggagaggcccgaaacagagcagcaggcagcgccctctgctggcaccctggagacagcctcggctgcggggcccctgccttctagtcctccccagctttcaggacaccttgacaacctggggtccctgcagaagtggcccggctgtcccccaagtctcctgaagctatctgggtagggtgggaggcagtgctgtgagccacaaatgcaaagcagaggggacagatgttgggactcaaagacatgaggtagagctggccccatgggtaggtgccaccaccagagcccatgaggcttcgtgttctagaaggtggtgggttagtgccgcactgagggcgtgtccgggagggagcatgtgtcaccagggctcaggaaacagcatgagtcatgacgcgggggtgtttaaggcattcgtgccacagcggggacctcggagctatgccttgataaggcaagtgaggttacatgtacgatgatgcggtttgtgctgcagactggaaaaaagcaggggctttgtcctctcctgaccccctcacactctgccttcacggtaggctcctgagaggggggtctccaaggagggtgtcagtactgcagcttcagctggcgtggatggggtgcttacaggagcagcagggctgagggagatgacagcagtacgaaccgtggctctcctgaggcctgggtttcctcatatgtaaaatgggggttgcattagaccatacccttggcctgtgtttaggcaaatagggatgaaagtggggccaagggctgaagagctgggtccgctgccgtcgttgcccttctttcttgccaggtgagtgacttgcgcaatcaggtctacctggaggatggactggaccccttcccaggcgagggccgtgtggtgggcaggcagcggatgcacaaggccttggacagggtggaggagcacccaggctccaggatgactgctgagaaatttctgaacaggctccccaagtttgtgatccggcaaggcgaggtgattgacatccggggccccatcagggacaccttgcagaactgctgcccattgcctgcccggatccaggagattgtggtggagacgcccaccttggccgctgagcgagagaggagccaggagtcacccaacacgccggcacccccgctctccatgctgcgcatcaagtctgagaatggggaacaggccttcctactgatgatgcagcctgacaacaccattggggacgtgcgagctctgctagcgcaggccagggtcatggatgcctctgcctttgagatcttcagcacattcccgcccaccctctaccaggacgatacactcacgctgcaggctgcaggccttgtgcccaaagcagcactgctgctgcgggcacgccgagccccgaagtccagcctgaaattcagtcctggtccctgtcccggtcccggtcccggccccagtcccggtcccggtcccggctccagtccctgtcccggacccagtcccagcccccaataaagcacccgccccctcaaaaaacaaaaaaggggtgggtaaaaacac

SEQ ID NO: 462967 - DNA, 2876 bp, Homo sapiens
aagagggataattcctcccaagatcaatttagcaaaatagcggcactgtcgggatcacacattcaggtcctgaatgtgaggctgccagcagtttcattaacctaatcccaggctccttcctcccgcacctgagggttgctcaggcctccctcaaactagccaatgagaagtgcacgggtcctggtcgcctaggaaaccgcgtgacaacaagatggcggcgctgcgggacggctagcggccctgcgtgggagttcctgacagctggattctagaagtagaactatgagctcacctttggcctcccttagcaagacccgaaaagtgcccctgccctcggagcctatgaatcctgggaggcgaggaatccgcatctatggagatgagcggtgacctaggcatccctgtctgcagaagatgaggtggacatgttgagtgatgggtgtggctcagaagaaaagatctcagtcccttcctgctatggcggcataggtgcccctgtgagtcggcaagtccctgcatcccatgactcggagctgatggccttcatgacgaggaagttgtgggacctggagcagcaggtgaaggcccagactgatgagatactgtccaaggatcagaagatagcggccctagaggacctggtgcagaccctccggccacacccagccgaggcaaccctgcagcggcaggaggaactggagacgatgtgtgtgcagctgcagcggcaggtcagggagatggagcggttcctcagtgactatggcctgcagtgggtgggcgagcccatggaccaggaggactcagagagcaagacagtctcagagcatggcgagagggactggatgacagccaagaagttctggaagccaggggactcattggcgccccctgaggtggactttgacaggctgctggccagcctgcaggatcttagtgagctggtggtagagggtgacacccaagtgacaccagtgcccggcggggcacggctgcgtaccctcgagcccatcccgctgaagctctaccggaatggcatcatgatgttcgacgggcccttccagcccttctacgatccctccacacagcgctgcctccgagacatattggatggcttctttccctcagagctccagcgactgtaccccaatggggtcccctttaaggtgataagctgctcctcaaaccacacctttggggattttgaagggagtggggatacacagcctccccagacacctcccattctgaggggaagccgctgcactccctgggggaccccagtctgatgccctccaggaggataagtctgaagccgggctgggaagggagcggagaggcccgaaacagagcagcaggcagcgccctctgctggcaccctggagacagcctcggctgcggggcccctgccttctagtcctccccagctttcaggacaccttgacaacctggggtccctgcagaagtggcccggctgtcccccaagtctcctgaagctatctgggtagggtgggaggcagtgctgtgagccacaaatgcaaagcagaggggacagatgttgggactcaaagacatgaggtagagctggccccatgggtaggtgccaccaccagagcccatgaggcttcgtgttctagaaggtggtgggttagtgccgcactgagggcgtgtccgggagggagcatgtgtcaccagggctcaggaaacagcatgagtcatgacgcgggggtgtttaaggcattcgtgccacagcggggacctcggagctatgccttgataaggcaagtgaggttacatgtacgatgatgcggtttgtgctgcagactggaaaaaagcaggggctttgtcctctcctgaccccctcacactctgccttcacggtaggctcctgagaggggggtctccaaggagggtgtcagtactgcagcttcagctggcgtggatggggtgcttacaggagcagcagggctgagggagatgacagcagtacgaaccgtggctctcctgaggcctgggtttcctcatatgtaaaatgggggttgcattagaccatacccttggcctgtgtttaggcaaatagggatgaaagtggggccaagggctgaagagctgggtccgctgccgtcgttgcccttctttcttgccaggtgagtgacttgcgcaatcaggtctacctggaggatggactggaccccttcccaggcgagggccgtgtggtgggcaggcagcggatgcacaaggccttggacagggtggaggagcacccaggctccaggatgactgctgagaaatttctgaacaggctccccaagtttgtgatccggcaaggcgaggtgattgacatccggggccccatcagggacaccttgcagaactgctgcccattgcctgcccggatccaggagattgtggtggagacgcccaccttggccgctgagcgagagaggagccaggagtcacccaacacgccggcacccccgctctccatgctgcgcatcaagtctgagaatggggaacaggccttcctactgatgatgcagcctgacaacaccattggggacgtgcgagctctgctagcgcaggccagggtcatggatgcctctgcctttgagatcttcagcacattcccgcccaccctctaccaggacgatacactcacgctgcaggctgcaggccttgtgcccaaagcagcactgctgctgcgggcacgccgagccccgaagtccagcctgaaattcagtcctggtccctgtcccggtcccggtcccggccccagtcccggtcccggtcccggctccagtccctgtcccggacccagtcccagcccccaataaagcacccgccccctcaaaaaacaaaaaaggggtgggtaaaaacac

SEQ ID NO: 462968 - DNA, 2642 bp, Homo sapiens
aagagggataattcctcccaagatcaatttagcaaaatagcggcactgtcgggatcacacattcaggtcctgaatgtgaggctgccagcagtttcattaacctaatcccaggctccttcctcccgcacctgagggttgctcaggcctccctcaaactagccaatgagaagtgcacgggtcctggtcgcctaggaaaccgcgtgacaacaagatggcggcgctgcgggacggctagcggccctgcgtggaggcgaggaatccgcatctatggagatgtccctgcatcccatgactcggagctgatggccttcatgacgaggaagttgtgggacctggagcagcaggtgaaggcccagactgatgagatactgtccaaggatcagaagatagcggccctagaggacctggtgcagaccctccggccacacccagccgaggcaaccctgcagcggcaggaggaactggagacgatgtgtgtgcagctgcagcggcaggtcagggagatggagcggttcctcagtgactatggcctgcagtgggtgggcgagcccatggaccaggaggactcagagagcaagacagtctcagagcatggcgagagggactggatgacagccaagaagttctggaagccaggggactcattggcgccccctgaggtggactttgacaggctgctggccagcctgcaggatcttagtgagctggtggtagagggtgacacccaagtgacaccagtgcccggcggggcacggctgcgtaccctcgagcccatcccgctgaagctctaccggaatggcatcatgatgttcgacgggcccttccagcccttctacgatccctccacacagcgctgcctccgagacatattggatggcttctttccctcagagctccagcgactgtaccccaatggggtcccctttaaggtgataagctgctcctcaaaccacacctttggggattttgaagggagtggggatacacagcctccccagacacctcccattctgaggggaagccgctgcactccctgggggaccccagtctgatgccctccaggaggataagtctgaagccgggctgggaagggagcggagaggcccgaaacagagcagcaggcagcgccctctgctggcaccctggagacagcctcggctgcggggcccctgccttctagtcctccccagctttcaggacaccttgacaacctggggtccctgcagaagtggcccggctgtcccccaagtctcctgaagctatctgggtagggtgggaggcagtgctgtgagccacaaatgcaaagcagaggggacagatgttgggactcaaagacatgaggtagagctggccccatgggtaggtgccaccaccagagcccatgaggcttcgtgttctagaaggtggtgggttagtgccgcactgagggcgtgtccgggagggagcatgtgtcaccagggctcaggaaacagcatgagtcatgacgcgggggtgtttaaggcattcgtgccacagcggggacctcggagctatgccttgataaggcaagtgaggttacatgtacgatgatgcggtttgtgctgcagactggaaaaaagcaggggctttgtcctctcctgaccccctcacactctgccttcacggtaggctcctgagaggggggtctccaaggagggtgtcagtactgcagcttcagctggcgtggatggggtgcttacaggagcagcagggctgagggagatgacagcagtacgaaccgtggctctcctgaggcctgggtttcctcatatgtaaaatgggggttgcattagaccatacccttggcctgtgtttaggcaaatagggatgaaagtggggccaagggctgaagagctgggtccgctgccgtcgttgcccttctttcttgccaggtgagtgacttgcgcaatcaggtctacctggaggatggactggaccccttcccaggcgagggccgtgtggtgggcaggcagcggatgcacaaggccttggacagggtggaggagcacccaggctccaggatgactgctgagaaatttctgaacaggctccccaagtttgtgatccggcaaggcgaggtgattgacatccggggccccatcagggacaccttgcagaactgctgcccattgcctgcccggatccaggagattgtggtggagacgcccaccttggccgctgagcgagagaggagccaggagtcacccaacacgccggcacccccgctctccatgctgcgcatcaagtctgagaatggggaacaggccttcctactgatgatgcagcctgacaacaccattggggacgtgcgagctctgctagcgcaggccagggtcatggatgcctctgcctttgagatcttcagcacattcccgcccaccctctaccaggacgatacactcacgctgcaggctgcaggccttgtgcccaaagcagcactgctgctgcgggcacgccgagccccgaagtccagcctgaaattcagtcctggtccctgtcccggtcccggtcccggccccagtcccggtcccggtcccggctccagtccctgtcccggacccagtcccagcccccaataaagcacccgccccctcaaaaaacaaaaaaggggtgggtaaaaacac

SEQ ID NO: 462969 - DNA, 2613 bp, Homo sapiens
aagagggataattcctcccaagatcaatttagcaaaatagcggcactgtcgggatcacacattcaggtcctgaatgtgaggctgccagcagtttcattaacctaatcccaggctccttcctcccgcacctgagggttgctcaggcctccctcaaactagccaatgagaagtgcacgggtcctggtcgcctaggaaaccgcgtgacaacaagatggcggcgctgcgggacggctagcggccctgcgtgtccctgcatcccatgactcggagctgatggccttcatgacgaggaagttgtgggacctggagcagcaggtgaaggcccagactgatgagatactgtccaaggatcagaagatagcggccctagaggacctggtgcagaccctccggccacacccagccgaggcaaccctgcagcggcaggaggaactggagacgatgtgtgtgcagctgcagcggcaggtcagggagatggagcggttcctcagtgactatggcctgcagtgggtgggcgagcccatggaccaggaggactcagagagcaagacagtctcagagcatggcgagagggactggatgacagccaagaagttctggaagccaggggactcattggcgccccctgaggtggactttgacaggctgctggccagcctgcaggatcttagtgagctggtggtagagggtgacacccaagtgacaccagtgcccggcggggcacggctgcgtaccctcgagcccatcccgctgaagctctaccggaatggcatcatgatgttcgacgggcccttccagcccttctacgatccctccacacagcgctgcctccgagacatattggatggcttctttccctcagagctccagcgactgtaccccaatggggtcccctttaaggtgataagctgctcctcaaaccacacctttggggattttgaagggagtggggatacacagcctccccagacacctcccattctgaggggaagccgctgcactccctgggggaccccagtctgatgccctccaggaggataagtctgaagccgggctgggaagggagcggagaggcccgaaacagagcagcaggcagcgccctctgctggcaccctggagacagcctcggctgcggggcccctgccttctagtcctccccagctttcaggacaccttgacaacctggggtccctgcagaagtggcccggctgtcccccaagtctcctgaagctatctgggtagggtgggaggcagtgctgtgagccacaaatgcaaagcagaggggacagatgttgggactcaaagacatgaggtagagctggccccatgggtaggtgccaccaccagagcccatgaggcttcgtgttctagaaggtggtgggttagtgccgcactgagggcgtgtccgggagggagcatgtgtcaccagggctcaggaaacagcatgagtcatgacgcgggggtgtttaaggcattcgtgccacagcggggacctcggagctatgccttgataaggcaagtgaggttacatgtacgatgatgcggtttgtgctgcagactggaaaaaagcaggggctttgtcctctcctgaccccctcacactctgccttcacggtaggctcctgagaggggggtctccaaggagggtgtcagtactgcagcttcagctggcgtggatggggtgcttacaggagcagcagggctgagggagatgacagcagtacgaaccgtggctctcctgaggcctgggtttcctcatatgtaaaatgggggttgcattagaccatacccttggcctgtgtttaggcaaatagggatgaaagtggggccaagggctgaagagctgggtccgctgccgtcgttgcccttctttcttgccaggtgagtgacttgcgcaatcaggtctacctggaggatggactggaccccttcccaggcgagggccgtgtggtgggcaggcagcggatgcacaaggccttggacagggtggaggagcacccaggctccaggatgactgctgagaaatttctgaacaggctccccaagtttgtgatccggcaaggcgaggtgattgacatccggggccccatcagggacaccttgcagaactgctgcccattgcctgcccggatccaggagattgtggtggagacgcccaccttggccgctgagcgagagaggagccaggagtcacccaacacgccggcacccccgctctccatgctgcgcatcaagtctgagaatggggaacaggccttcctactgatgatgcagcctgacaacaccattggggacgtgcgagctctgctagcgcaggccagggtcatggatgcctctgcctttgagatcttcagcacattcccgcccaccctctaccaggacgatacactcacgctgcaggctgcaggccttgtgcccaaagcagcactgctgctgcgggcacgccgagccccgaagtccagcctgaaattcagtcctggtccctgtcccggtcccggtcccggccccagtcccggtcccggtcccggctccagtccctgtcccggacccagtcccagcccccaataaagcacccgccccctcaaaaaacaaaaaaggggtgggtaaaaacac

SEQ ID NO: 462970 - DNA, 1632 bp, Homo sapiens
aagagggataattcctcccaagatcaatttagcaaaatagcggcactgtcgggatcacacattcaggtcctgaatgtgaggctgccagcagtttcattaacctaatcccaggctccttcctcccgcacctgagggttgctcaggcctccctcaaactagccaatgagaagtgcacgggtcctggtcgcctaggaaaccgcgtgacaacaagatggcggcgctgcgggacggctagcggccctgcgtgtccctgcatcccatgactcggagctgatggccttcatgacgaggaagttgtgggacctggagcagcaggtgaaggcccagactgatgagatactgtccaaggatcagaagatagcggccctagaggacctggtgcagaccctccggccacacccagccgaggcaaccctgcagcggcaggaggaactggagacgatgtgtgtgcagctgcagcggcaggtcagggagatggagcggttcctcagtgactatggcctgcagtgggtgggcgagcccatggaccaggaggactcagagagcaagacagtctcagagcatggcgagagggactggatgacagccaagaagttctggaagccaggggactcattggcgccccctgaggtggactttgacaggctgctggccagcctgcaggatcttagtgagctggtggtagagggtgacacccaagtgacaccagtgcccggcggggcacggctgcgtaccctcgagcccatcccgctgaagctctaccggaatggcatcatgatgttcgacgggcccttccagcccttctacgatccctccacacagcgctgcctccgagacatattggatggcttctttccctcagagctccagcgactgtaccccaatggggtcccctttaaggtgagtgacttgcgcaatcaggtctacctggaggatggactggaccccttcccaggcgagggccgtgtggtgggcaggcagcggatgcacaaggccttggacagggtggaggagcacccaggctccaggatgactgctgagaaatttctgaacaggctccccaagtttgtgatccggcaaggcgaggtgattgacatccggggccccatcagggacaccttgcagaactgctgcccattgcctgcccggatccaggagattgtggtggagacgcccaccttggccgctgagcgagagaggagccaggagtcacccaacacgccggcacccccgctctccatgctgcgcatcaagtctgagaatggggaacaggccttcctactgatgatgcagcctgacaacaccattggggacgtgcgagctctgctagcgcaggccagggtcatggatgcctctgcctttgagatcttcagcacattcccgcccaccctctaccaggacgatacactcacgctgcaggctgcaggccttgtgcccaaagcagcactgctgctgcgggcacgccgagccccgaagtccagcctgaaattcagtcctggtccctgtcccggtcccggtcccggccccagtcccggtcccggtcccggctccagtccctgtcccggacccagtcccagcccccaataaagcacccgccccctcaaaaaacaaaaaaggggtgggtaaaaacac

SEQ ID NO: 462971 - DNA, 2973 bp, Homo sapiens
aagagggataattcctcccaagatcaatttagcaaaatagcggcactgtcgggatcacacattcaggtcctgaatgtgaggctgccagcagtttcattaacctaatcccaggctccttcctcccgcacctgagggttgctcaggcctccctcaaactagccaatgagaagtgcacgggtcctggtcgcctaggaaaccgcgtgacaacaagatggcggcgctgcgggacggctagcggccctgcgtgggagttcctgacagctggattctagaagtagaactatgagctcacctttggcctcccttagcaagacccgaaaagtgcccctgccctcggagcctatgaatcctgggaggcgaggaatccgcatctatggagatgaagatgaggtggacatgttgagtgatgggtgtggctcagaagaaaagatctcagtcccttcctgctatggcggcataggtgcccctgtgagtcggcaagtccctgcatcccatgactcggagctgatggccttcatgacgaggaagttgtgggacctggagcagcaggtgaaggcccagactgatgagatactgtccaaggatcagaagatagcggccctagaggacctggtgcagaccctccggccacacccagccgaggcaaccctgcagcggcaggaggaactggagacgatgtgtgtgcagctgcagcggcaggtcagggagatggagcggttcctcagtgactatggcctgcagtgggtgggcgagcccatggaccaggaggactcagagagcaagacagtctcagagcatggcgagagggactggatgacagccaagaagttctggaagccaggggactcattggcgccccctgaggtggactttgacaggctgctggccagcctgcaggatcttagtgagctggtggtagagggtgacacccaagtgacaccagtgcccggcggggcacggctgcgtaccctcgagcccatcccgctgaagctctaccggaatggcatcatgatgttcgacgggcccttccagcccttctacgatccctccacacagcgctgcctccgagacatattggatggcttctttccctcagagctccagcgactgtaccccaatggggtcccctttaaggtgataagctgctcctcaaaccacacctttggggattttgaagggagtggggatacacagcctccccagacacctcccattctgaggggaagccgctgcactccctgggggaccccagtctgatgccctccaggaggataagtctgaagccgggctgggaagggagcggagaggcccgaaacagagcagcaggcagcgccctctgctggcaccctggagacagcctcggctgcggggcccctgccttctagtcctccccagctttcaggacaccttgacaacctggggtccctgcagaagtggcccggctgtcccccaagtctcctgaagctatctgggtagggtgggaggcagtgctgtgagccacaaatgcaaagcagaggggacagatgttgggactcaaagacatgaggtagagctggccccatgggtaggtgccaccaccagagcccatgaggcttcgtgttctagaaggtggtgggttagtgccgcactgagggcgtgtccgggagggagcatgtgtcaccagggctcaggaaacagcatgagtcatgacgcgggggtgtttaaggcattcgtgccacagcggggacctcggagctatgccttgataaggcaagtgaggttacatgtacgatgatgcggtttgtgctgcagactggaaaaaagcaggggctttgtcctctcctgaccccctcacactctgccttcacggtaggctcctgagaggggggtctccaaggagggtgtcagtactgcagcttcagctggcgtggatggggtgcttacaggagcagcagggctgagggagatgacagcagtacgaaccgtggctctcctgaggcctgggtttcctcatatgtaaaatgggggttgcattagaccatacccttggcctgtgtttaggcaaatagggatgaaagtggggccaagggctgaagagctgggtccgctgccgtcgttgcccttctttcttgccaggtgagtgacttgcgcaatcaggtctacctggaggatggactggaccccttcccaggcgagggccgtgtggtgggcaggcagcggatgcacaaggccttggacagggtggaggagcacccaggctccaggatgactgctgagaaatttctgaacaggctccccaagtttgtgatccggcaaggcgaggtgattgacatccggggccccatcagggacaccttgcagaactgctgcccattgcctgcccggatccaggagattgtggtggagacgcccaccttggccgctgagcgagagaggagccaggagtcacccaacacgccggcacccccgctctccatgctgcgcatcaagtctgagaatggggaacaggccttcctactgatgatgcagcctgacaacaccattggggacgtgcgagctctgctagcgcaggccagggtcatggatgcctctgcctttgagatcttcagcacattcccgcccaccctctaccaggacgatacactcacgctgcaggctgcaggccttgtgcccaaagcagcactgctgctgcgggcacgccgagccccgaagtccagcctgaaattcagtcctggtccctgtcccggtcccggtcccggccccagtcccggtcccggtcccggctccagtccctgtcccggacccagtcccagccccgtcccggtcccggtcccggcccctccctgtcctggacccagtcccagcccccaataaagcacccgccccctcaacccgctgctccgccaggctcttgggtgggccatctcgccaggcacgtaggaaaggcctgggaccagctgggccagggagggggcggtgccgacccgccccttg

SEQ ID NO: 462972 - DNA, 1992 bp, Homo sapiens
aagagggataattcctcccaagatcaatttagcaaaatagcggcactgtcgggatcacacattcaggtcctgaatgtgaggctgccagcagtttcattaacctaatcccaggctccttcctcccgcacctgagggttgctcaggcctccctcaaactagccaatgagaagtgcacgggtcctggtcgcctaggaaaccgcgtgacaacaagatggcggcgctgcgggacggctagcggccctgcgtgggagttcctgacagctggattctagaagtagaactatgagctcacctttggcctcccttagcaagacccgaaaagtgcccctgccctcggagcctatgaatcctgggaggcgaggaatccgcatctatggagatgaagatgaggtggacatgttgagtgatgggtgtggctcagaagaaaagatctcagtcccttcctgctatggcggcataggtgcccctgtgagtcggcaagtccctgcatcccatgactcggagctgatggccttcatgacgaggaagttgtgggacctggagcagcaggtgaaggcccagactgatgagatactgtccaaggatcagaagatagcggccctagaggacctggtgcagaccctccggccacacccagccgaggcaaccctgcagcggcaggaggaactggagacgatgtgtgtgcagctgcagcggcaggtcagggagatggagcggttcctcagtgactatggcctgcagtgggtgggcgagcccatggaccaggaggactcagagagcaagacagtctcagagcatggcgagagggactggatgacagccaagaagttctggaagccaggggactcattggcgccccctgaggtggactttgacaggctgctggccagcctgcaggatcttagtgagctggtggtagagggtgacacccaagtgacaccagtgcccggcggggcacggctgcgtaccctcgagcccatcccgctgaagctctaccggaatggcatcatgatgttcgacgggcccttccagcccttctacgatccctccacacagcgctgcctccgagacatattggatggcttctttccctcagagctccagcgactgtaccccaatggggtcccctttaaggtgagtgacttgcgcaatcaggtctacctggaggatggactggaccccttcccaggcgagggccgtgtggtgggcaggcagcggatgcacaaggccttggacagggtggaggagcacccaggctccaggatgactgctgagaaatttctgaacaggctccccaagtttgtgatccggcaaggcgaggtgattgacatccggggccccatcagggacaccttgcagaactgctgcccattgcctgcccggatccaggagattgtggtggagacgcccaccttggccgctgagcgagagaggagccaggagtcacccaacacgccggcacccccgctctccatgctgcgcatcaagtctgagaatggggaacaggccttcctactgatgatgcagcctgacaacaccattggggacgtgcgagctctgctagcgcaggccagggtcatggatgcctctgcctttgagatcttcagcacattcccgcccaccctctaccaggacgatacactcacgctgcaggctgcaggccttgtgcccaaagcagcactgctgctgcgggcacgccgagccccgaagtccagcctgaaattcagtcctggtccctgtcccggtcccggtcccggccccagtcccggtcccggtcccggctccagtccctgtcccggacccagtcccagccccgtcccggtcccggtcccggcccctccctgtcctggacccagtcccagcccccaataaagcacccgccccctcaacccgctgctccgccaggctcttgggtgggccatctcgccaggcacgtaggaaaggcctgggaccagctgggccagggagggggcggtgccgacccgccccttg

SEQ ID NO: 462973 - DNA, 1363 bp, Homo sapiens
gatgatgtcatgagtccgtcccccggtgttatttagtcacgaggactcgaactacatgatgtatatagctggccccatgggtaggtgccaccaccagagcccatgaggcttcgtgttctagaaggtggtgggttagtgccgcactgagggcgtgtccgggagggagcatgtgtcaccagggctcaggaaacagcatgagtcatgacgcgggggtgtttaaggcattcgtgccacagcggggacctcggagctatgccttgataaggcaagtgaggttacatgtacgatgatgcggtttgtgctgcagactggaaaaaagcaggggctttgtcctctcctgaccccctcacactctgccttcacggtaggctcctgagaggggggtctccaaggagggtgtcagtactgcagcttcagctggcgtggatggggtgcttacaggagcagcagggctgagggagatgacagcagtacgaaccgtggctctcctgaggcctgggtttcctcatatgtaaaatgggggttgcattagaccatacccttggcctgtgtttaggcaaatagggatgaaagtggggccaagggctgaagagctgggtccgctgccgtcgttgcccttctttcttgccaggtgagtgacttgcgcaatcaggtctacctggaggatggactggaccccttcccaggcgagggccgtgtggtgggcaggcagcggatgcacaaggccttggacagggtggaggagcacccaggctccaggatgactgctgagaaatttctgaacaggctccccaagtttgtgatccggcaaggcgaggtgattgacatccggggccccatcagggacaccttgcagaactgctgcccattgcctgcccggatccaggagattgtggtggagacgcccaccttggccgctgagcgagagaggagccaggagtcacccaacacgccggcacccccgctctccatgctgcgcatcaagtctgagaatggggaacaggccttcctactgatgatgcagcctgacaacaccattggggacgtgcgagctctgctagcgcaggccagggtcatggatgcctctgcctttgagatcttcagcacattcccgcccaccctctaccaggacgatacactcacgctgcaggctgcaggccttgtgcccaaagcagcactgctgctgcgggcacgccgagccccgaagtccagcctgaaattcagtcctggtccctgtcccggtcccggtcccggccccagtcccggtcccggtcccggctccagtccctgtcccggacccagtcccagcccccaataaagcacccgccccctcaaaaaacaaaaaaggggtgggtaaaaacac

SEQ ID NO: 462974 - DNA, 1399 bp, Homo sapiens
aagagggataattcctcccaagatcaatttagcaaaatagcggcactgtcgggatcacacattcaggtcctgaatgtgaggctgccagcagtttcattaacctaatcccaggctccttcctcccgcacctgagggttgctcaggcctccctcaaactagccaatgagaagtgcacgggtcctggtcgcctaggaaaccgcgtgacaacaagatggcggcgctgcgggacggctagcggccctgcgtgcggttcctcagtgactatggcctgcagtgggtgggcgagcccatggaccaggaggactcagagagcaagacagtctcagagcatggcgagagggactggatgacagccaagaagttctggaagccaggggactcattggcgccccctgaggtggactttgacaggctgctggccagcctgcaggatcttagtgagctggtggtagagggtgacacccaagtgacaccagtgcccggcggggcacggctgcgtaccctcgagcccatcccgctgaagctctaccggaatggcatcatgatgttcgacgggcccttccagcccttctacgatccctccacacagcgctgcctccgagacatattggatggcttctttccctcagagctccagcgactgtaccccaatggggtcccctttaaggtgagtgacttgcgcaatcaggtctacctggaggatggactggaccccttcccaggcgagggccgtgtggtgggcaggcagcggatgcacaaggccttggacagggtggaggagcacccaggctccaggatgactgctgagaaatttctgaacaggctccccaagtttgtgatccggcaaggcgaggtgattgacatccggggccccatcagggacaccttgcagaactgctgcccattgcctgcccggatccaggagattgtggtggagacgcccaccttggccgctgagcgagagaggagccaggagtcacccaacacgccggcacccccgctctccatgctgcgcatcaagtctgagaatggggaacaggccttcctactgatgatgcagcctgacaacaccattggggacgtgcgagctctgctagcgcaggccagggtcatggatgcctctgcctttgagatcttcagcacattcccgcccaccctctaccaggacgatacactcacgctgcaggctgcaggccttgtgcccaaagcagcactgctgctgcgggcacgccgagccccgaagtccagcctgaaattcagtcctggtccctgtcccggtcccggtcccggccccagtcccggtcccggtcccggctccagtccctgtcccggacccagtcccagcccccaataaagcacccgccccctcaaaaaacaaaaaaggggtgggtaaaaacac

SEQ ID NO: 462975 - DNA, 1065 bp, Homo sapiens
aagagggataattcctcccaagatcaatttagcaaaatagcggcactgtcgggatcacacattcaggtcctgaatgtgaggctgccagcagtttcattaacctaatcccaggctccttcctcccgcacctgagggttgctcaggcctccctcaaactagccaatgagaagtgcacgggtcctggtcgcctaggaaaccgcgtgacaacaagatggcggcgctgcgggacggctagcggccctgcgtgggagttcctgacagctggattctagaagtagaactatgagctcacctttggcctcccttagcaagacccgaaaagtgcccctgccctcggagcctatgaatcctgggaggcgaggaatccgcatctatggagatgtccctgcatcccatgactcggagctgatggccttcatgacgaggaagttgtgggacctggagcagcaggtgaaggcccagactgatgagatactgtccaaggatcagaagatagcggccctagaggacctggtgcagaccctccggccacacccagccgaggcaaccctgcagcggcaggaggaactggagacgatgtgtgtgcagctgcagcggcaggtcagggagatggagcggttcctcagtgactatggcctgcagtgggtgggcgagcccatggaccaggaggactcagagagcaagacagtctcagagcatggcgagagggactggatgacagccaagaagttctggaagccaggggactcattggcgccccctgaggtggactttgacaggctgcaggccttgtgcccaaagcagcactgctgctgcgggcacgccgagccccgaagtccagcctgaaattcagtcctggtccctgtcccggtcccggctccagtccctgtcccggacccagtcccagcccctccctgtcctggacccagtcccagcccccaataaagcacccgccccctcaacccgctgctccgccaggctcttgggtgggccatctcgccaggcacgtaggaaaggcctgggaccagctgggccagggagggggcggtgccgacccgccccttg

SEQ ID NO: 462976 - DNA, 3104 bp, Homo sapiens
aagagggataattcctcccaagatcaatttagcaaaatagcggcactgtcgggatcacacattcaggtcctgaatgtgaggctgccagcagtttcattaacctaatcccaggctccttcctcccgcacctgagggttgctcaggcctccctcaaactagccaatgagaagtgcacgggtcctggtcgcctaggaaaccgcgtgacaacaagatggcggcgctgcgggacggctagcggccctgcgtgtactttcccaagcaccaccaggccaaaggtctctcagttcagagcagaaagccgtatacccagaggagcaggcagataacagaaacttccagaaacctctgtggagacagtggaagaggcaaaagggagttcctgacagctggattctagaagtagaactatgagctcacctttggcctcccttagcaagacccgaaaagtgcccctgccctcggagcctatgaatcctgggaggcgaggaatccgcatctatggagatgagcggtgacctaggcatccctgtctgcagaagatgaggtggacatgttgagtgatgggtgtggctcagaagaaaagatctcagtcccttcctgctatggcggcataggtgcccctgtgagtcggcaagtccctgcatcccatgactcggagctgatggccttcatgacgaggaagttgtgggacctggagcagcaggtgaaggcccagactgatgagatactgtccaaggatcagaagatagcggccctagaggacctggtgcagaccctccggccacacccagccgaggcaaccctgcagcggcaggaggaactggagacgatgtgtgtgcagctgcagcggcaggtcagggagatggagcggttcctcagtgactatggcctgcagtgggtgggcgagcccatggaccaggaggactcagagagcaagacagtctcagagcatggcgagagggactggatgacagccaagaagttctggaagccaggggactcattggcgccccctgaggtggactttgacaggctgctggccagcctgcaggatcttagtgagctggtggtagagggtgacacccaagtgacaccagtgcccggcggggcacggctgcgtaccctcgagcccatcccgctgaagctctaccggaatggcatcatgatgttcgacgggcccttccagcccttctacgatccctccacacagcgctgcctccgagacatattggatggcttctttccctcagagctccagcgactgtaccccaatggggtcccctttaaggtgataagctgctcctcaaaccacacctttggggattttgaagggagtggggatacacagcctccccagacacctcccattctgaggggaagccgctgcactccctgggggaccccagtctgatgccctccaggaggataagtctgaagccgggctgggaagggagcggagaggcccgaaacagagcagcaggcagcgccctctgctggcaccctggagacagcctcggctgcggggcccctgccttctagtcctccccagctttcaggacaccttgacaacctggggtccctgcagaagtggcccggctgtcccccaagtctcctgaagctatctgggtagggtgggaggcagtgctgtgagccacaaatgcaaagcagaggggacagatgttgggactcaaagacatgaggtagagctggccccatgggtaggtgccaccaccagagcccatgaggcttcgtgttctagaaggtggtgggttagtgccgcactgagggcgtgtccgggagggagcatgtgtcaccagggctcaggaaacagcatgagtcatgacgcgggggtgtttaaggcattcgtgccacagcggggacctcggagctatgccttgataaggcaagtgaggttacatgtacgatgatgcggtttgtgctgcagactggaaaaaagcaggggctttgtcctctcctgaccccctcacactctgccttcacggtaggctcctgagaggggggtctccaaggagggtgtcagtactgcagcttcagctggcgtggatggggtgcttacaggagcagcagggctgagggagatgacagcagtacgaaccgtggctctcctgaggcctgggtttcctcatatgtaaaatgggggttgcattagaccatacccttggcctgtgtttaggcaaatagggatgaaagtggggccaagggctgaagagctgggtccgctgccgtcgttgcccttctttcttgccaggtgagtgacttgcgcaatcaggtctacctggaggatggactggaccccttcccaggcgagggccgtgtggtgggcaggcagcggatgcacaaggccttggacagggtggaggagcacccaggctccaggatgactgctgagaaatttctgaacaggctccccaagtttgtgatccggcaaggcgaggtgattgacatccggggccccatcagggacaccttgcagaactgctgcccattgcctgcccggatccaggagattgtggtggagacgcccaccttggccgctgagcgagagaggagccaggagtcacccaacacgccggcacccccgctctccatgctgcgcatcaagtctgagaatggggaacaggccttcctactgatgatgcagcctgacaacaccattggggacgtgcgagctctgctagcgcaggccagggtcatggatgcctctgcctttgagatcttcagcacattcccgcccaccctctaccaggacgatacactcacgctgcaggctgcaggccttgtgcccaaagcagcactgctgctgcgggcacgccgagccccgaagtccagcctgaaattcagtcctggtccctgtcccggtcccggtcccggccccagtcccggtcccggtcccggctccagtccctgtcccggacccagtcccagcccctccctgtcctggacccagtcccagcccccaataaagcacccgccccctcaacccgctgctccgccaggctcttgggtgggccatctcgccaggcacgtaggaaaggcctgggaccagctgggccagggagggggcggtgccgacccgccccttg

SEQ ID NO: 462977 - DNA, 2748 bp, Homo sapiens
aagagggataattcctcccaagatcaatttagcaaaatagcggcactgtcgggatcacacattcaggtcctgaatgtgaggctgccagcagtttcattaacctaatcccaggctccttcctcccgcacctgagggttgctcaggcctccctcaaactagccaatgagaagtgcacgggtcctggtcgcctaggaaaccgcgtgacaacaagatggcggcgctgcgggacggctagcggccctgcgtgggagttcctgacagctggattctagaagtagaactatgagctcacctttggcctcccttagcaagacccgaaaagtgcccctgccctcggagcctatgaatcctgggaggcgaggaatccgcatctatggagatgtccctgcatcccatgactcggagctgatggccttcatgacgaggaagttgtgggacctggagcagcaggtgaaggcccagactgatgagatactgtccaaggatcagaagatagcggccctagaggacctggtgcagaccctccggccacacccagccgaggcaaccctgcagcggcaggaggaactggagacgatgtgtgtgcagctgcagcggcaggtcagggagatggagcggttcctcagtgactatggcctgcagtgggtgggcgagcccatggaccaggaggactcagagagcaagacagtctcagagcatggcgagagggactggatgacagccaagaagttctggaagccaggggactcattggcgccccctgaggtggactttgacaggctgctggccagcctgcaggatcttagtgagctggtggtagagggtgacacccaagtgacaccagtgcccggcggggcacggctgcgtaccctcgagcccatcccgctgaagctctaccggaatggcatcatgatgttcgacgggcccttccagcccttctacgatccctccacacagcgctgcctccgagacatattggatggcttctttccctcagagctccagcgactgtaccccaatggggtcccctttaaggtgataagctgctcctcaaaccacacctttggggattttgaagggagtggggatacacagcctccccagacacctcccattctgaggggaagccgctgcactccctgggggaccccagtctgatgccctccaggaggataagtctgaagccgggctgggaagggagcggagaggcccgaaacagagcagcaggcagcgccctctgctggcaccctggagacagcctcggctgcggggcccctgccttctagtcctccccagctttcaggacaccttgacaacctggggtccctgcagaagtggcccggctgtcccccaagtctcctgaagctatctgggtagggtgggaggcagtgctgtgagccacaaatgcaaagcagaggggacagatgttgggactcaaagacatgaggtagagctggccccatgggtaggtgccaccaccagagcccatgaggcttcgtgttctagaaggtggtgggttagtgccgcactgagggcgtgtccgggagggagcatgtgtcaccagggctcaggaaacagcatgagtcatgacgcgggggtgtttaaggcattcgtgccacagcggggacctcggagctatgccttgataaggcaagtgaggttacatgtacgatgatgcggtttgtgctgcagactggaaaaaagcaggggctttgtcctctcctgaccccctcacactctgccttcacggtaggctcctgagaggggggtctccaaggagggtgtcagtactgcagcttcagctggcgtggatggggtgcttacaggagcagcagggctgagggagatgacagcagtacgaaccgtggctctcctgaggcctgggtttcctcatatgtaaaatgggggttgcattagaccatacccttggcctgtgtttaggcaaatagggatgaaagtggggccaagggctgaagagctgggtccgctgccgtcgttgcccttctttcttgccaggtgagtgacttgcgcaatcaggtctacctggaggatggactggaccccttcccaggcgagggccgtgtggtgggcaggcagcggatgcacaaggccttggacagggtggaggagcacccaggctccaggatgactgctgagaaatttctgaacaggctccccaagtttgtgatccggcaaggcgaggtgattgacatccggggccccatcagggacaccttgcagaactgctgcccattgcctgcccggatccaggagattgtggtggagacgcccaccttggccgctgagcgagagaggagccaggagtcacccaacacgccggcacccccgctctccatgctgcgcatcaagtctgagaatggggaacaggccttcctactgatgatgcagcctgacaacaccattggggacgtgcgagctctgctagcgcaggccagggtcatggatgcctctgcctttgagatcttcagcacattcccgcccaccctctaccaggacgatacactcacgctgcaggctgcaggccttgtgcccaaagcagcactgctgctgcgggcacgccgagccccgaagtccagcctgaaattcagtcctggtccctgtcccggtcccggtcccggccccagtcccggtcccggtcccggctccagtccctgtcccggacccagtcccagcccccaataaagcacccgccccctcaaaaaacaaaaaaggggtgggtaaaaacac

SEQ ID NO: 462978 - DNA, 1866 bp, Homo sapiens
aagagggataattcctcccaagatcaatttagcaaaatagcggcactgtcgggatcacacattcaggtcctgaatgtgaggctgccagcagtttcattaacctaatcccaggctccttcctcccgcacctgagggttgctcaggcctccctcaaactagccaatgagaagtgcacgggtcctggtcgcctaggaaaccgcgtgacaacaagatggcggcgctgcgggacggctagcggccctgcgtgggagttcctgacagctggattctagaagtagaactatgagctcacctttggcctcccttagcaagacccgaaaagtgcccctgccctcggagcctatgaatcctgggaggcgaggaatccgcatctatggagatgaagatgaggtggacatgttgagtgatgggtgtggctcagaagaaaagatctcagtcccttcctgctatggcggcataggtgcccctgtgagtcggcaagtccctgcatcccatgactcggagctgatggccttcatgacgaggaagttgtgggacctggagcagcaggtgaaggcccagactgatgagatactgtccaaggatcagaagatagcggccctagaggacctggtgcagaccctccggccacacccagccgaggcaaccctgcagcggcaggaggaactggagacgatgtgtgtgcagctgcagcggcaggtcagggagatggagcggttcctcagtgactatggcctgcagtgggtgggcgagcccatggaccaggaggactcagagagcaagacagtctcagagcatggcgagagggactggatgacagccaagaagttctggaagccaggggactcattggcgccccctgaggtggactttgacaggctgctggccagcctgcaggatcttagtgagctggtggtagagggtgacacccaagtgacaccagtgcccggcggggcacggctgcgtaccctcgagcccatcccgctgaagctctaccggaatggcatcatgatgttcgacgggcccttccagcccttctacgatccctccacacagcgctgcctccgagacatattggatggcttctttccctcagagctccagcgactgtaccccaatggggtcccctttaaggtgagtgacttgcgcaatcaggtctacctggaggatggactggaccccttcccaggcgagggccgtgtggtgggcaggcagcggatgcacaaggccttggacagggtggaggagcacccaggctccaggatgactgctgagaaatttctgaacaggctccccaagtttgtgatccggcaaggcgaggtgattgacatccggggccccatcagggacaccttgcagaactgctgcccattgcctgcccggatccaggagattgtggtggagacgcccaccttggccgctgagcgagagaggagccaggagtcacccaacacgccggcacccccgctctccatgctgcgcatcaagtctgagaatggggaacaggccttcctactgatgatgcagcctgacaacaccattggggacgtgcgagctctgctagcgcaggccagggtcatggatgcctctgcctttgagatcttcagcacattcccgcccaccctctaccaggacgatacactcacgctgcaggctgcaggccttgtgcccaaagcagcactgctgctgcgggcacgccgagccccgaagtccagcctgaaattcagtcctggtccctgtcccggtcccggtcccggccccagtcccggtcccggtcccggctccagtccctgtcccggacccagtcccagcccccaataaagcacccgccccctcaaaaaacaaaaaaggggtgggtaaaaacac

SEQ ID NO: 462979 - DNA, 2873 bp, Homo sapiens
aagagggataattcctcccaagatcaatttagcaaaatagcggcactgtcgggatcacacattcaggtcctgaatgtgaggctgccagcagtttcattaacctaatcccaggctccttcctcccgcacctgagggttgctcaggcctccctcaaactagccaatgagaagtgcacgggtcctggtcgcctaggaaaccgcgtgacaacaagatggcggcgctgcgggacggctagcggccctgcgtgtactttcccaagcaccaccaggccaaaggtctctcagttcagagcagaaagccgtatacccagaggagcaggcagataacagaaacttccagaaacctctgtggagacagtggaagaggcaaaagggagttcctgacagctggattctagaagtagaactatgagctcacctttggcctcccttagcaagacccgaaaagtgcccctgccctcggagcctatgaatcctgggaggcgaggaatccgcatctatggagatgtccctgcatcccatgactcggagctgatggccttcatgacgaggaagttgtgggacctggagcagcaggtgaaggcccagactgatgagatactgtccaaggatcagaagatagcggccctagaggacctggtgcagaccctccggccacacccagccgaggcaaccctgcagcggcaggaggaactggagacgatgtgtgtgcagctgcagcggcaggtcagggagatggagcggttcctcagtgactatggcctgcagtgggtgggcgagcccatggaccaggaggactcagagagcaagacagtctcagagcatggcgagagggactggatgacagccaagaagttctggaagccaggggactcattggcgccccctgaggtggactttgacaggctgctggccagcctgcaggatcttagtgagctggtggtagagggtgacacccaagtgacaccagtgcccggcggggcacggctgcgtaccctcgagcccatcccgctgaagctctaccggaatggcatcatgatgttcgacgggcccttccagcccttctacgatccctccacacagcgctgcctccgagacatattggatggcttctttccctcagagctccagcgactgtaccccaatggggtcccctttaaggtgataagctgctcctcaaaccacacctttggggattttgaagggagtggggatacacagcctccccagacacctcccattctgaggggaagccgctgcactccctgggggaccccagtctgatgccctccaggaggataagtctgaagccgggctgggaagggagcggagaggcccgaaacagagcagcaggcagcgccctctgctggcaccctggagacagcctcggctgcggggcccctgccttctagtcctccccagctttcaggacaccttgacaacctggggtccctgcagaagtggcccggctgtcccccaagtctcctgaagctatctgggtagggtgggaggcagtgctgtgagccacaaatgcaaagcagaggggacagatgttgggactcaaagacatgaggtagagctggccccatgggtaggtgccaccaccagagcccatgaggcttcgtgttctagaaggtggtgggttagtgccgcactgagggcgtgtccgggagggagcatgtgtcaccagggctcaggaaacagcatgagtcatgacgcgggggtgtttaaggcattcgtgccacagcggggacctcggagctatgccttgataaggcaagtgaggttacatgtacgatgatgcggtttgtgctgcagactggaaaaaagcaggggctttgtcctctcctgaccccctcacactctgccttcacggtaggctcctgagaggggggtctccaaggagggtgtcagtactgcagcttcagctggcgtggatggggtgcttacaggagcagcagggctgagggagatgacagcagtacgaaccgtggctctcctgaggcctgggtttcctcatatgtaaaatgggggttgcattagaccatacccttggcctgtgtttaggcaaatagggatgaaagtggggccaagggctgaagagctgggtccgctgccgtcgttgcccttctttcttgccaggtgagtgacttgcgcaatcaggtctacctggaggatggactggaccccttcccaggcgagggccgtgtggtgggcaggcagcggatgcacaaggccttggacagggtggaggagcacccaggctccaggatgactgctgagaaatttctgaacaggctccccaagtttgtgatccggcaaggcgaggtgattgacatccggggccccatcagggacaccttgcagaactgctgcccattgcctgcccggatccaggagattgtggtggagacgcccaccttggccgctgagcgagagaggagccaggagtcacccaacacgccggcacccccgctctccatgctgcgcatcaagtctgagaatggggaacaggccttcctactgatgatgcagcctgacaacaccattggggacgtgcgagctctgctagcgcaggccagggtcatggatgcctctgcctttgagatcttcagcacattcccgcccaccctctaccaggacgatacactcacgctgcaggctgcaggccttgtgcccaaagcagcactgctgctgcgggcacgccgagccccgaagtccagcctgaaattcagtcctggtccctgtcccggtcccggtcccggccccagtcccggtcccggtcccggctccagtccctgtcccggacccagtcccagcccccaataaagcacccgccccctcaaaaaacaaaaaaggggtgggtaaaaacac

SEQ ID NO: 462980 - DNA, 1845 bp, Homo sapiens
aagagggataattcctcccaagatcaatttagcaaaatagcggcactgtcgggatcacacattcaggtcctgaatgtgaggctgccagcagtttcattaacctaatcccaggctccttcctcccgcacctgagggttgctcaggcctccctcaaactagccaatgagaagtgcacgggtcctggtcgcctaggaaaccgcgtgacaacaagatggcggcgctgcgggacggctagcggccctgcgtgggagttcctgacagctggattctagaagtagaactatgagctcacctttggcctcccttagcaagacccgaaaagtgcccctgccctcggagcctatgaatcctgggaggcgaggaatccgcatctatggagatgaagatgaggtggacatgttgagtgatgggtgtggctcagaagaaaagatctcagtcccttcctgctatggcggcataggtgcccctgtgagtcggcaagtccctgcatcccatgactcggagctgatggccttcatgacgaggaagttgtgggacctggagcagcaggtgaaggcccagactgatgagatactgtccaaggatcagaagatagcggccctagaggacctggtgcagaccctccggccacacccagccgaggcaaccctgcagcggcaggaggaactggagacgatgtgtgtgcagctgcagcggcaggtcagggagatggagcggttcctcagtgactatggcctgcagtgggtgggcgagcccatggaccaggaggactcagagagcaagacagtctcagagcatggcgagagggactggatgacagccaagaagttctggaagccaggggactcattggcgccccctgaggtggactttgacaggctgctggccagcctgcaggatcttagtgagctggtggtagagggtgacacccaagtgacaccagtgcccggcggggcacggctgcgtaccctcgagcccatcccgctgaagctctaccggaatggcatcatgatgttcgacgggcccttccagcccttctacgatccctccacacagcgctgcctccgagacatattggatggcttctttccctcagagctccagcgactgtaccccaatggggtcccctttaaggtctacctggaggatggactggaccccttcccaggcgagggccgtgtggtgggcaggcagcggatgcacaaggccttggacagggtggaggagcacccaggctccaggatgactgctgagaaatttctgaacaggctccccaagtttgtgatccggcaaggcgaggtgattgacatccggggccccatcagggacaccttgcagaactgctgcccattgcctgcccggatccaggagattgtggtggagacgcccaccttggccgctgagcgagagaggagccaggagtcacccaacacgccggcacccccgctctccatgctgcgcatcaagtctgagaatggggaacaggccttcctactgatgatgcagcctgacaacaccattggggacgtgcgagctctgctagcgcaggccagggtcatggatgcctctgcctttgagatcttcagcacattcccgcccaccctctaccaggacgatacactcacgctgcaggctgcaggccttgtgcccaaagcagcactgctgctgcgggcacgccgagccccgaagtccagcctgaaattcagtcctggtccctgtcccggtcccggtcccggccccagtcccggtcccggtcccggctccagtccctgtcccggacccagtcccagcccccaataaagcacccgccccctcaaaaaacaaaaaaggggtgggtaaaaacac

SEQ ID NO: 462981 - DNA, 2486 bp, Homo sapiens
aagagggataattcctcccaagatcaatttagcaaaatagcggcactgtcgggatcacacattcaggtcctgaatgtgaggctgccagcagtttcattaacctaatcccaggctccttcctcccgcacctgagggttgctcaggcctccctcaaactagccaatgagaagtgcacgggtcctggtcgcctaggaaaccgcgtgacaacaagatggcggcgctgcgggacggctagcggccctgcgtgtccctgcatcccatgactcggagctgatggccttcatgacgaggaagttgtgggacctggagcagcaggtgaaggcccagactgatgagatactgtccaaggatcagaagatagcggccctagaggacctggtgcagaccctccggccacacccagccgaggcaaccctgcagcggcaggaggaactggagacgatgtgtgtgcagctgcagcggcaggtcagggagatggaggggactcattggcgccccctgaggtggactttgacaggctgctggccagcctgcaggatcttagtgagctggtggtagagggtgacacccaagtgacaccagtgcccggcggggcacggctgcgtaccctcgagcccatcccgctgaagctctaccggaatggcatcatgatgttcgacgggcccttccagcccttctacgatccctccacacagcgctgcctccgagacatattggatggcttctttccctcagagctccagcgactgtaccccaatggggtcccctttaaggtgataagctgctcctcaaaccacacctttggggattttgaagggagtggggatacacagcctccccagacacctcccattctgaggggaagccgctgcactccctgggggaccccagtctgatgccctccaggaggataagtctgaagccgggctgggaagggagcggagaggcccgaaacagagcagcaggcagcgccctctgctggcaccctggagacagcctcggctgcggggcccctgccttctagtcctccccagctttcaggacaccttgacaacctggggtccctgcagaagtggcccggctgtcccccaagtctcctgaagctatctgggtagggtgggaggcagtgctgtgagccacaaatgcaaagcagaggggacagatgttgggactcaaagacatgaggtagagctggccccatgggtaggtgccaccaccagagcccatgaggcttcgtgttctagaaggtggtgggttagtgccgcactgagggcgtgtccgggagggagcatgtgtcaccagggctcaggaaacagcatgagtcatgacgcgggggtgtttaaggcattcgtgccacagcggggacctcggagctatgccttgataaggcaagtgaggttacatgtacgatgatgcggtttgtgctgcagactggaaaaaagcaggggctttgtcctctcctgaccccctcacactctgccttcacggtaggctcctgagaggggggtctccaaggagggtgtcagtactgcagcttcagctggcgtggatggggtgcttacaggagcagcagggctgagggagatgacagcagtacgaaccgtggctctcctgaggcctgggtttcctcatatgtaaaatgggggttgcattagaccatacccttggcctgtgtttaggcaaatagggatgaaagtggggccaagggctgaagagctgggtccgctgccgtcgttgcccttctttcttgccaggtgagtgacttgcgcaatcaggtctacctggaggatggactggaccccttcccaggcgagggccgtgtggtgggcaggcagcggatgcacaaggccttggacagggtggaggagcacccaggctccaggatgactgctgagaaatttctgaacaggctccccaagtttgtgatccggcaaggcgaggtgattgacatccggggccccatcagggacaccttgcagaactgctgcccattgcctgcccggatccaggagattgtggtggagacgcccaccttggccgctgagcgagagaggagccaggagtcacccaacacgccggcacccccgctctccatgctgcgcatcaagtctgagaatggggaacaggccttcctactgatgatgcagcctgacaacaccattggggacgtgcgagctctgctagcgcaggccagggtcatggatgcctctgcctttgagatcttcagcacattcccgcccaccctctaccaggacgatacactcacgctgcaggctgcaggccttgtgcccaaagcagcactgctgctgcgggcacgccgagccccgaagtccagcctgaaattcagtcctggtccctgtcccggtcccggtcccggccccagtcccggtcccggtcccggctccagtccctgtcccggacccagtcccagcccccaataaagcacccgccccctcaaaaaacaaaaaaggggtgggtaaaaacac

SEQ ID NO: 462982 - DNA, 1637 bp, Homo sapiens
aagagggataattcctcccaagatcaatttagcaaaatagcggcactgtcgggatcacacattcaggtcctgaatgtgaggctgccagcagtttcattaacctaatcccaggctccttcctcccgcacctgagggttgctcaggcctccctcaaactagccaatgagaagtgcacgggtcctggtcgcctaggaaaccgcgtgacaacaagatggcggcgctgcgggacggctagcggccctgcgtggaggcgaggaatccgcatctatggagatgtccctgcatcccatgactcggagctgatggccttcatgacgaggaagttgtgggacctggagcagcaggtgaaggcccagactgatgagatactgtccaaggatcagaagatagcggccctagaggacctggtgcagaccctccggccacacccagccgaggcaaccctgcagcggcaggaggaactggagacgatgtgtgtgcagctgcagcggcaggtcagggagatggaggggactcattggcgccccctgaggtggactttgacaggctgctggccagcctgcaggatcttagtgagctggtggtagagggtgacacccaagtgacaccagtgcccggcggggcacggctgcgtaccctcgagcccatcccgctgaagctctaccggaatggcatcatgatgttcgacgggcccttccagcccttctacgatccctccacacagcgctgcctccgagacatattggatggcttctttccctcagagctccagcgactgtaccccaatggggtcccctttaaggtgagtgacttgcgcaatcaggtctacctggaggatggactggaccccttcccaggcgagggccgtgtggtgggcaggcagcggatgcacaaggccttggacagggtggaggagcacccaggctccaggatgactgctgagaaatttctgaacaggctccccaagtttgtgatccggcaaggcgaggtgattgacatccggggccccatcagggacaccttgcagaactgctgcccattgcctgcccggatccaggagattgtggtggagacgcccaccttggccgctgagcgagagaggagccaggagtcacccaacacgccggcacccccgctctccatgctgcgcatcaagtctgagaatggggaacaggccttcctactgatgatgcagcctgacaacaccattggggacgtgcgagctctgctagcgcaggccagggtcatggatgcctctgcctttgagatcttcagcacattcccgcccaccctctaccaggacgatacactcacgctgcaggctgcaggccttgtgcccaaagcagcactgctgctgcgggcacgccgagccccgaagtccagcctgaaattcagtcctggtccctgtcccggtcccggtcccggccccagtcccggtcccggtcccggctccagtccctgtcccggacccagtcccagcccctccctgtcctggacccagtcccagcccccaataaagcacccgccccctcaacccgctgctccgccaggctcttgggtgggccatctcgccaggcacgtaggaaaggcctgggaccagctgggccagggagggggcggtgccgacccgccccttg

SEQ ID NO: 462983 - DNA, 1272 bp, Homo sapiens
aagagggataattcctcccaagatcaatttagcaaaatagcggcactgtcgggatcacacattcaggtcctgaatgtgaggctgccagcagtttcattaacctaatcccaggctccttcctcccgcacctgagggttgctcaggcctccctcaaactagccaatgagaagtgcacgggtcctggtcgcctaggaaaccgcgtgacaacaagatggcggcgctgcgggacggctagcggccctgcgtggggactcattggcgccccctgaggtggactttgacaggctgctggccagcctgcaggatcttagtgagctggtggtagagggtgacacccaagtgacaccagtgcccggcggggcacggctgcgtaccctcgagcccatcccgctgaagctctaccggaatggcatcatgatgttcgacgggcccttccagcccttctacgatccctccacacagcgctgcctccgagacatattggatggcttctttccctcagagctccagcgactgtaccccaatggggtcccctttaaggtgagtgacttgcgcaatcaggtctacctggaggatggactggaccccttcccaggcgagggccgtgtggtgggcaggcagcggatgcacaaggccttggacagggtggaggagcacccaggctccaggatgactgctgagaaatttctgaacaggctccccaagtttgtgatccggcaaggcgaggtgattgacatccggggccccatcagggacaccttgcagaactgctgcccattgcctgcccggatccaggagattgtggtggagacgcccaccttggccgctgagcgagagaggagccaggagtcacccaacacgccggcacccccgctctccatgctgcgcatcaagtctgagaatggggaacaggccttcctactgatgatgcagcctgacaacaccattggggacgtgcgagctctgctagcgcaggccagggtcatggatgcctctgcctttgagatcttcagcacattcccgcccaccctctaccaggacgatacactcacgctgcaggctgcaggccttgtgcccaaagcagcactgctgctgcgggcacgccgagccccgaagtccagcctgaaattcagtcctggtccctgtcccggtcccggtcccggccccagtcccggtcccggtcccggctccagtccctgtcccggacccagtcccagcccccaataaagcacccgccccctcaaaaaacaaaaaaggggtgggtaaaaacac

SEQ ID NO: 462984 - DNA, 437 bp, Homo sapiens
ccctgctcatctagaacttcatttccattcctgggaccctatcctcctccctcccccccacaactcagcctcggctctaggtctgggctctaaatgactttgtgtgcttggaagtccctgcatcccatgactcggagctgatggccttcatgacgaggaagttgtgggacctggagcagcaggtgaaggcccagactgatgagatactgtccaaggtggggctccaggtgggagagggccaggggctggtctgagaggtggagggactgggctggggaggccaggagttggactagggtgggtgattctaggaaccgtctaccagactgacctgcccagtttgaggaccaggtgtggcctgggcctgatctaggtcctgtgacctgagccgagaggctggggggtcttcccctcagctgagcaggagggtaccgagc

SEQ ID NO: 462985 - DNA, 2325 bp, Homo sapiens
tattttaagaagattgagaacatgtttcgttgggtcgcattattctgcgtgacgaggctcacagaggagaaccccacccttactccaaaggcctttgaaagcagctctggaaagggcagggtttgcttctccctctgcccaacgtctccccaggctgcctgtgccaccttccggtctcacctcctcggagttggggtcaaacgcggagctccagtttctcagcccctcctggagctcaatgatgtccaccacgccgtccccattgcaatccagcacgaagccctgcatccagagcagcatggctgggtccagaggctgcggggaccactcggccacccagccagcaccgcagcactcgccgccgcctcctcgacgcctggctgcgcaaggcagggggtcccggccgtccgccagcttctgcaactgtctagcggagccgccgcagttcggagcccacgcgggccaagccacccgcgcctgcgggctcttgggcgccacggaaaggctgcgccaccttgtgggacctctggccgaggcgccacgcgacagttgagacgccagatgtgagttgaggtgccagacgtgagttgaggtgccagacgtggcggcgttgggtacccaggaccctcggacgggtctgctgcggcttgctgggggtccactccagaccctgttcgcctgggtatcaccagtggagtttgcagaacagcaaagattgctgcttgctccttcctccagaagcttcttcccacagtggcatcaacctgattgatgtcagccggaactctcctgcatgaggtgtctggcgacccctgatgggaagtctcacccagtcaagaagcacgggactggaagggggacctccttacggaggcagactgactgtcccttagcagagctggtgcactgtattggaggaataaccctccttgggatcagctggtctcttcagagccagcaggcaggaaagattaagtctgctgaacctcggaccatggccgccgctcccccgaggtgctctgtcccagggagattagagttcttgtctgtaagcccctgactgtagctactggaattcctgcagggatgccctccaggtgaggagggatggcttcgggtcccacctaggaagcagtctggccacgatctgcaacagccactttgctgcgttgtggggaattccacccagtccaaacctcctagtctccttagcactgtcaggggaaaacctccaactaaagcctcagtaatgacggtcgcccctccccctgggaactgagttgtcccaggcggactccagactgctgtgccggcagcggggatttcaagccagtggttcttagcttgcggggtttccgtgggagtgggaccctctgagcgagaccacttggctccctggctacagccccctttccacagaagtggacatttctcctgcctcactggagttccaggtgctgccggagtatgtaaaaattcctgcagctcagtgcctgcccaaacagccgccgacgggagcagctgtcattggtctgcccagttttgtatttgagacccagggcactggtggttgtaggctcccgaggggatctgctgatctgtggattgcaaaaatctgtgggaaaagcttagtacccttggtgggtagcactgtccctcaccacttcccttggctggggagggaggtccccctgccctgtgcagttcctgggtgaagcaataccctgcttcttctcgctctctgtgggtcatgccgaccatctagtcagtcccagtgagatgaactgggtatctcagttggaaatgcagaaatcacccacattcctcgttcctctcgctggcagctgcagaccagagctgcttctagtcggcagtcttggcccctccccgccgaggtaagtttaataagtcttctaaatttgtccttgccataatgatcagtgatgatctgtcttttaataagttaaatgctttccagacttcaagactctcacccacatcaaaaataaaattatatatcggccatattaccaggattttagaatgttgtattttatcctctaattataggtcaaataactaaggtagaaaggagtaaagcaacttccatgtatgtagtgaggatgttggggggtctgggactaaaattctgccttgggattcccaagaggttggtgattatgatttttgtactcttagacacaaaataaaataacattctgttttgttcctctgcttaccctattcagttctctaaactacaaaatctctgcttatcaaaataagttggattgtcaatttgttgagctcagcaaatgcatttcc

SEQ ID NO: 462986 - DNA, 1460 bp, Homo sapiens
ccacctgttcagctccgccctgctggacccagtgacgttggtctgtccttacgcagacctggccggaggctggggctccttccggggctgccatgttctctcttccatccctcccctcctggctccccggcctcccctccctcgagtggggctctagcctccttgactccctcctgcaaggcctgatcggggcccttggagtcttggtcctgaacagcctcctgaaagtttacttcttcgtgggctgtgccaatgacccgcagcggcgacccgaaaaggagcggcttcgggcccagtgggcctccctggaaacggtgcacctggcagggctggccctgtttctgacggtcgtggggtcccgggtggctgccctcgtggtgctcgagttctccctccgggccgtgtccacgctgctgtccctgggcaagggctcccagggtgccgccgagaggctgcagctctacctgctgtgccagtactcgctgggctgcgggctgacctgtggcctgagcttcctgcaggagggcgcccctcaccgcacgctgaacctgctgctgagcctcgggctggccacgctgctgggcctgggtgcccggcgcctccaccgccacgtctgccgcctctacgagctgcacagcagccagcgctactgtggggtgtgcctgggcctgctggcccatgcacatggcctcccccagctgctgggccgtgccctggccatagcctttgccgtgggtgacctggcagctgtggccctcatcaaccaggacttcctgaccacctcggaggccatgcggttctggacaccgctcaccatctgctacacgctgctggtcatctacatgcaggaggagcagcggcagcaccccggcctgcagagccaggtgcagacggtgctggtgcgcatgggcggcctcttcgtgctgctgctgactgtgggtcgctggctggacctgctgggcatccttgtctccctactgggcgagctctggtgtctcgtgggcgtccgcaccctgcttgacctctgccagatacaggattttccatcccagaggcctccagtgtcaacaccaagccagcccctgccctcggcaccccagtcccagagttcggccccctcttgacctgcctcagggaggatctggagtctgtctcaagcccactagcctgatctccgaggccttgaccccagggcgatgcctggaggcagagtggcagagctggcctcctgcccagagctcagcacaggccctgggagccccgagaagggaaggcaggatttggggatgggagcctctggagaggggacacctggggacccctggttgaaccctctttttcttggggtgggcaatgatgcagcctctcagacctgccttcctgggcaggggtgggggtgcatcctcaggagggctccccctttactggtctcccttcccttctccatgaacaataaagac

SEQ ID NO: 462987 - DNA, 1732 bp, Homo sapiens
acaattcttggaagaggagaactggacgttgtgaacagagttagctggtaaatgtcctcttaaaagatccaaaaaatgagacttctagcaaagattatttgccttatgttatgggctatttgtgtagcagaagattgcaatgaacttcctccaagaagaaatacagaaattctgacaggttcctggtctgaccaaacatatccagaaggcacccaggctatctataaatgccgccctggatatagatctcttggaaatataataatggtatgcaggaagggagaatgggttgctcttaatccattaaggaaatgtcagaaaaggccctgtggacatcctggagatactccttttggtacttttacccttacaggaggaaatgtgtttgaatatggtgtaaaagctgtgtatacatgtaatgaggggtatcaattgctaggtgagattaattaccgtgaatgtgacacagatggatggaccaatgatattcctatatgtgaagttgtgaagtgtttaccagtgacagcaccagagaatggaaaaattgtcagtagtgcaatggaaccagatcgggaataccattttggacaagcagtacggtttgtatgtaactcaggctacaagattgaaggagatgaagaaatgcattgttcagacgatggtttttggagtaaagagaaaccaaagtgtgtggaaatttcatgcaaatccccagatgttataaatggatctcctatatctcagaagattatttataaggagaatgaacgatttcaatataaatgtgacatgggttatgaatacagtgaaagaggagatgctgtatgcactgaatctggatggcgtccgttgccttcatgtgaagaaaaatcatgtgataatccttatattccaaatggtgactactcacctttaaggattaaacacagaactggagatgaaatcacgtaccagtgtagaaatggtttttatcctgcaacccggggaaatacagcaaaatgcacaagtactggctggatacctgctccgagatgtacctacattaaacatggaggtctatatcatgagaatatgcgtagaccatactttccagtagctgtaggaaaatattactcctattactgtgatgaacattttgagactccgtcaggaagttactgggatcacattcattgcacacaagatggatggtcgccagcagtaccatgcctcagaaaatgttattttccttatttggaaaatggatataatcaaaatcatggaagaaagtttgtacagggtaaatctatagacgttgcctgccatcctggctacgctcttccaaaagcgcagaccacagttacatgtatggagaatggctggtctcctactcccagatgcatccgtgtcagtaagtacactactctgaaatcctagcatgttcatgtctttctaagtaacatagatgacattctaagactcatctatattaattgtggcaaaatgtttatgtcaccttgttttaccaatggacctatttagtttttggtttttcaactgtgtataaatgaatatacaaatttcttgataagtacatagtaaaataaattctcctattaatgggcattagtcaagaatacagtaaaagaatttgaacacaatacttgttggttaaatgaagtcgtattgaagcggcatcattgtctgggtaaatatctgaggttcgttatctcacaccaagaagattaaggac

SEQ ID NO: 462988 - DNA, 958 bp, Homo sapiens
tgccaagtgttgaactacagcaaagagagcaacgtaactggtgtgactagaattctccctgcctgatagtcattgggatagccttcttttcaatgtgtgcaattgttggactcattatcggtttgcatcgcagaaacagagaaacaccaccttggtaaccagtgctgctgtgaggtgagaaaagaacaggacagaactgaagtaacaaccagctctcacagtgagtgattcacatcagcgtaaagtcaagccaagcccctgccaaacaccattctaccctctgcctctgagacagcaagatagagcttaagtagcaaccagctcactcacagtgggtgagtcacatcagcagcatcaagacaagacaaggatgtgtggagtccccctgccatctgagtgaccactcttgcaggaccaggcatcaccatggcctggaaaaaccagcctcagtgccctcagtattttttggttgctccttccctggagtccttcacagcaccagaaactgactcttcctggctccagttctcttctagatcaaagccccacaacctcccagcaacctgtgcatcaataaaggctgccttgctccctgtctacagtgagcagtatgtgcctcccagcctgaagccctcttctgcttcaagaaagtacctatgcagttctctcctgcttctgaacccactgttacaagcctatggacagggagtgagtggcctgtgctcacaacaggtgcacggtccaccactctgcctctggcatccagagacactcaccccagtggtctccatgagttgtgggtctattgaaatagagaggacattcattgcgtccttccacccccggaacctcagtcagttcatgcaaaaataacaaaacctacctgtgttcactgaattactatttagtaccaggccctgtgctagggacatagcatacctcacttctaatccttatt

SEQ ID NO: 462989 - DNA, 685 bp, Homo sapiens
ctcaatagatgttagctattactgtaatcaccgcgagaccagttaatgagagagttcttccttatccttactctatattgaatacaatttgttgcacttcgaaatatctggataaggctatagttgttgtcgtcaccgagaatgcaggagtggcaaagagaaaaatcatgcaaaggcttgctgatagcgttcacagtgacagcccgaaagtgtctactgcagatatttcatcaaataaggatgatgaagaaaactctgtgctcgatatggttgtgttgttttctagcagtgacaagttcactttgaatcaggtgtgtttggtgcagacactgtggagcaacatctgcaggtctaagatgtgaatggcagaacaattacacacagtgcgctccttgtgcaagtttatcttcctgtccagtctgctattgaaactatagagaagaagatcttattctgcaatgaagacaatgtgataggtattgtgctattttttcatctttttaaagcttttctctttgaaatgtagcaaaaaaaaaaaaaggaaaatagcttttccttaatcacaagttttagtattttatagtgtttagtatataaagctttcacttccttcattaaatttgtttctcggtgttttattctttttgatgttattttaagtggaaatgttttcttgatttttttt

SEQ ID NO: 462990 - DNA, 2499 bp, Homo sapiens
tttgcctttcttctccccagtccctggccccacctcttctgccacaaacgtcagcatggtggtatcagccggccctttgtccagcgagaaggcagagatgaacattctagaaatcaatgagaaattgcacccccagctggcagagaagaaacagcagttcagaaacctcaaagagaaatgttttctaactcaactggccggcttcctggccaaccagcagaacaaatacaaatatgaagagtgcaaagatctcataaaatctatgctgaggaatgagcgacagttcaaggaggagaagcttgcagagcagctcaagcaagctgaggagctcaggcaatataaagtcctggttcacactcaggaacgagagctgacccagttaagggagaagttgcgggaagggagagatgcctcccgctcattgaatgagcatctccaggccctcctcactccggatgagccggacaagtcccaggggcaggacctccaagaacagctggctgaggggtgtagactggcacagcaccttgtccaaaagctcagcccagaaaatgacaacgatgacgatgaagatgttcaagttgaggtggctgagaaagtgcagaaatcgtctgcccccagggagatgcagaaggctgaagaaaaggaagtccctgaggactcactggaggaatgtgccatcacttattcaaatagccatggcccttatgactccaaccagccacataggaaaaccaaaatcacatttgaggaagacaaagtcgactcagctctcattggctcatcctctcatgttgaatgggaggatgctgtacacattattccagaaaatgaaagtgatgatgaggaagaggaagaaaaagggccagtgtctcccagctcagagaagtttgttattaccgactttctgaagcctacttctgtcagctcatcaaagtcattctccatcctgctttgttccattgctggcgaggagctgcgatcctttggaggagaagggatgaatctgcaggagtctgaagaggaggaagtcccccaggagtcctgggatgaaggttattcgactctctcaattcctcctgaaatgttggcctcgtacaagtcttacagcagcacatttcactcattagaggaacagcaagtctgcatggctgttgacataggcagtgagtactccattgtgaaggtgataaagctccagttcatggcccagtctcatgccatgcccgtgccaacctggactgactgtcacgatattgaactcaaggcaggacatcggtgggatcaagtgaaaaaggaggaccaagaggcaacaggtcacaggctcagcagggagctgctggatgagaaagggcctgaagtcttgcaggactcactggatagatgttattcaactccttcaggttgccttgaactgactgactcatgccagccctacagaagtgccttttacatattggagcaacagcgtgttggcttggctgttgacatggatgaaattgaaaagtaccaagaagtggaagaagaccaagacccatcatgccccaggctcagcagggagctgctggatgagaaagagcctgaagtcttgcaggactcactggatagatgttattcgactccttcaggttatcttgaactgcctgacttaggccagccctacagcagtgctgtttactcattggaggaacagtaccttggcttggttcttgacgtggacagaattaaaaaggaccaagaagaggaagaagaccaaggcccaccatgccccaggctcagcagggagctgctggaggtagtagagcctgaagtcttgcaggactcactggatagatgttattcaactccttccagttgtcttgaacagcctgactcctgccagccgtatggaagttccttttatgcattggaggaaaaacatgttggcttttctcttgacgtgggagaaattgaaaagaaggggaaggggaagataagaaggggaagaagatcaaagaagaaaagaagaaggggaagaaaagaaggggaagaagatcaaaacccaccatgccccaggctcaacggcgtgctgatggaagtggaagagcctgaagtcttacaggactcactggatagatgttattcgactccatcaatgtactgtgaactacgtgactcattccagcactacagaagtgtgttttactcatttgaggaacagcacatcagctttgcccttgacatggacaataggttctttactttgacggtgacaagtctctatctggtcttccagatgggagtcatattcccacaataagcagcccttactaagccgagaggtgtcattcctgcaggcaggacctataggcgcctgaagatttgaatgaaactatagttccatttggaagcccagacataggatgggtcagtgggcatggctctattcctattctcagagcatgccagtggcaacctgtgctcagtctgaagacaatggacccacgttaggtgtgacac

SEQ ID NO: 462991 - DNA, 1499 bp, Homo sapiens
caccagcccagccagaagcaagtcccagcccccagccctcccctggcctaccttttggggcccttctctgaaccaggctcccctgtcctgcaactctgtcattcacagggatgatccaggctctggctggattctttacctactttgtaatcctggctgagaatggttttaggcctgttgatctgctgggcatccgcctccactgggaagataaatacttgaatgacctggaggacagctacggacagcagtggacctatgagcaacgaaaagttgtggagttcacatgccaaacggccttttttgtcaccatcgtggttgtgcagtgggcggatctcatcatctccaagactcgccgcaactcacttttccagcagggcatgagaaacaaagtcttaatatttgggatcctggaggagacactcttggctgcatttctgtcctacactccaggcatggacgtggccctgcgaatgtacccactcaagataacctggtggctctgtgccattccctacagtattctcatcttcgtctatgatgaaatcagaaaactcctcatccgtcagcacccggatggctgggtggaaagggagacgtactactaaactcagcagatgaagagcttcatgtgacacaggggtgttgtgagagctgggatggggccagagattataagtttgacacaacatctgagacactaggatgaattatcttggatgagaaagatgggcaatcctgggctggcttgagggaatcatgggcagaggatgaggtgggctgaagggaagcccagcctgcatctagctggagccccgcagggaggggcatggtcctgctgaatcccgtagccagtctagacagtaaatgtctggaaaagccctcaccagctggatgtgtcaaatctgatcttgggggagtggggattactgtgaagctccctccacaggtcttcatgatgaccaggctggggaagtgttttaaggaccagagtcaaggctgggataggatcagtatcaagcatccttgccctttaaagtcactctccgagccactggacagcaaggacagggcaaatgactgcctcaaaattccagctgagatcagagaaatggaaggtgggggagagaggagcagctaagtcacacgtgggaagagggtccacagcatccgcacagggggtaggtggggtggagtcatctgaccccaccttgcagttcctgagaccagcttgcagaccacagcgctgtggtgctagaagagatcagattgcatcagtgaaaagcctgaagtccagagaggttaaatgacttgggaatggccatgtgctgagtgttgtccctcatctgagaaagggacaggtaggaaggacagtctccaggcatactggtggtccctgccctctaccctcggtcatcagggctcctcaaccccattctggccctcggcctgttttctctggtgtagccttgagatagaggctgtaacaagactttctg

SEQ ID NO: 462992 - DNA, 2160 bp, Homo sapiens
acagaaatcaactgacaaatggcagattcataggagaaaagacatacacatttatttgatcatagttttacataacagaggagccttcagatgagaatccaaagatacaagagaaacttcccatttttatgcttaggttcaaagccatatggacagccatgtagaaatatgattgaacatgaagggcatgatctaatactgatggactgagtgaagaagcccagcaagacccatcgtgagattctttttggcctctctgagcagtgttccttttttcttggtatgcaataagacctctctggaatggaggtcttatgatctacaatccagtaaggtggccttttgccccacccccagcatacaatgatggaaatagccaatgtgagttctccagaagtctttgtcctcctgggcttctccacacgaccctcactagaaactgtcctcttcatagttgtcttgagtttttacatggtatcgatcttgggcaatggcatcatcattctggtctcccatacagatgtgcacctccacacacctatgtacttctttcttgccaacctccccttcctggacatgagcttcaccacgagcattgtcccacagctcctggctaacctctggggaccacagaaaaccataagctatggagggtgtgtggtccagttctatatctcccattggctgggggcaaccgagtgtgtcctgctggccaccatgtcctatgaccgctacgctgccatctgcaggccactccattacactgtcattatgcatccacagctttgccttgggctagctttggcctcctggctggggggtctgaccaccagcatggtgggctccacgctcaccatgctcctaccgctgtgtgggaacaattgcatcgaccacttcttttgcgagatgcccctcattatgcaactggcttgtgtggataccagcctcaatgagatggagatgtacctggccagctttgtctttgttgtcctgcctctggggctcatcctggtctcttacggccacattgcccgggccgtgttgaagatcaggtcagcagaagggcggagaaaggcattcaacacctgttcttcccacgtggctgtggtgtctctgttttacgggagcatcatcttcatgtatctccagccagccaagagcacctcccatgagcagggcaagttcatagctctgttctacaccgtagtcactcctgcgctgaacccacttatttacaccctgaggaacacggaggtgaagagcgccctccggcacatggacgctccgtggataataaactttgacgacgctgagagcgcgcggggagaccggagccggcctgttccccagagcccccggagccctcccagccctcaggcctgcgcctggggtgagctgagcccgggactccgccttgcaggctccggaaccctcgctgtggctcccccgctcggcccaggccttgaagccgcggcgaacctcttcctaccctacctcggggacctggtggcagcggcggcctcccccagcctggaccccgccggccgcgggtctcccggcccaaccccaccgacccagaccaagaccgcgccgagccgccgggactcagcgccttcgggtggcggcggtaagcggggaggaaacatggcgccgcccaaatgcgcccggaggccgttaggctgtggagggcgaggaaggcggtccagaggcggccggcaggtccacgtcctgggcgaccgctctgtcgcagttgggcgagacctacctagtcctgacgggtcgtatttccaagacattttcatattctatccattgttttgtgtgcattttattacttctgtatatagaggtaacaacgctaagcttttttgagatgtctgtttcttctagatgttctgaagtacctgatacatgttaaaattagaggtagtaaaatgacacattttgtaaataactttttgttaaaattcataggaaatgttattttgtgggggggggatggcatggtgtttgtggactggttcagggaaggaggggaaaagggaggtgcagagagctctaagccagtgtgcttacagtgaggcgagattcaccattgtttcttatgattgtgcattttgttttacttatctatgtatacagtgtatctaaaggacaaac

SEQ ID NO: 462993 - DNA, 1812 bp, Homo sapiens
tttctgcagctggcttggatttctcccaagaaaatgggatgagtgctctgtgctaggggtccaaaccacgccatggttcctgtggactctccagggcctggagacagcaaagatggcatcccactcttctcactgggagctttgtctcagtcagctctggtccacagcaggtcaagaaatgccatccaagagtcaagtcttggaatcaggggcctaaagagcccatttagtgctctacccccttcccccactgtggccatgccgggcctaggggttcttcagttagcatgtgatgaatgctgccaggaccgagtcctacccttcaaggcaacagattctcttctggccaagggtgtgtctagaaatgtcatccaggagttaattgatataggagagagtatagctattccagatgaatttaccgaacaagaaaagcagtctggagattggtggaagcgtttggtgtcagcaggaatagctagtgcggttgcacggacatgcacggcacctttagaccgcttgaaatataagaaattgcttagttttgatggtgttcatttaggaattcttgaaagatttatatttggctcattggctggtgtaactgcccagacctgtatttaccccatggaggtactaaagaccagactggctataggtaaaactggagagtattcagggattattgattgtggcaagaagcttctaaaacaagaaggtgtcagatcctttttcaaaggttatactcctaacttgctaggcattgtaccttatgccggcatagatcttgctgtttatgagattttgaagaatttttggctagaaaattatgcaggaaactctgtgaatcctgggataatgattttggtgggatgtagtacattgtctaatacttgtggtcagttagccagtttctctgtgaaccttattagaactcgcatgcaggcttcagccccagtggaaaaaggaaaaacaacttctatgattcagctcattcaagaaatatataccaaagaaggaaaattgggattttacaggggtttcacctcaaacatcataaaggtgcttcctgcagtaggcgttggctgtgtggcctatgagaaagtgaagccactttttggattaacctggaagtgatatataaaattgttgtcattgtaatcacttaattgtaagataatacctgtgttataaagagatgttatcttttcctaagaggaaagaaatgtcagataattgttaaaatattttttcattattacaaaatacataaattaaataataatttttataaagttcttgaataagttaaaatatttaatatccaaagaatactatttacattttctactactctcccttgaatcctaatttaaaatttgttcttgatttgatttgaatgtaacataaaacatttggtcagttataggagtttatctttgaaaacgtttttacatttgaaaacttattttaaaaaagctgagcttgaaaatgctttatacactaacagaaaaatcagtgcatttaaaattgatgttatagcaaataatttggagtctgtttcttttacttaagcaaaatggaaaattggtttctaattccttctatcacattttagatggaataacgataacatctttcttacatctccgggcctttttatttgtaaatgtgaacactgttggttcattttaattcttgatattttcagcttatataaggaagttggcattgataacaaatccaacactggacaaattttatttatcttctggttgaaaacattcaagtgaaagaattttatatattaaa

SEQ ID NO: 462994 - DNA, 927 bp, Homo sapiens
  misc_feature (826)..(826): n is a, c, g, or t
  misc_feature (865)..(865): n is a, c, g, or t
  misc_feature (873)..(873): n is a, c, g, or t
  misc_feature (875)..(875): n is a, c, g, or t
  misc_feature (877)..(877): n is a, c, g, or t
catggatagtgatggatcaatgacagtagactgggatgaatggaagtactactttttactgcatcctgcaacaaatatcactgaaatgattcatttctggaagcattctactggagcatcccgtggcctggaacagagctctggggactggcatccttccactgactttgatgctgatgacagccctgatcgtgtgattcagctggccttaacccgacccacgtgcacgtattcctcagcacatctagagctgaagtcgagagcctctgtgggaacgcttggcagcccatgctgttctaaggctggagcagaatttcttagtctattccaggtagacaggcctgcagggggtccaacccctacaggcccctctgtctggaatagactgctttcatctctgatgttagaaagcagacctgtttcagggtttggggaaggttgttcgatatgaactgggtcctctctaattatttttactgtatgtgtgacttcttcctagaaagaatggaagaatgtttatgttagaacattttatctattctttgtcaattgttgtttgtctgcaattttaaagtagataaaggatagctcaatgtaaatatattcttaataattaactattggttgatgtccactggccatgagatcatattcacttctacatatgatctattacttaggaattatcctgctcctgatgagaaaacagactcagaaagattacaaaattacctaggccacaagtctagtggggagaagacatagcaacttagaaacctagtttcttttgggcttcaaagctaacctcataccattagattggacngacatgacaatactttcgctataatatagtctcagagtnggggtccngntngtgttccaggaaaccggtgtccttatatattccaactctaatgccaacct

SEQ ID NO: 462995 - DNA, 1369 bp, Homo sapiens
cgttttcggcgtgcggggggttgcgccgacacttgaccataaatgtctaaaaatcactcaacttatctacaaacatgcttcatataagaaattgcttagttttgatggtgttcatttaggaattcttgaaagatttatatttggctcattggctggtgtaactgcccagacctgtatttaccccatggaggtactaaagaccagactggctataggtaaaactggagagtattcagggattattgattgtggcaagaagcttctaaaacaagaaggtgtcagatcctttttcaaaggttatactcctaacttgctaggcattgtaccttatgccggcatagatcttgctgtttatgagattttgaagaatttttggctagaaaattatgcaggaaactctgtgaatcctgggataatgattttggtgggatgtagtacattgtctaatacttgtggtcagttagccagtttctctgtgaaccttattagaactcgcatgcaggcttcagccccagtggaaaaaggaaaaacaacttctatgattcagctcattcaagaaatatataccaaagaaggaaaattgggattttacaggggtttcacctcaaacatcataaaggtgcttcctgcagtaggcgttggctgtgtggcctatgagaaagtgaagccactttttggattaacctggaagtgatatataaaattgttgtcattgtaatcacttaattgtaagataatacctgtgttataaagagatgttatcttttcctaagaggaaagaaatgtcagataattgttaaaatattttttcattattacaaaatacataaattaaataataatttttataaagttcttgaataagttaaaatatttaatatccaaagaatactatttacattttctactactctcccttgaatcctaatttaaaatttgttcttgatttgatttgaatgtaacataaaacatttggtcagttataggagtttatctttgaaaacgtttttacatttgaaaacttattttaaaaaagctgagcttgaaaatgctttatacactaacagaaaaatcagtgcatttaaaattgatgttatagcaaataatttggagtctgtttcttttacttaagcaaaatggaaaattggtttctaattccttctatcacattttagatggaataacgataacatctttcttacatctccgggcctttttatttgtaaatgtgaacactgttggttcattttaattcttgatattttcagcttatataaggaagttggcattgataacaaatccaacactggacaaattttatttatcttctggttgaaaacattcaagtgaaagaattttatatattaaa

SEQ ID NO: 462996 - DNA, 1400 bp, Homo sapiens
catggatagtgatggatcaatgacagtagactgggatgaatggaagtactactttttactgcatcctgcaacaaatatcactgaaatgattcatttctggaagcattctactgtataagaaattgcttagttttgatggtgttcatttaggaattcttgaaagatttatatttggctcattggctggtgtaactgcccagacctgtatttaccccatggaggtactaaagaccagactggctataggtaaaactggagagtattcagggattattgattgtggcaagaagcttctaaaacaagaaggtgtcagatcctttttcaaaggttatactcctaacttgctaggcattgtaccttatgccggcatagatcttgctgtttatgagattttgaagaatttttggctagaaaattatgcaggaaactctgtgaatcctgggataatgattttggtgggatgtagtacattgtctaatacttgtggtcagttagccagtttctctgtgaaccttattagaactcgcatgcaggcttcagccccagtggaaaaaggaaaaacaacttctatgattcagctcattcaagaaatatataccaaagaaggaaaattgggattttacaggggtttcacctcaaacatcataaaggtgcttcctgcagtaggcgttggctgtgtggcctatgagaaagtgaagccactttttggattaacctggaagtgatatataaaattgttgtcattgtaatcacttaattgtaagataatacctgtgttataaagagatgttatcttttcctaagaggaaagaaatgtcagataattgttaaaatattttttcattattacaaaatacataaattaaataataatttttataaagttcttgaataagttaaaatatttaatatccaaagaatactatttacattttctactactctcccttgaatcctaatttaaaatttgttcttgatttgatttgaatgtaacataaaacatttggtcagttataggagtttatctttgaaaacgtttttacatttgaaaacttattttaaaaaagctgagcttgaaaatgctttatacactaacagaaaaatcagtgcatttaaaattgatgttatagcaaataatttggagtctgtttcttttacttaagcaaaatggaaaattggtttctaattccttctatcacattttagatggaataacgataacatctttcttacatctccgggcctttttatttgtaaatgtgaacactgttggttcattttaattcttgatattttcagcttatataaggaagttggcattgataacaaatccaacactggacaaattttatttatcttctggttgaaaacattcaagtgaaagaattttatatattaaa

SEQ ID NO: 462997 - DNA, 1323 bp, Homo sapiens
gcaaaagttcaagaggcactcagcctgccaaagagatgcggagcccgcacacccaggtcctgaagagcaagctggaagaggtggtggtgtcctcccaggaccagcagattgtggccctggtgctgacccgtctcaagaaggcccagaggatacgggagctgcagcagcaggcggctaaggcctgggaggagctgaagcgctcggatcagaaggtccagatgaccctggagcgggagcgccggctgctgctgcggcagagccaggagcagtggcaggagaaggagcagcgcaagaccctccagagccctgagcagcgcggcctgcggcgggacagccagaggaagaacgtgcccccgggggaaagccggtggaaggagcaaccagaggaccaggagagcccgcgccaggagaagctggagaaggcgcgcgcccaggcagagcaccgaaaacagtgccaggtgcggcgcctgcgggagcaggagaagatgctacggaacctccgggagcagcacagcctgcagctgcagaggaggctggtggaagcctgtcgcaagaggcacctacatgccgtggagggccagaagaaggtccaggacaccaacctgagctccctcatcaattaccaggcccggaaggtcctcatggactgccaggccaaggctgaggagctccttaggcagctgtccctggaacaaagtttccagcggtcccaggagatacaccagggcctgaggaaggagcggcaacgcgagctgagggagaaggcccagaaggaggaagagcagttgcagcaggccaggtggcgcgcaggggagtcagaggaacagaggaagatgcgcaaaagaattctggtggagctggcggatgagaagatccgacaggccaggagtcacgtgcacaagaccactagggacaaggtgcagcacctccgggagctcaaccacctgagggagaaaaaccaccacatcctgaaactgaaagccgagaaggaggaaaagtgtcacattgagggcatcaaggaggccattaagaaaaaggagcagagggtgcagcacatttcccaagggaaagacccaaacttccaggagttccagaagctccctcaggcctccaggagagaggagagagcgcctcccaacagctcccttgatcagatggtactagaggcccagctccgtgcctgtcagcagaacaggggttactgagaaccaaggacgcctggcttacagtgcgcagccagaaggagatgtggcaatgtgattccttttgtaatctgattataattgaacattgattttaaaaaagcatgtaaaatagctgcaa

SEQ ID NO: 462998 - DNA, 825 bp, Homo sapiens
ccagggggaaaagggacacaggaggcagccgcagagccccagcccctcagttagcagggtgcctactggggccacagtttctacttgtgttcttgatgagccttcccagtctgcaggggagggctcctctgcggatggtcctgtgggtgccatctgagcagcacaaggtagatgcatgcaggaccctgcccccaaggactgagtgtgcacgtggaggcaggcgggcagccgtgggcacacgtgcctcccgtgatgagcaggagctgctggagtcagaccccgagtccattggccgccactttgcttccaacagcagctcagtggcagccgcgatcctggtgcctttcatcgccctcattattgcgggcttcgtgctctatctctacaagcacaggagaagacccaaagttcctttcaatggctatgctggccacgagaacaccaatgttcgggccacatttgagaacccaatgtacgaccgcaacatccagcccacagacatcatggccagcgaggcggagttcacagtcagcacagtgtgcacagcagtatagccacccggcctggccgccaccaccgccaccgagagccccgcctccagcagccgttccccagggggcaggaagtaggctcccctgagcacagtgcccagtgcccatcttcgttcgtctccttgcctgtgtctgctactgctgggactcaggccctcgccctgccgccatctatgccagttaccctggagaggactcctgccgtgtcctgaaaaggcagaaaaggaagaggggctgcagacagaggaagaaagtttatggatttaaaatagca

SEQ ID NO: 462999 - DNA, 637 bp, Homo sapiens
gagatggtcgcatgaccttgagtgagtcaattaacctttctgggcctcattttctgtctgtgtctgtaaatggaaagacttcagctggatcactgtttacccaattgtgctttgtgatgcagatgttaatggatggggtctctggtgaaataagttcagcaaacccaggttcaacacctgttttctcgataggacttcttagagcttctcctgtgcatgatgcatctccagtgcgagaagattctgtatcatttcccaatgccattcactttgtgaaccttgtttggtggaattcctgttactgtttcactggagtccacagtcactacttgagaaactcaaatctaactgatctggaagtctttacaatattctgttctaaagcatgggttgctataagcaaaatcttttgtgaaaaacactgttctaggctccagtttaaataagttctgtgttatggaaaatgggttatgtgaggactttggaatttccttctgtaaaatatcactcaccattcattataattacgtactatgctctaggcattgttctagatgctgggaatatagttgtcaatcaaattctctgctctcttggaacatttatgtgagctgtgggagagataagccaataaaga

SEQ ID NO: 463000 - DNA, 1529 bp, Homo sapiens
aaggggtctttgtgttctcaaccttctgccgcaatcccaagtggaagctctgttggctcgccctctagtcctcttcctgctgagccagtcttcaactaggaatcacaccagagtcaccaggacaaggaaagctaggcccatctgaaggagattctgggcagtgtggtctcagagggcacagtctttctggagtcccgtctctggttaaaaggtttggaaggctcgccacatgaaggaattactgctggatgagagatgctggagctttggactgaccagggactctggccagacctaggctggcccagggacttaaggcccaagggaacataaatgaacaagtgctgttcaagggagccactcacccatctttttctgtggattcgttcctgctgggaacataccaaacacgaaggaaaggggaaactatcttcattttagataaagaactgcacgacttaaactttatttctccataccattctctttgatcttaggacctgaaagatgaaaagaggccatccatgggaacgctggcaggaggagcattgtaggcagaggcagtgcaagtacaaaggccctgcaaggcaaagggcttgccatattatggaaggactgacagtagccctgtacagccacggcgtcagaccctgggaaagtatccagtatcagtcccagtcattgcttaatcatactgggggtcagtcccagtcattgcttaatcatactgggggtcagtcccagtcattgcttaatcatactgggggttcatccaaatgggaggcaatggcaaaagactggaaggtaggagaaagggtgcttcaggtgatatctccagcagtcactgtgcctcctccgtggctgcagctcctactggacattccttccctccggggtcctagcacccactggcagtcccagttgtggtgctagttcccttgattcacttgacaattcattgtggaatcgtgcttctgtattttcaccttttgatcttactgcttctcttttctactaaaatggagaatttcttaaagataggaactatatattatttctctttttatctttagcccgtagcatataatagaggaccactcaatataaagactcaataaattattatattcaaagaaatgacagtaattattcataattagtatctatgaatacattgcacctaggggcactatagtattttagagcttttgattgaaatacaaactgagaatacatgtatttttgtttaatgatatttatcaacattattgtttgtaggttatttctattatgcctataaattatgtttttacattttagaaattcaaaaaaactttatgaagatattatttattagcaaaacatccattcaaagattaatgttttgttattttggacatagatatcaaacctaggtgaatgttaatttgtgactgatagtatgacaacatacacatgaaccgatgtttgacacttgctgtgtctttgataagtcaatataatttgagaggcagtattatgtaatggtg

SEQ ID NO: 463001 - DNA, 1429 bp, Homo sapiens
tttgcagatgtttaaagctgattgctcttttaagggattttcatgggttgctctgagactcttccttttccccacctttctgcagccttaggtatccagcagcagttcatctccagctttcctgtattgaggctcctcactcctgcaggaggtcattataaacacgggctaagcaacaccacacaactccctttccctcatgggccacatctggtccataggaaacatgtttgtccaggaaaactctgggaatgcagccccttccccataactcagcactctggatttagatttctcaagcatgaaccagtcagaagtcccctgtgtccctcaaactttagaagacacatattaagctccacggatggttccataaaagatagaattcttggaacccaatacttccctccacagaaatccttttcaaaagtcttcctgatctccaattcagcatccctttacgccatcagtgtgggtaatcatttaagaaatgaggtgattattcaagtagaaagaaaaacatcgctaacaatgttggcagccatctttggagaccacttgccgtaactgcatggaatgccaacccccaaaggatgcttttgtgaggacaaaagtgagcaggtggtgacggtaaaagatacagagattcctccctggagagcaatagaaatcaggaggcagtggtctcgatgaaaaccagcagaagtgaatagggacccatgtactagttgaatccatgtatttccaacatggtgcgacgtgtatgtggtagcagtggacccaaacaccacagaaaacttggggcagccacacaatggtgttatttcagtctataacaatgttccataaccacctttttttttacttaatatgtcatacattttccatgttattaaatgtctatgtgtgatttaaatcatttatattatgttaaataaagcatatagattctgagataagtactaatactttcattttaaagatgggcaaactgatgtgcagaaagtttaaaaacgtctaccattcccacaactagtaagtgaggggctcatattgaaatccagtcggggctgactccaaaagccaggattttctcactacactatgttgatcctcagggcataaaaaaaccaggcccagcacataccctctacttttgatatctggcagaaggcctggggagcgaggtgtctgtatgagaaagcagagtggtcgaaatacagcccctaccaccatcttcttgaaatcgttctattattttgcagttaacaagctgatggcaatttaaattcagttcaggtgtttaaatactagacactgggaacacacagataaacagggatgccagtttaaacagctgtatctgcttcaacacatttcagaagcaggagcaacagggagaccaaattaaggcctggcaccttgtgtg

SEQ ID NO: 463002 - DNA, 479 bp, Homo sapiens
tttgcattgagagcctaggctcaactttcctaggctccctggtacagccctccctttccacccctcaggctgtttccctccctgttttcctcagaagaagagttccaaacaaaagatctactaccctgagaagcggtgaagtgctcctggggcccaccaaggccacacaagtcaaggagtggatggccttgccccagctatggctcagatcacctttgcaggatgacatcttgttgggagatggtcatcagagacagggccatggaagacgctgtcaggaggaggcacagaggaaaggctatgggagcacaaagcaagaaagtggccttctgcaagccaggaagagaggcctccccagaaaccaactctaccagcacattgatcttggacttttggcctctagaacattgagaaaataaaagtctgctgttaaaccacccaacctttggtatctttctatggcagcctgagctgactaa

SEQ ID NO: 463003 - DNA, 349 bp, Homo sapiens
acgcgtgaagccgtgttcacgaggcgagcagcgaagacagagactcacgcacagatctggattttcatctggtattggattccttctgcccggaagactcctttgacgtttctgtagtgtgggtcagctggtagtgaattcggtcagcttatgaactcaaaagaggtgtaggaggagagaagctcaattatcaccctggtctcctggagtatcccaggcacagtcccaagagttcagcttttcatactcgagttcctgcgtacagtgtgagcctgtggaaagctctcgcctcgcttgatgatgtcttctctttgcctccctgatgcttgggtcctcccataccctttct

SEQ ID NO: 463004 - DNA, 1079 bp, Homo sapiens
tctctctctctctctctctctctctctctctctctctcgacggaatctggattttcatctggtattggattccttctgcccggaagactcctttgacgtttctgtagtgtgggtcagctggtagtgaattcggtcagcttatgaactcaaaagaggtgtaggaggagagaagctcaattatcaccctggtctcctggagtatcccaggcacagtcccaagagttcagcttttcatactcgagttcctgggtcctgaaggcctttttggggaaagtactgatgttcgtgtcaaggttgggaagaaagggtttgggaggaaccaagcaacagggaggcaaagagaagacatcaacaagcgaggcaagaactttccacaggctcacactggatacaggaccagagacaagaagctggagactgtctttgaagcagccagtgggtctgcttggtctctgcgtttctacgtatttggccctaaaaccggcgcgacttttatcgtctctgctgtcggatccctgcaatacaaagaggcctgaggaggacactctgaagaggaaagccccgcgatcatccggtttcacccctgttttcatctactcttttcctcagcgaagcctatatgggttcccgatgtcacatcgcagctaccgcattggagggttaagagccgctgacaaatctctttcgggaagggaagaagagttccaaacaaaagatctactaccctgagaagcggtgaagtgctcctggggcccaccaaggccacacaagtcaaggagtggatggccttgccccagctatggctcagatcacctttgcaggatgacatcttgttgggagatggtcatcagagacagggccatggaagacgctgtcaggaggaggcacagaggaaaggctatgggagcacaaagcaagaaagtggccttctgcaagccaggaagagaggcctccccagaaaccaactctaccagcacattgatcttggacttttggcctctagaacattgagaaaataaaagtctgctgttaaaccacccaacctttggtatctttctatggcagcctgagctgactaa

SEQ ID NO: 463005 - DNA, 9701 bp, Homo sapiens
agccgccgccgccgccgccgcctcgggaagcttgccacccgctaggagggaagatgaaggagatttgcaggatctgtgcccgagagctgtgtggaaaccagcggcgctggatcttccacacggcgtccaagctcaatctccaggttctgctttcgcacgtcttgggcaaggatgtcccccccgatggcaaagccgagttcgcttgcagcaagtgtgctttcatgcttgatcgaatctatcgattcgacacagttattgcccggattgaagcgctttctattgagcgcttgcaaaagctgctactggagaaggatcgcctcaagttctgcattgccagtatgtatcggaagaataacgatgactctggcgtggagatcaaggcggggaatgggacggttgacatgtccgtcttacccgatgcgagatactctacactgctccaggaggacttcgcctattcagggtttgagtgctgggtggagaatgaggatcagatccaggagccacacagctgccatggttcagaaggccctggaaaccgacccaggagatgccgtggttgtgccgctttgcgggttgctgattctgactatgaagccatttgtaaggtacctcgaaaggtggccagaagtatctcctgcggcccttctagcaggtggtcgaccagcatttgcactgaagaaccagcgttgtctgaggttgggccacccgacttagcaagcacaaaggtacccccagatggagaaagcatggaggaagagacgcctggttcctctgtggaatctttggatgcaagcgtccaggctagccctccacaacaggaagatgaggagactgagagaagtgcaaaggaacttggaaagtgtgactgttgttcagatgatcaggctccgcagcatgggtgtaatcacaagctggaattagctcttagcatgattaaaggtcttgattataagcccatccagagcccccgagggagcaggcttccgattccagtgaaatccagcctacctggagccaagcctggccctagcatgacagatggagttagttccggtttccttaacaggtctttgaaacccctttacaagacacctgtgagttatcccttggagctttcagacctgcaggagctgtgggatgatctctgtgaagattatttgcctctccgggtccagcccatgactgaagagttgctgaaacaacaaaagctgaattcacatgagaccactataactcagcagtctgtatctgattcccacttggcagaactccaggaaaaaatccagcaaacagaggccaccaacaagattcttcaagagaaacttaatgaaatgagctatgaactaaagtgtgctcaggagttgtctcaaaagcaagatggtacaattcagaacctcaaggaaactctgaaaagcagggaacgtgagactgaggagttgtaccaggtaattgaaggtcaaaatgacacaatggcaaagcttcgagaaatgctgcaccaaagccagcttggacaacttcacagctcagagggtacttctccagctcagcaacaggtagctctgcttgatcttcagagtgctttattctgcagccaacttgaaatacagaagctccagagggtggtacgacagaaagagcgccaactggctgatgccaaacaatgtgtgcaatttgtagaggctgcagcacacgagagtgaacagcagaaagaggcttcttggaaacataaccaggaattgcgaaaagccttgcagcagctacaagaagtattgcagaataagagccaacagcttcgtgcctgggaggctgaaaaatacaatgagattcgaacccaggaacaaaacatccagcacctaaaccatagtctgagtcacaaggagcagttgcttcaggaatttcgggagctcctacagtatcgagataactcagacaaaacccttgaagcaaatgaaatgttgcttgagaaacttcgccagcgaatacgtgataaagctgttgctctggagcgggctatagatgaaaaattctctgctctagaagagaaagaaaaagaactgcgccagcttcgtcttgctggttcaatgcagataccttccagagatgatagcacttcattgactgccaaagaggatgtcagcatacccagatccacattaggagacttggacacagttgcagggctggaaaaagaactgagtaatgccaaagaggaacttgaactcatggctaaaaaagaaagagaaagtcagccctgccggctagggagaatttcttccccatgtatatggagaaaggaagaaatcagagtcagcgggcaaaaagagtataatttaacctgctgtctggaagccatctgtgaagggaatcacttttcttttctggacttgtttccaggtgcagctgcaggggatgacaccgaagatacaagcactgagttcactgacagtattgaggaggaggctgcacaccatagtcaccagcaagaaaatggtcccttaaaggtagattttgagcttctccttgttatgtccttggaaggtaaatttttgcctgacaccaagttcccttcctactccaagcattcatatgcttttcctaacagacacatcccaccttgtctttcttccaagcttgtcaaggtggctttggagaaaagtctggcaactgtggagacccagaacccatctttttcccctccttctccgatgggaggggacagtaacaggtgtcttcaggaagaaatgctccacctgagggctgagatccaccagcacttagaagagaagaggaaagctgaggaggaactgaaggagctaaaggctcaaattgaggaagcaggattctcctcagtgtcccacatcaggaacaccatgctgagcctttgccttgagaatgcggagctgaaagagcagatgggagaaacaatgtctgatggatgggagatcgaggaagacaaggagaagggcgaggtgatggttgagactgtggtaaccaaagagggtctgagtgagagtagccttcaggctgagttcagaaagctccagggaaaactgaagaatgcccacaatatcatcaacctcctcaaagaacaacttgtgctgagtagcaaggaagggaatagtaaacttactccagagctccttgtgcatctgaccagcaccatcgaaagaataaacacagaactggttggttcccctgggaagcaccaacaccaagaggaggggaatgtgactgtgaggcctttccccagaccccagagccttgaccttggggctaccttcacagtggatgcccaccaagctaacgagctggagaaatacagagttatgcttagtgaatccttggtgaagcaggacagcaagcagatccaggtggacttccaggacctgggctatgagacttgtggccgaagcgagaatgaggctgaacgggaggaaaccaccagtcctgagtgtgaggagcacaacagcctcaaggaaatggtcctgatggaggggctgtgctctgagcagggacgccggggctcaacactggctagttcctctgagaggaagcccttggagaaccagctagggaagcaggaagagttccgggtatatggaaagtcagaaaacatcttggtcctacgaaaggacatcgaagatctgaaggcccagctgcagaatgccaacaaggtcattcaaaacctcaagagccgggtccggtccctctcagttacaagtgattattcgtctagtctggaaagaccccggaagctgagagctgttggcaccttggaggggtcttcacctcatagtgtccctgatgaggatgaggggtggctgtctgatggcactggggctttctactctccagggcttcaggccaaaaaggacctggagagtctcatccagagagtatcccagctggaggcccagctcccagaaaatggactagaagagaagctggctgaggagctgagatcagcctcgtggcctgggaaatatgattccctgattcaggatcaggcccgggaactgtcttacctacggcaaaaaatacgagaagggagaggtatttgttatcttatcacccagcatgcaaaagatacagtaaaatcttttgaggatctcctaaggagcaatgacattgactactacctgggacagagcttccgggagcaactcgcccagggaagccagctgacagagaggctcaccagcaaactcagcaccaaggatcataaaagtgagaaagatcaagctggacttgagccactggccctcaggctcagcagggagctgcaggagaaggagaaagtgattgaagtcctgcaggccaagctggatgctcggtccctcacaccctccagcagccgtgccttgtctgactcccaccgctctcccagcagcacctctttcctgtctgatgagctggaagcctgctctgacatggacatagtcagcgagtacacacactatgaagagaagaaagcttctcccagtcactcagattccatccatcattcgagtcattctgctgtgttgtcttctaaaccatcatcaaccagtgcatctcagggggctaaggccgaatccaacagcaaccccatcagcttgccaactccccagaatacccccaaggaggccaaccaagcccattcaggtaccagcactgttcctcctgcttccacagctacattgctgagcaacgacttggaagccgactcttcctactacctcaactctgcccagcctcactctcctccaaggggcaccatagaactgggaagaatcctagagcctgggtacctgggcagcagtggcaagtgggatgtgatgaggcctcagaaagggagtgtatctggggacctatcctcaggctcctctgtgtaccagcttaactccaaacccacaggggctgacctgctggaagagcatcttggtgaaatctggaacctgcgccagcgcctggaggagtccatctgcatcaatgactgcctacgggagcaactggaacaccggctgacctctactgctcgtggaaggggatccacttctaacttctacagtcagggcctggagtccatacctcagctctgcaatgagaacagagtcctcagggaagaaaatcgaagacttcaggctcaactgagtcatgtttccagagagcactcccaggaaacagaaagcctgagggaggctctgctgtcctctcgatcccaccttcaagagctggaaaaggagctggagcaccagaaggtggaaaggcagcagcttttggaagacttgagggagaagcagcaagaggtcttgcatttcagggaggaacgtctttccctccaggaaaacgactccaggtaagaggggacccattgacagagaaggtagcattcttcattcttacattcattcttacattacaagaggaagggatattggcaagacaattgatgtcctcttttggaaacctaaatgttccctctgctattcctgatttttgtgtgtcagtggggtggggggaggggcgctttgagcagaagaaaggacttctctgggaatgccttgtcactcccaagttgagagagtaaaactctgttatagaagtcttcagtatatcagagacatgaaaaaagaagggttcccatgcttccaattagatataggacattagtctcaccatcacctaggaagcttctatactggctgtgatgcttggtcccagcataagccctgtaactgcttgtcagaatgcaaacagcactgtaggaacagtaaggagactgtgctggtgtgtctgttctgctctgaactaatgtaggtaatggtgtgttttcaagcaaagttacttgacctccctcagcctccatttccatatctgcaaaataaaagtgatagtcttcatgaccccctgagttgacatctggggctcagatgtaaccctaactgtaaccctttatgaccctctgagttgacatctggctctcagcttgttgctctggtgtggctgagtagctctgccatctcagtgggccttgcctctccctggtcagactgcagcacaagctggttctcctgcagcaacagtgtgaagagaaacagcagctctttgagtccctccagtcagagctacaaatctacgaggcactttatggcaattccaagaaggggctgaaaggtatgtgttcttctcccctcaccccatgagctttttgcccttgcataggatgctagtgaggtctttcctttgggagttgtggagatcatgggaagctacagagttctgtcgcagaaacccccacccgagcctggggctcccagtaggagctctcaaacacaaagcccaacgggacaggttggtggcacgagcaagatccggcctgatcattcctaattactttaagaaaatctagacattcctatcaatgtctagattgtaacatttttgaaagcaaaagaactgtcctaatgatatcatcatttgaaaaggcctttaatattgttggtaatacatactgacaacccattcagcccaatgtagcaggcagtctgctcccaccctgaccctttccgtagtgacatctggctctcagcttattgccctttcatgtaattttcataaatcctgatttagtttcctgattttctaaagagaaggtgaactggaatttgaagaaatacaggggcttaccaggctgggcgaatagcttaagtacaaagtcatggtgagtgttgagtcagtggggaccagcctgcccacaggagaaaattaaaagacacaaaaacaaaaacaaaaaaaccttatagaaataccactaataggacctaaatttcaatcctggatttaaatattaaggacatttattgaagactttgctgcctgctgaaataataatctaatatttgagaattttgatatatttcttcattctttaaatggagaagggtattcaaaacataatgtgaataagtcacagcaggctggaacagaggacgacatcaatgtcgtgaaatttagcaaagataaaaagcaaaatcctgagctcgattaaaaatatcagtggtagaaatataggttgagggtagaaatataggacaggcagccattcatggacatgagggtttggggtttggtagaaacatgttcacacaagtaaggtgtaggacaaaggttgctagaaatgccagctcaaactggaactacagtagtgactcatttcaaagctacaaccactaaagctccataatctcttatctgtaatttcaaaatccagtaagatttccaaattaaatttttcaaatactcatttagtgacaaaatctagatgatctgacatgaggatattcataagtctttatttatctatttagaatattcacatagctcattgcggaaatagttatatttggagcaaactgaggatatcattatgaataacagaagattcagttgtgttgtcattttctttttcaggcttgggtttggatacttctccagtaatgaagacccctcccaagctagagggtgatgctactgatggctcctttgccaataagcatggccgccatgtcattggccacattgatgactacagtgccctaagacagcagattgcggagggcaagctgctggtcaaaaagatagtgtctcttgtgagatcagcgtgcagcttccctggccttgaagcccaaggcacagaggtgctaggcagcaaaggcattcatgagcttcggagcagcaccagtgccctgcaccatgccctagaggagaagtgctttgaagaaaaacttgaggtatatgaaatggttaaaaatcagaaactaaaccttttaacatggacatcaaagctttgccataagcaattcagcatattcctagaaatgtttctaatccataacctgagagaatgttgatctccatagtgtgaaaatgacttgggccagtttaacttgctcttttttttattttttcactaattcccttttgtttttctctgataattcttctctttcctgagcctctttagagcagcacttacaggattgcctctgtaaagccttattcctgtcccagaaaaggtgaaatccctaagggctctgccgtgtactccagccttgtgacccttgccttccaggaaccatgcaagaagcgcagccaccagaagtccttaaaacagcaggaaaggtgagcctgtcccccttttgtgcagctacctatctgctgaggagcatctgggcctcattcctccaagtccactggagggtccagaagagggagtcagagatgtatcctggtggagctgggagaaaggcagaaagcctttgtgacagctatggaataccgttagccaaggtccacttggcccagcactaagcaaaagatgcgtagtttgcacagaaggttttgtgatactgcctctcaacagccccagcagcttgggaactagcaagagcacatttcttgcctcatcagctgtcctgagatggaaaactcagtggatataggaccctgattccgatgaaaggggcacgtggtcccaatgctggagctcctctggcaggttctaaaagcacactacggagcagcggtgccctgccggacactgctggcgggggctcagtgagcactactcacagatccacacctgaccctgttgggtcgagtcaggctgggctttggtctgcactgtagcacctgtgttctttgagttcacatcatgaatgtggtgatttcccagataccatctcaggcttaacctagcacatcctatttcttttcttctatgatatccaaattggactgacctcacttcaaagttgctgtcccattttgtcaccctatcttatctcggggaaattgcagactgatggccagaccaactctgttgaaattcttgcatagagcaaacctgtgctcatttttaagtggcatgggagaggccccaagcctagtaaagcctagtctgtgtcttcacagtgctggtagaatgtgtttgtgtgtataaatatatgatatagatttatatatgttgctaacgccacatattgaaggccaacataactggtggacagggtgggtgacagaaaatgaaagtctttttggtgattgtttaagcaagatgtgtataaagaaataaatagtttttctttcactgctttgtttcccatttctgcaccaatcccttgacagtataaagaactggaaagagaaaatgggaaagacaaactgtgtttaagaagcatatagtctaatgcttgaactgtaactttaaaagattaaggttttccttctttgtcattttgatttcctttttatcactggttttgatggatttgattaaggcgttccttggtgaagttttcttcatgtttcttgttcttagaataatcatatttctgtaatatttgaagtttatggtttccatggagcttctaaatctttcatccagtatgttttaaatatctttgtctctcttctccactacacgcccttcagggattccatttagccctatactggggggtttaaagttttgatgccaatggtctttttatgttttcaagtcatttgttactgtgtgtttcatttatgttagtttcaacttctattccttctagttcaataatcttctcttctgcaatgtttaatccactgccttcttccatttcagactgtaaatcatactttttatctacagaatttgatatttaaaaaatctt

SEQ ID NO: 463006 - DNA, 6296 bp, Homo sapiens
tagaggatccacagagatcgctgtatcggggggaaacacctagtcctgagtgtgaggagcacaacagcctcaaggaaatggtcctgatggaggggctgtgctctgagcagggacgccggggctcaacactggctagttcctctgagaggaagcccttggagaaccagctagggaagcaggaagagttccgggtatatggaaagtcagaaaacatcttggtcctacgaaaggacatcgaagatctgaaggcccagctgcagaatgccaacaaggtcattcaaaacctcaagagccgggtccggtccctctcagttacaagtgattattcgtctagtctggaaagaccccggaagctgagagctgttggcaccttggaggggtcttcacctcatagtgtccctgatgaggatgaggggtggctgtctgatggcactggggctttctactctccagggcttcaggccaaaaaggacctggagagtctcatccagagagtatcccagctggaggcccagctcccagaaaatggactagaagagaagctggctgaggagctgagatcagcctcgtggcctgggaaatatgattccctgattcaggatcaggcccgggaactgtcttacctacggcaaaaaatacgagaagggagaggtatttgttatcttatcacccagcatgcaaaagatacagtaaaatcttttgaggatctcctaaggagcaatgacattgactactacctgggacagagcttccgggagcaactcgcccagggaagccagctgacagagaggctcaccagcaaactcagcaccaaggatcataaaagtgagaaagatcaagctggacttgagccactggccctcaggctcagcagggagctgcaggagaaggagaaagtgattgaagtcctgcaggccaagctggatgctcggtccctcacaccctccagcagccgtgccttgtctgactcccaccgctctcccagcagcacctctttcctgtctgatgagctggaagcctgctctgacatggacatagtcagcgagtacacacactatgaagagaagaaagcttctcccagtcactcagattccatccatcattcgagtcattctgctgtgttgtcttctaaaccatcatcaaccagtgcatctcagggggctaaggccgaatccaacagcaaccccatcagcttgccaactccccagaatacccccaaggaggccaaccaagcccattcaggtaccagcactgttcctcctgcttccacagctacattgctgagcaacgacttggaagccgactcttcctactacctcaactctgcccagcctcactctcctccaaggggcaccatagaactgggaagaatcctagagcctgggtacctgggcagcagtggcaagtgggatgtgatgaggcctcagaaagggagtgtatctggggacctatcctcaggctcctctgtgtaccagcttaactccaaacccacaggggctgacctgctggaagagcatcttggtgaaatctggaacctgcgccagcgcctggaggagtccatctgcatcaatgactgcctacgggagcaactggaacaccggctgacctctactgctcgtggaaggggatccacttctaacttctacagtcagggcctggagtccatacctcagctctgcaatgagaacagagtcctcagggaagaaaatcgaagacttcaggctcaactgagtcatgtttccagagagcactcccaggaaacagaaagcctgagggaggctctgctgtcctctcgatcccaccttcaagagctggaaaaggagctggagcaccagaaggtggaaaggcagcagcttttggaagacttgagggagaagcagcaagaggtcttgcatttcagggaggaacgtctttccctccaggaaaacgactccaggtaagaggggacccattgacagagaaggtagcattcttcattcttacattcattcttacattacaagaggaagggatattggcaagacaattgatgtcctcttttggaaacctaaatgttccctctgctattcctgatttttgtgtgtcagtggggtggggggaggggcgctttgagcagaagaaaggacttctctgggaatgccttgtcactcccaagttgagagagtaaaactctgttatagaagtcttcagtatatcagagacatgaaaaaagaagggttcccatgcttccaattagatataggacattagtctcaccatcacctaggaagcttctatactggctgtgatgcttggtcccagcataagccctgtaactgcttgtcagaatgcaaacagcactgtaggaacagtaaggagactgtgctggtgtgtctgttctgctctgaactaatgtaggtaatggtgtgttttcaagcaaagttacttgacctccctcagcctccatttccatatctgcaaaataaaagtgatagtcttcatgaccccctgagttgacatctggggctcagatgtaaccctaactgtaaccctttatgaccctctgagttgacatctggctctcagcttgttgctctggtgtggctgagtagctctgccatctcagtgggccttgcctctccctggtcagactgcagcacaagctggttctcctgcagcaacagtgtgaagagaaacagcagctctttgagtccctccagtcagagctacaaatctacgaggcactttatggcaattccaagaaggggctgaaaggtatgtgttcttctcccctcaccccatgagctttttgcccttgcataggatgctagtgaggtctttcctttgggagttgtggagatcatgggaagctacagagttctgtcgcagaaacccccacccgagcctggggctcccagtaggagctctcaaacacaaagcccaacgggacaggttggtggcacgagcaagatccggcctgatcattcctaattactttaagaaaatctagacattcctatcaatgtctagattgtaacatttttgaaagcaaaagaactgtcctaatgatatcatcatttgaaaaggcctttaatattgttggtaatacatactgacaacccattcagcccaatgtagcaggcagtctgctcccaccctgaccctttccgtagtgacatctggctctcagcttattgccctttcatgtaattttcataaatcctgatttagtttcctgattttctaaagagaaggtgaactggaatttgaagaaatacaggggcttaccaggctgggcgaatagcttaagtacaaagtcatggtgagtgttgagtcagtggggaccagcctgcccacaggagaaaattaaaagacacaaaaacaaaaacaaaaaaaccttatagaaataccactaataggacctaaatttcaatcctggatttaaatattaaggacatttattgaagactttgctgcctgctgaaataataatctaatatttgagaattttgatatatttcttcattctttaaatggagaagggtattcaaaacataatgtgaataagtcacagcaggctggaacagaggacgacatcaatgtcgtgaaatttagcaaagataaaaagcaaaatcctgagctcgattaaaaatatcagtggtagaaatataggttgagggtagaaatataggacaggcagccattcatggacatgagggtttggggtttggtagaaacatgttcacacaagtaaggtgtaggacaaaggttgctagaaatgccagctcaaactggaactacagtagtgactcatttcaaagctacaaccactaaagctccataatctcttatctgtaatttcaaaatccagtaagatttccaaattaaatttttcaaatactcatttagtgacaaaatctagatgatctgacatgaggatattcataagtctttatttatctatttagaatattcacatagctcattgcggaaatagttatatttggagcaaactgaggatatcattatgaataacagaagattcagttgtgttgtcattttctttttcaggcttgggtttggatacttctccagtaatgaagacccctcccaagctagagggtgatgctactgatggctcctttgccaataagcatggccgccatgtcattggccacattgatgactacagtgccctaagacagcagattgcggagggcaagctgctggtcaaaaagatagtgtctcttgtgagatcagcgtgcagcttccctggccttgaagcccaaggcacagaggtgctaggcagcaaaggcattcatgagcttcggagcagcaccagtgccctgcaccatgccctagaggagaagtgctttgaagaaaaacttgaggtatatgaaatggttaaaaatcagaaactaaaccttttaacatggacatcaaagctttgccataagcaattcagcatattcctagaaatgtttctaatccataacctgagagaatgttgatctccatagtgtgaaaatgacttgggccagtttaacttgctcttttttttattttttcactaattcccttttgtttttctctgataattcttctctttcctgagcctctttagagcagcacttacaggattgcctctgtaaagccttattcctgtcccagaaaaggtgaaatccctaagggctctgccgtgtactccagccttgtgacccttgccttccaggaaccatgcaagaagcgcagccaccagaagtccttaaaacagcaggaaaggtgagcctgtcccccttttgtgcagctacctatctgctgaggagcatctgggcctcattcctccaagtccactggagggtccagaagagggagtcagagatgtatcctggtggagctgggagaaaggcagaaagcctttgtgacagctatggaataccgttagccaaggtccacttggcccagcactaagcaaaagatgcgtagtttgcacagaaggttttgtgatactgcctctcaacagccccagcagcttgggaactagcaagagcacatttcttgcctcatcagctgtcctgagatggaaaactcagtggatataggaccctgattccgatgaaaggggcacgtggtcccaatgctggagctcctctggcaggttctaaaagcacactacggagcagcggtgccctgccggacactgctggcgggggctcagtgagcactactcacagatccacacctgaccctgttgggtcgagtcaggctgggctttggtctgcactgtagcacctgtgttctttgagttcacatcatgaatgtggtgatttcccagataccatctcaggcttaacctagcacatcctatttcttttcttctatgatatccaaattggactgacctcacttcaaagttgctgtcccattttgtcaccctatcttatctcggggaaattgcagactgatggccagaccaactctgttgaaattcttgcatagagcaaacctgtgctcatttttaagtggcatgggagaggccccaagcctagtaaagcctagtctgtgtcttcacagtgctggtagaatgtgtttgtgtgtataaatatatgatatagatttatatatgttgctaacgccacatattgaaggccaacataactggtggacagggtgggtgacagaaaatgaaagtctttttggtgattgtttaagcaagatgtgtataaagaaataaatagtttttctttcactgctttgtttcccatttctgcaccaatcccttgacagtataaagaactggaaagagaaaatgggaaagacaaactgtgtttaagaagcatatagtctaatgcttgaactgtaactttaaaagattaaggttttccttctttgtcattttgatttcctttttatcactggttttgatggatttgattaaggcgttccttggtgaagttttcttcatgtttcttgttcttagaataatcatatttctgtaatatttgaagtttatggtttccatggagcttctaaatctttcatccagtatgttttaaatatctttgtctctcttctccactacacgcccttcagggattccatttagccctatactggggggtttaaagttttgatgccaatggtctttttatgttttcaagtcatttgttactgtgtgtttcatttatgttagtttcaacttctattccttctagttcaataatcttctcttctgcaatgtttaatccactgccttcttccatttcagactgtaaatcatactttttatctacagaatttgatatttaaaaaatctt

SEQ ID NO: 463007 - DNA, 1968 bp, Homo sapiens
agccatatgcagaagattgaagctggaccctttccttatgccacatgcaaaatcaactcaagatggatcaaagacttaaatcaaaaaacaaacagaaaaacaaaccatccataaacagaaaacctacagaatgggagaacaaattgcaaactatgcacctgacaaaggtctaacacccagcatttataaggaacttaaacaaatttatgagaaaaacaaccccattaaaaagtgggcaaaggacataaacagccatgcagccaacaagcatgtgaaaaaaaattcactatctctgatcattagagaaatgaaaatcaaagccataatgagatactatctcacaccagtcagaatggctattattggaaagccaaaaaacaatagatgctggcaagattgcagagaaaaggcaacacttatacactgttggtgggagtgtaaattcgttcaaccattgtggaaagcagtatggcgattcctcaaaaaagctaaaagcagaactaacattttacccagcaatcccattattgggtatatatccagaggaatataaatcattgtatcataaagacacatgcatgtgaatgttcattgcagcactattcacaatagtaaagacgtgaaatcaacctaaacacccatcaatgacagattggataaagaaaatgtgtaaagaaacttatgaatttcacttgacagatgtttctttataagatttttgcattgcactttttaatttaacaaacaaaacaaaatttctttactttggattctattactcattcgttagagtcagaatctaattacattcgggtatctgctctccataaagacatgtgctgcatgaaaaggtgattctatccccaattgtaggtaataaactctactctggctaagcaaagcatgataattccacttctctcatcagtgattggtttagaaatgggcatgtgacccacatctggccaataagatttaattcacattcctcattatattcatctttacaacaactaccaacagttgcttgaaaattaactcttctatttttgaataaagaaaatgaggcaaaatagtttggcaataaatattaactaataaacagttaactgttgaatatctattgcacacaagatatcagagtaccacagcatgcatgttagagttgttgaacatcaaaagcatctgttaactgacaagtgagaagatgagaggggggatgaatagatgctgacataatgatattatatggagaaaaagtcattttttaaagatcacaaaaggagaagcaggttccaggatgaaccacaaaaacagtaactcaacttctgtcctgggctctttatattaaatctcaccagaaacccattttacaggtgggaaaagcttggtccacctcagccttgggcccatgcttttatatctagtattaacattcattctggatgtgtagaagtctctgccctctttcagacaacagttactgctatggtttgaatgtatgtgtccctccaagatcctcatgttggaatttaaaccccaaggtgatggtattaagaggtgaagccttttggaaagtgattaagtcatgatggctctgccctcaagaatacattagtgctcttataacagaagttgaaggaacccccctagtgccttttgccttctccattccacaatgtgtggatataacattctgccatatgagaatttagcaaaaagacaccatcttgaagaagagacaaccttcgccagacaccaaatctgctggcactgtgctcttggacttccttatcaattaatgattctatggtattttgttatagcaatgggaacagactaagacagttaaagagcgacacacttgcattgagtgtaaaaggagggaaacttacagtccttttaagcagaaaccaagcaagttgctagacagctggctggtacaactggaagatgaggggggtggtg

SEQ ID NO: 463008 - DNA, 1589 bp, Homo sapiens
tggaactaggaaaaaatttgcaaggtttgaaggaatctcttcaagcggaaagacaaagttcccgccaagacttaggataccatttttgatggcacagagcttggtgttccataggccacaaggggttttagacccgggacccaggacatgttccaagactcttttacattatgtcagacaagcaggccctgcctcagcccttctaccgacacagaaagtggaacaacgggtttggtggaaagacccgataacaaaaggttgtgaaacaggacagaatcaacagccaatttgggtgccatcgagatatctaaagccctactatgagccagataacgaggaagaggttttgggaggatcccaaacacccactggtggcagcattgtccaagttgatgctgaggatgacccccaactgtcacgagcaacactcatcgaaagcagccacctacctggggacagatcaagaagctgtcacagatggtggaagaaaacctgaggaaagcaggacaagcagtcacatctgcagatgcggatcctgactcctgcaagaagtagctcactgtgataaagccgcctttgcttttattgccctggtaaaacaaaaagggggacatgctgggaataggccccaagcctggccataaacaagccataagaaaagtcataaacaagatctctgcagcactgtgacatgctcgtgatggttatgatgcacacactggaggttgctggttcaccagaatgagggcaaggaacacctggcccacccagggcggaaaactgctcaaggtgttcctaaaccacaaacaatggcataagcaatctgtgccttaatgacatgctcctgctgcagataacaagccagagcctgtccctttgttctccttaaagaatactttcagttaatctacaaactacagaaacgatgtttatcacaggctgtcaataaataggtgggtcaaactctgttcgaggctctcagctctgaaggctgttagccccctgatcccactttgcactctatttctgtctatgtctttattcctctagtgctgctggattgtggtctccatgaccgacctggtcttggcaaatattacatgccaatgttaataatatttttaaaaaatctttacactataggtatataaaatattctagcaaaaaaaaaagttaatccattatactcaaactgcatttttctggaattacaaagataatataacattggaatgtcaatcagttatctttccacattttaaaaaaacttttatttacttacacatttaaatattaggtatctatcaagggcaagtacagtcagtcctaggtacctgaattttctgagtaaggcaagatcatcaaagaggaatcagggaaaagcattcaataaattcttaagccattcatgggaaagattccctaagcaatgaaaagtagaaaaaaaccttgaccttttaaaaatctacagcaaccaatacagtgattagtaatgatggaaaacatctgccattaggattagaaataaaagtatgcttgttttactacttctagttattattctagtattttctgcctagacaagacat

SEQ ID NO: 463009 - DNA, 1150 bp, Homo sapiens
ttcattgttacctgaaggagatgaagaatcttcgcaaactcgttttctccaggtgccatcattactcttcggacaatgacctcgaggaatggttactcaccaaattcagcctgtgttcctcaggctggaacacctccaattgcttaaagtaaaattgatcaccttcttcagtgggcacctggaacagctgatcagctacgtgctgctgttccgcatcagtcttgaacccctcggagctctgctagagaaaattgctgccactctcaagaccctcatcttcgagggctgtcagatccactactgccaactcagcgccatcctgcctggcctgagccgctgctcccagctcaccaccttctactttggcagaaattgcatgtctacggacaccctgaaggacctgctgcgccacaccagtgggctgagcaagttaagcctggagacgtatcctgcccctgaggagagtttgaattccttgcatgggggtgtctgctcccactgtgtggtccctcctggcacctgctgtaattttggagtggagttggggtcaagcatgtatgctgtggcagcccagatgagcgtgtgcatgctcagtgctggcctttggatgctccttgatgcaagtgacctgggcgccatgggtggtggtgggaggcagacagactcctggatgggaagacgagggtacctggtgaggctctaccttgtgaccaaggggggcctgaagcccgtgggctggtccaccagtgctatggaccagagtgggaatatgtggtgccttttctgtgcctgccaatggctacctatgacccaagcagcacatacttccttccccatgatgccccaacagccccagactcagggaaaacatcaggatgaacagtggcagagtgaaactacccactcttgggatgattttcctgcagacaagcaatccactctggggccttttctctactgagagctgtggagatgatgagatgactttcctggaaagagcagcagacaccactgtgtactccagggacaaacatggaagctgcttttgctgtgcctggttcatttgcagccttgcaaaaatctggcacctgtgctggcacctggagctgcctgccccactgctgtgggagccagtgactgtccaaagtga

SEQ ID NO: 463010 - DNA, 3201 bp, Homo sapiens
attttacccagcccctgttcaagatggagttgctgtggttcacacatctctgacaaaaatacagggctattcggagtcaccagacctggagtttgagtatgctgacacagacaagtgggctgcagagctctcggagctttacagctacacggaagggccagaattcctgatgaatcgaaaatgctttgaggaggacttccggatccatgtgacagacaagaagtggactgagctggataccaaccagcaccggacccatgccatgaggctcctggatggcttggaagtcactgccagggagaagagactcaaggtggctcgagcaattctctatgttgctcaaggcacgtttggggagtgcagctcggaggcagaggtgcagtcctggatgcgctacaacatctttctcctcctggaggtgggcacgttcaatgctttggtggagcttctgaacatggaaatagacaacagtgccgcctgcagcagtgctgtgaggaagcctgccatctccctggctgacagcacagacctcagggtcctgctcaacatcatgtacctgatagtggagaccgttcatcaggagtgtgagggtgacaaggctgagtggaggaccatgcggcagaccttcagagccgagctgggctccccgctgtacaacaatgagccatttgccatcatgctgtttgggatggtgaccaaattttgcagtggtcacgcccctcactttcccatgaagaaagttctcttgctgctctggaagacagtattgtgcacgctaggcggctttgaggagctgcagagcatgaaggctgagaagcgcagcatcctgggcctccccccgcttcctgaggacagcatcaaagtgattcgcaacatgagagcagcctctccaccagcatctgcttcagacttgattgagcagcagcagaaacggggccgccgagagcacaaggctctgataaagcaggacaacctagatgccttcaacgagcgggatccctacaaggctgatgactctcgagaagaggaagaggagaatgatgatgacaacagtctggagggggagacgtttcccctggaacgggatgaagtgatgcctcccccgctacagcacccacagactgacaggctgacttgccccaaagggctcccgtgggctcccaaggtcagagagaaagacattgagatgttccttgagtccagccgcagcaaatttataggttacactctaggcagtgacacgaacacagtggtggggctgcccaggccaatccacgaaagcatcaagactctgaaacagcacaagtacacgtcgattgcagaggtccaggcacagatggaggaggaatacctccgctcccctctctcagggggagaagaagaagttgagcaagtccctgcagaaaccctctaccaaggcttgctccccagcctgcctcagtatatgattgccctcctgaagatcctgttggctgcagcacccacctcaaaagccaaaacagactcaatcaacatcctagcggacgtcttgcctgaggagatgcccaccacagtgttgcagagcatgaagctgggggtggatgtaaaccgccacaaagaggtcattgttaaggccatttctgctgtcctgctgctgctgctcaagcactttaagttgaaccatgtctaccagtttgaatacatggcccagcacctggtgtttgccaactgcattcctttgatcctaaagttcttcaatcaaaacatcatgtcctacatcactgccaagaacagcatttctgtcctggattaccctcactgcgtggtgcatgagctgccagagctgacggcggagagtttggaagcaggtgacagtaaccaattttgctggaggaacctcttttcttgtatcaatctgcttcggatcttgaacaagctgacaaagtggaagcattcaaggacaatgatgctggtggtgttcaagtcagcccccatcttgaagcgggccctaaaggtgaaacaagccatgatgcagctctatgtgctgaagctgctcaaggtacagaccaaatacttggggcggcagtggcgaaagagcaacatgaagaccatgtctgccatctaccagaaggtgcggcatcggctgaacgacgactgggcatacggcaatgatcttgatgcccggccttgggacttccaggcagaggagtgtgcccttcgtgccaacattgaacgcttcaacgcccggcgctatgaccgggcccacagcaaccctgacttcctgccagtggacaactgcctgcagagtgtcctgggccaacgggtggacctccctgaggactttcagatgaactatgacctctggttagaaagggaggtcttctccaagcccatttcctgggaagagctgctgcagtgaggctgttggttaggggactgaaatggagagaaaagatgatctgaaggtacctgtgggactgtcctagttcattgctgcagtgctcccatcccccaccaggtggcagcacagccccactgtgtcttccgcagtctgtcctgggcttgggtgagcccagcttgacctccccttggttcccagggtcctgctccgaagcagtcatctctgcctgagatccattcttcctttacttcccccaccctcctctcttggatatggttggttttggctcatttcacaatcagcccaaggctgggaaagctggaatgggatgggaacccctccgccgtgcatctgaatttcaggggtcatgctgatgcctctcgagacatacaaatccttgctttgtcagcttgcaaaggaggagagtttaggattagggccagggccagaaagtcggtatcttggttgtgctctggggtgggggtggggtgtttctgatgttattccagcctcctgctacattatatccagaagtaattgcggaggctccttcagctgcctcagcactttgattttggacagggacaaggtaggaagagaagcttcccttaaccagaggggccatttttccttttggctttcgagggcctgtaaatatctatatataattctgtgtgtattctgtgtcatgttggggtttttaatgtgattgtgtattctgtttacattaaaaagaagcaaaaataattcccgttggcttgtctacaggaaatatggcctctacgtatctcctccaggtctagaaagtggttttttctgct

SEQ ID NO: 463011 - DNA, 1507 bp, Homo sapiens
taggctaggtagaggccgggtgttgaatcggccgattcttcaatcaaaacatcatgtcctacatcactgccaagaacagcatttctgtcctggattaccctcactgcgtggtgcatgagctgccagagctgacggcggagagtttggaagcaggtgacagtaaccaattttgctggaggaacctcttttcttgtatcaatctgcttcggatcttgaacaagctgacaaagtggaagcattcaaggacaatgatgctggtggtgttcaagtcagcccccatcttgaagcgggccctaaaggtgaaacaagccatgatgcagctctatgtgctgaagctgctcaaggtacagaccaaatacttggggcggcagtggcgaaagagcaacatgaagaccatgtctgccatctaccagaaggtgcggcatcggctgaacgacgactgggcatacggcaatgatcttgatgcccggccttgggacttccaggcagaggagtgtgcccttcgtgccaacattgaacgcttcaacgcccggcgctatgaccgggcccacagcaaccctgacttcctgccagtggacaactgcctgcagagtgtcctgggccaacgggtggacctccctgaggactttcagatgaactatgacctctggttagaaagggaggtcttctccaagcccatttcctgggaagagctgctgcagtgaggctgttggttaggggactgaaatggagagaaaagatgatctgaaggtacctgtgggactgtcctagttcattgctgcagtgctcccatcccccaccaggtggcagcacagccccactgtgtcttccgcagtctgtcctgggcttgggtgagcccagcttgacctccccttggttcccagggtcctgctccgaagcagtcatctctgcctgagatccattcttcctttacttcccccaccctcctctcttggatatggttggttttggctcatttcacaatcagcccaaggctgggaaagctggaatgggatgggaacccctccgccgtgcatctgaatttcaggggtcatgctgatgcctctcgagacatacaaatccttgctttgtcagcttgcaaaggaggagagtttaggattagggccagggccagaaagtcggtatcttggttgtgctctggggtgggggtggggtgtttctgatgttattccagcctcctgctacattatatccagaagtaattgcggaggctccttcagctgcctcagcactttgattttggacagggacaaggtaggaagagaagcttcccttaaccagaggggccatttttccttttggctttcgagggcctgtaaatatctatatataattctgtgtgtattctgtgtcatgttggggtttttaatgtgattgtgtattctgtttacattaaaaagaagcaaaaataattcccgttggcttgtctacaggaaatatggcctctacgtatctcctccaggtctagaaagtggttttttctgct

SEQ ID NO: 463012 - DNA, 769 bp, Homo sapiens
agaagcctgctgaaccctgatggttcaaagccagatacatgtagagtgggcttgtggcacatcggtgggggcttttcagaatgtgcatattaggggagaaaaaaaaatcatgtgattaaaattgcacccaaaataccagcgtttcagtttggaatcaaattcatagagcagcagtatgatcttaccacttacatagggtgtaacttatctttctggtcctatggcagtcctgaatttggtgagttaacatgggtccatgccattgtgaggatttttctaggctcaggtgtaactggtttcttgccctgcagtgacagacaagaagtggactgagctggataccaaccagcaccggacccatgccatgaggctcctggatggcttggaagtcactgccagggagaagagactcaaggtggctcgagcaattctctatgttgctcaaggcacgtttggggagtgcagctcggaggcagaggtgcagtcctggatgcgctacaacatctttctcctcctggaggtgggcacgttcaatgctttggtggagcttctgaacatggaaatagagtgagcatttttgagaggctgagtagggaaggggaggctgggatgggaagggggacagagcttgcagaactaactggctttgagagggttaaatggggcagaagttctggtcccaggctgtgttctgaccacctgggttgaataacggagttggtcacttacaccttgaagattaatggagactaatgacaggtccctgcag

SEQ ID NO: 463013 - DNA, 624 bp, Homo sapiens
gagagagcgagaccatctcaatgctgggattagaccacaaggttgccccaggccctgccctcaaagagctcccagtccacctcccagtgcacaggctgagacacgtctagtgcagggttaagaatacagactgagtcaggaacctgcctctgatgcctgggtccaccactttatggatggcaacttaggcaagttactgggtctctctatgctttatttccttgtctgtgaaataggaataataatacctttatagggttataataataaggatgaactgagttattacaagtaaaatgcttggcacattgtttgtgttcagggtttgctgttatcatcattaacatcattatgtacatcactgtttacaggttttcctccagccagctaggaagctggctcaggagattgtattctgggctggggttttatgcttgtactcattatgttaagggagaagaagaagttgagcaagtccctgcagaaaccctctaccaaggcttgctccccagcctgcctcagtatatggtgagtggtgcctgcagtgggacactcccactacactggccttagagcaggccctgccgtcctcctgccacctgcagaccaacaggaggactgctc

SEQ ID NO: 463014 - DNA, 2705 bp, Homo sapiens
ttgaagagtatgtcataggtgcagagttagtgtatctgcactagggtcagtcagcctgcatctccactctttccttgttcctttttctcctttcccttgcggatgtcacggaattctccttgggagtggcttcagtccattgttcaggagttgcctgggtctctataaagacatgggtcatgatgtcatgaatgtttctgagcctgacacaatggtcaggggccagcctgtggacacattgaccctggctctgcttccctgtctgtgatgcagtgcacgctaggcggctttgaggagctgcagagcatgaaggctgagaagcgcagcatcctgggcctccccccgcttcctgaggacagcatcaaagtgattcgcaacatgagagcagcctctccaccagcatctgcttcagacttgattgagcagcagcagaaacggggccgccgagagcacaaggctctgataaagcaggacaacctagatgccttcaacgagcgggatccctacaaggctgatgactctcgagaagaggaagaggagaatgatgatgacaacagtctggagggggagacgtttcccctggaacgggatgaagtgatgcctcccccgctacagcacccacagactgacaggctgacttgccccaaagggctcccgtgggctcccaaggtcagagagaaagacattgagatgttccttgagtccagccgcagcaaatttataggttacactctaggcagtgacacgaacacagtggtggggctgcccaggccaatccacgaaagcatcaagactctgaaacagcacaagtacacgtcgattgcagaggtccaggcacagatggaggaggaatacctccgctcccctctctcagggggagaagaagaagttgagcaagtccctgcagaaaccctctaccaaggcttgctccccagcctgcctcagtatatgattgccctcctgaagatcctgttggctgcagcacccacctcaaaagccaaaacagactcaatcaacatcctagcggacgtcttgcctgaggagatgcccaccacagtgttgcagagcatgaagctgggggtggatgtaaaccgccacaaagaggtcattgttaaggccatttctgctgtcctgctgctgctgctcaagcactttaagttgaaccatgtctaccagtttgaatacatggcccagcacctggtgtttgccaactgcattcctttgatcctaaagttcttcaatcaaaacatcatgtcctacatcactgccaagaacagcatttctgtcctggattaccctcactgcgtggtgcatgagctgccagagctgacggcggagagtttggaagcaggtgacagtaaccaattttgctggaggaacctcttttcttgtatcaatctgcttcggatcttgaacaagctgacaaagtggaagcattcaaggacaatgatgctggtggtgttcaagtcagcccccatcttgaagcgggccctaaaggtgaaacaagccatgatgcagctctatgtgctgaagctgctcaaggtacagaccaaatacttggggcggcagtggcgaaagagcaacatgaagaccatgtctgccatctaccagaaggtgcggcatcggctgaacgacgactgggcatacggcaatgatcttgatgcccggccttgggacttccaggcagaggagtgtgcccttcgtgccaacattgaacgcttcaacgcccggcgctatgaccgggcccacagcaaccctgacttcctgccagtggacaactgcctgcagagtgtcctgggccaacgggtggacctccctgaggactttcagatgaactatgacctctggttagaaagggaggtcttctccaagcccatttcctgggaagagctgctgcagtgaggctgttggttaggggactgaaatggagagaaaagatgatctgaaggtacctgtgggactgtcctagttcattgctgcagtgctcccatcccccaccaggtggcagcacagccccactgtgtcttccgcagtctgtcctgggcttgggtgagcccagcttgacctccccttggttcccagggtcctgctccgaagcagtcatctctgcctgagatccattcttcctttacttcccccaccctcctctcttggatatggttggttttggctcatttcacaatcagcccaaggctgggaaagctggaatgggatgggaacccctccgccgtgcatctgaatttcaggggtcatgctgatgcctctcgagacatacaaatccttgctttgtcagcttgcaaaggaggagagtttaggattagggccagggccagaaagtcggtatcttggttgtgctctggggtgggggtggggtgtttctgatgttattccagcctcctgctacattatatccagaagtaattgcggaggctccttcagctgcctcagcactttgattttggacagggacaaggtaggaagagaagcttcccttaaccagaggggccatttttccttttggctttcgagggcctgtaaatatctatatataattctgtgtgtattctgtgtcatgttggggtttttaatgtgattgtgtattctgtttacattaaaaagaagcaaaaataattcccgttggcttgtctacaggaaatatggcctctacgtatctcctccaggtctagaaagtggttttttctgct

SEQ ID NO: 463015 - DNA, 1616 bp, Homo sapiens
aagttctcttgtaacagatatttcctcatcttataggtggggaaactggggtgggacacatcaggtagattcctacttctgctccaacaagtgagggaggaaagctgggagctggctcaggcacggctgctccaccaggccctgggcctttgctcatggtgggcatctggttcctctcccctctgcagcatttctgtcctggattaccctcactgcgtggtgcatgagctgccagagctgacggcggagagtttggaagcaggtgacagtaaccaattttgctggaggaacctcttttcttgtatcaatctgcttcggatcttgaacaagctgacaaagtggaagcattcaaggacaatgatgctggtggtgttcaagtcagcccccatcttgaagcgggccctaaaggtgaaacaagccatgatgcagctctatgtgctgaagctgctcaaggtacagaccaaatacttggggcggcagtggcgaaagagcaacatgaagaccatgtctgccatctaccagaaggtgcggcatcggctgaacgacgactgggcatacggcaatgatcttgatgcccggccttgggacttccaggcagaggagtgtgcccttcgtgccaacattgaacgcttcaacgcccggcgctatgaccgggcccacagcaaccctgacttcctgccagtggacaactgcctgcagagtgtcctgggccaacgggtggacctccctgaggactttcagatgaactatgacctctggttagaaagggaggtcttctccaagcccatttcctgggaagagctgctgcagtgaggctgttggttaggggactgaaatggagagaaaagatgatctgaaggtacctgtgggactgtcctagttcattgctgcagtgctcccatcccccaccaggtggcagcacagccccactgtgtcttccgcagtctgtcctgggcttgggtgagcccagcttgacctccccttggttcccagggtcctgctccgaagcagtcatctctgcctgagatccattcttcctttacttcccccaccctcctctcttggatatggttggttttggctcatttcacaatcagcccaaggctgggaaagctggaatgggatgggaacccctccgccgtgcatctgaatttcaggggtcatgctgatgcctctcgagacatacaaatccttgctttgtcagcttgcaaaggaggagagtttaggattagggccagggccagaaagtcggtatcttggttgtgctctggggtgggggtggggtgtttctgatgttattccagcctcctgctacattatatccagaagtaattgcggaggctccttcagctgcctcagcactttgattttggacagggacaaggtaggaagagaagcttcccttaaccagaggggccatttttccttttggctttcgagggcctgtaaatatctatatataattctgtgtgtattctgtgtcatgttggggtttttaatgtgattgtgtattctgtttacattaaaaagaagcaaaaataattcccgttggcttgtctacaggaaatatggcctctacgtatctcctccaggtctagaaagtggttttttctgct

SEQ ID NO: 463016 - DNA, 2015 bp, Homo sapiens
aagggatttgatcactgtacgtgaaaatattaaggacagaatatcgcgaggtattggtcagccaagatggcttctaacactggccgccacacttaatatggcggccagggaaatttcctggagaaaatcacgcgagagttgcatcacggcggctgtgcgcgagttaagctgggggtgtggagcagccaagatggagccggcagtcggcggtccgggcccactgatcgtgaacaacaaacagccccagcccccgccacctccgccgccggcagccgcacagccaccacccggggcaccgcgggccgccgcgggcctcctgcctgggggcaaagcccgcgagttcaaccgcaaccagcgcaaagactcagagggctattcggagtcaccagacctggagtttgagtatgctgacacagacaagtgggctgcagagctctcggagctttacagctacacggaagggccagaattcctgatgaatcgaaaatgctttgaggaggacttccggatccatgtgacagacaagaagtggactgagctggataccaaccagcaccggacccatgccatgaggctcctggatggcttggaagtcactgccagggagaagagactcaaggtggctcgagcaattctctatgttgctcaaggcacgtttggggagtgcagctcggaggcagaggtgcagtcctggatgcgctacaacatctttctcctcctggaggtgggcacgttcaatgctttggtggagcttctgaacatggaaatagacaacagtgccgcctgcagcagtgctgtgaggaagcctgccatctccctggctgacagcacagacctcagggtcctgctcaacatcatgtacctgatagtggagaccgttcatcaggagtgtgagggtgacaaggctgagtggaggaccatgcggcagaccttcagagccgagctgggctccccgctgtacaacaatgagccatttgccatcatgctgtttgggatggtgaccaaattttgcagtggtcacgcccctcactttcccatgaagaaagttctcttgctgctctggaagacagtattgtgcacgctaggcggctttgaggagctgcagagcatgaaggctgagaagcgcagcatcctgggcctccccccgcttcctgaggacagcatcaaagtgattcgcaacatgagagcagcctctccaccagcatctgcttcagacttgattgagcagcagcagaaacggggccgccgagagcacaaggctctgataaagcaggacaacctagatgccttcaacgagcgggatccctacaaggctgatgactctcgagaagaggaagaggagaatgatgatgacaacagtctggagggggagacgtttcccctggaacgggatgaagtgatgcctcccccgctacagcacccacagactgacaggctgacttgccccaaagggctcccgtgggctcccaaggtcagagagaaagacattgagatgttccttgagtccagccgcagcaaatttataggttacactctaggcagtgacacgaacacagtggtggggctgcccaggccaatccacgaaagcatcaagactctgaaacaggtgagtggctttgggtgagcttttggcttgtttggtcctaagtgagtagagtgaaaccagcctgtagggagaagccttttaagactgttgtctgcctgcaagaacctggggtagaggccggggtggactttgcaataaccttgcaaacagtctttcgtaagttttgcttgttttattataagttttacttgttttagctgagcttttgtttgggactgactgggaagtctttaaagattatattacctgaccaccgggcaccaaggcatgcacctgtagtcccagctactcaagaggttgatgcaggaggattgtttgagcacaggagatcaaggctacagtgagctatgatcatggtcctgcactctagcctgggccacagagtgagacccggattctttaaaaaaaa

SEQ ID NO: 463017 - DNA, 595 bp, Homo sapiens
aagggatttgatcactgtacgtgaaaatattaaggacagaatatcgcgaggtattggtcagccaagatggcttctaacactggccgccacacttaatatggcggccagggaaatttcctggagaaaatcacgcgagagttgcatcacggcggctgtgcgcgagttaagctgggggtgtggagcagccaagatggagccggcagtcggcggtccgggcccactgatcgtgaacaacaaacagccccagcccccgccacctccgccgccggcagccgcacagccaccacccggggcaccgcgggccgccgcgggcctcctgcctgggggcaaagcccgcgagttcaaccgcaaccagcgcaaagactcagagggctattcggagtcaccagacctggagtttgagtatgctgacacagacaagtgggctgcagagctctcgggtaacgcacagacctttgtgttatttgggggtggttttttccttattggtctttaataaaattaataatgaatatcatttagggcttcattgctttccctagttctatcaaatatatatatatatatatatatatatatatatatatatatatgt

SEQ ID NO: 463018 - DNA, 292 bp, Homo sapiens
aagctgaggcggaaggctttgggagggtcctgatacctttgtgtcacctccaggctccccgctgtacaacaatgagccatttgccatcatgctgtttgggatggtgaccaaattttgcagtggtcacgcccctcactttcccatgaagaaagttctcttgctgctctggaagacagtattggtgagcacctccttggaggaggagaacggtgctatgggatgggcagtagggagactgttccttgaatatccttttgaatattgaattatgtgactgtaaaactgctttggt

SEQ ID NO: 463019 - DNA, 536 bp, Homo sapiens
tagccaggtgtggtggtgcacacctgtagtcccagctacttgggaggctggagcaggaaaattgcttgaacctgggaggcggaggtggcagtgagccaagatcatgccactgcactccagtctgggcaacagaggaagacttcatctcaaaaaaataaaaataaaaaatatctggggtttgggattttagctagggatttttgtggtgacttaatcctctttcagaagactgtgtttgaagacaaatgtgtggggattttgctagagtgcagggagtttggccagagaatgttttccccagcccttcttttcccatctctcccaccagcacaagtacacgtcgattgcagaggtccaggcacagatggaggaggaatacctccgctcccctctctcaggggtaagttggaggtcctcagtccgggcgcggtggctcacgcctgtaatcccagcactttgggaggccgaggagggcagatcatgaggtcaggagattgagaccatcctggctaacatggtgaaaccccgtctctact

SEQ ID NO: 463020 - DNA, 384 bp, Homo sapiens
gctctgagagcaggggattcctggtagaggcctggagacccggctgtcctgagatcatgtgtgagggacttttggaaactgctgcacacactgcagccatgagggctgattgttcctgggtttaccctgcaggaagcaggtgacagtaaccaattttgctggaggaacctcttttcttgtatcaatctgcttcggatcttgaacaagctgacaaagtggaagcattcaaggacaatggtaagtgagtcagtgtagtcagcaggcttggaacttggagctcaaagaagagtgctgggagcagggagtccccagggtggggctcactgtgccttctcacttaactttgctgtagccgtatccttgcattttaagggccaattccca

SEQ ID NO: 463021 - DNA, 3507 bp, Homo sapiens
aagggatttgatcactgtacgtgaaaatattaaggacagaatatcgcgaggtattggtcagccaagatggcttctaacactggccgccacacttaatatggcggccagggaaatttcctggagaaaatcacgcgagagttgcatcacggcggctgtgcgcgagttaagctgggggtgtggagcagccaagatggagccggcagtcggcggtccgggcccactgatcgtgaacaacaaacagccccagcccccgccacctccgccgccggcagccgcacagccaccacccggggcaccgcgggccgccgcgggcctcctgcctgggggcaaagcccgcgagttcaaccgcaaccagcgcaaagactcagagggctattcggagtcaccagacctggagtttgagtatgctgacacagacaagtgggctgcagagctctcggagctttacagctacacggaagggccagaattcctgatgaatcgaaaatgctttgaggaggacttccggatccatgtgacagacaagaagtggactgagctggataccaaccagcaccggacccatgccatgaggctcctggatggcttggaagtcactgccagggagaagagactcaaggtggctcgagcaattctctatgttgctcaaggcacgtttggggagtgcagctcggaggcagaggtgcagtcctggatgcgctacaacatctttctcctcctggaggtgggcacgttcaatgctttggtggagcttctgaacatggaaatagacaacagtgccgcctgcagcagtgctgtgaggaagcctgccatctccctggctgacagcacagacctcagggtcctgctcaacatcatgtacctgatagtggagaccgttcatcaggagtgtgagggtgacaaggctgagtggaggaccatgcggcagaccttcagagccgagctgggctccccgctgtacaacaatgagccatttgccatcatgctgtttgggatggtgaccaaattttgcagtggtcacgcccctcactttcccatgaagaaagttctcttgctgctctggaagacagtattgtgcacgctaggcggctttgaggagctgcagagcatgaaggctgagaagcgcagcatcctgggcctccccccgcttcctgaggacagcatcaaagtgattcgcaacatgagagcagcctctccaccagcatctgcttcagacttgattgagcagcagcagaaacggggccgccgagagcacaaggctctgataaagcaggacaacctagatgccttcaacgagcgggatccctacaaggctgatgactctcgagaagaggaagaggagaatgatgatgacaacagtctggagggggagacgtttcccctggaacgggatgaagtgatgcctcccccgctacagcacccacagactgacaggctgacttgccccaaagggctcccgtgggctcccaaggtcagagagaaagacattgagatgttccttgagtccagccgcagcaaatttataggttacactctaggcagtgacacgaacacagtggtggggctgcccaggccaatccacgaaagcatcaagactctgaaacagcacaagtacacgtcgattgcagaggtccaggcacagatggaggaggaatacctccgctcccctctctcagggggagaagaagaagttgagcaagtccctgcagaaaccctctaccaaggcttgctccccagcctgcctcagtatatgattgccctcctgaagatcctgttggctgcagcacccacctcaaaagccaaaacagactcaatcaacatcctagcggacgtcttgcctgaggagatgcccaccacagtgttgcagagcatgaagctgggggtggatgtaaaccgccacaaagaggtcattgttaaggccatttctgctgtcctgctgctgctgctcaagcactttaagttgaaccatgtctaccagtttgaatacatggcccagcacctggtgtttgccaactgcattcctttgatcctaaagttcttcaatcaaaacatcatgtcctacatcactgccaagaacagcatttctgtcctggattaccctcactgcgtggtgcatgagctgccagagctgacggcggagagtttggaagcaggtgacagtaaccaattttgctggaggaacctcttttcttgtatcaatctgcttcggatcttgaacaagctgacaaagtggaagcattcaaggacaatgatgctggtggtgttcaagtcagcccccatcttgaagcgggccctaaaggtgaaacaagccatgatgcagctctatgtgctgaagctgctcaaggtacagaccaaatacttggggcggcagtggcgaaagagcaacatgaagaccatgtctgccatctaccagaaggtgcggcatcggctgaacgacgactgggcatacggcaatgatcttgatgcccggccttgggacttccaggcagaggagtgtgcccttcgtgccaacattgaacgcttcaacgcccggcgctatgaccgggcccacagcaaccctgacttcctgccagtggacaactgcctgcagagtgtcctgggccaacgggtggacctccctgaggactttcagatgaactatgacctctggttagaaagggaggtcttctccaagcccatttcctgggaagagctgctgcagtgaggctgttggttaggggactgaaatggagagaaaagatgatctgaaggtacctgtgggactgtcctagttcattgctgcagtgctcccatcccccaccaggtggcagcacagccccactgtgtcttccgcagtctgtcctgggcttgggtgagcccagcttgacctccccttggttcccagggtcctgctccgaagcagtcatctctgcctgagatccattcttcctttacttcccccaccctcctctcttggatatggttggttttggctcatttcacaatcagcccaaggctgggaaagctggaatgggatgggaacccctccgccgtgcatctgaatttcaggggtcatgctgatgcctctcgagacatacaaatccttgctttgtcagcttgcaaaggaggagagtttaggattagggccagggccagaaagtcggtatcttggttgtgctctggggtgggggtggggtgtttctgatgttattccagcctcctgctacattatatccagaagtaattgcggaggctccttcagctgcctcagcactttgattttggacagggacaaggtaggaagagaagcttcccttaaccagaggggccatttttccttttggctttcgagggcctgtaaatatctatatataattctgtgtgtattctgtgtcatgttggggtttttaatgtgattgtgtattctgtttacattaaaaagaagcaaaaataattcccgttggcttgtctacaggaaatatggcctctacgtatctcctccaggtctagaaagtggttttttctgct

SEQ ID NO: 463022 - DNA, 3303 bp, Homo sapiens
agaagcctgctgaaccctgatggttcaaagccagatacatgtagagtgggcttgtggcacatcggtgggggcttttcagaatgtgcatattaggggagaaaaaaaaatcatgtgattaaaattgcacccaaaataccagcgtttcagtttggaatcaaattcatagagcagcagtatgatcttaccacttacatagggtgtaacttatctttctggtcctatggcagtcctgaatttggtgagttaacatgggtccatgccattgtgaggatttttctaggctcaggtgtaactggtttcttgccctgcagtgacagacaagaagtggactgagctggataccaaccagcaccggacccatgccatgaggctcctggatggcttggaagtcactgccagggagaagagactcaaggtggctcgagcaattctctatgttgctcaaggcacgtttggggagtgcagctcggaggcagaggtgcagtcctggatgcgctacaacatctttctcctcctggaggtgggcacgttcaatgctttggtggagcttctgaacatggaaatagacaacagtgccgcctgcagcagtgctgtgaggaagcctgccatctccctggctgacagcacagacctcagggtcctgctcaacatcatgtacctgatagtggagaccgttcatcaggagtgtgagggtgacaaggctgagtggaggaccatgcggcagaccttcagagccgagctgggctccccgctgtacaacaatgagccatttgccatcatgctgtttgggatggtgaccaaattttgcagtggtcacgcccctcactttcccatgaagaaagttctcttgctgctctggaagacagtattgtgcacgctaggcggctttgaggagctgcagagcatgaaggctgagaagcgcagcatcctgggcctccccccgcttcctgaggacagcatcaaagtgattcgcaacatgagagcagcctctccaccagcatctgcttcagacttgattgagcagcagcagaaacggggccgccgagagcacaaggctctgataaagcaggacaacctagatgccttcaacgagcgggatccctacaaggctgatgactctcgagaagaggaagaggagaatgatgatgacaacagtctggagggggagacgtttcccctggaacgggatgaagtgatgcctcccccgctacagcacccacagactgacaggctgacttgccccaaagggctcccgtgggctcccaaggtcagagagaaagacattgagatgttccttgagtccagccgcagcaaatttataggttacactctaggcagtgacacgaacacagtggtggggctgcccaggccaatccacgaaagcatcaagactctgaaacagcacaagtacacgtcgattgcagaggtccaggcacagatggaggaggaatacctccgctcccctctctcagggggagaagaagaagttgagcaagtccctgcagaaaccctctaccaaggcttgctccccagcctgcctcagtatatgattgccctcctgaagatcctgttggctgcagcacccacctcaaaagccaaaacagactcaatcaacatcctagcggacgtcttgcctgaggagatgcccaccacagtgttgcagagcatgaagctgggggtggatgtaaaccgccacaaagaggtcattgttaaggccatttctgctgtcctgctgctgctgctcaagcactttaagttgaaccatgtctaccagtttgaatacatggcccagcacctggtgtttgccaactgcattcctttgatcctaaagttcttcaatcaaaacatcatgtcctacatcactgccaagaacagcatttctgtcctggattaccctcactgcgtggtgcatgagctgccagagctgacggcggagagtttggaagcaggtgacagtaaccaattttgctggaggaacctcttttcttgtatcaatctgcttcggatcttgaacaagctgacaaagtggaagcattcaaggacaatgatgctggtggtgttcaagtcagcccccatcttgaagcgggccctaaaggtgaaacaagccatgatgcagctctatgtgctgaagctgctcaaggtacagaccaaatacttggggcggcagtggcgaaagagcaacatgaagaccatgtctgccatctaccagaaggtgcggcatcggctgaacgacgactgggcatacggcaatgatcttgatgcccggccttgggacttccaggcagaggagtgtgcccttcgtgccaacattgaacgcttcaacgcccggcgctatgaccgggcccacagcaaccctgacttcctgccagtggacaactgcctgcagagtgtcctgggccaacgggtggacctccctgaggactttcagatgaactatgacctctggttagaaagggaggtcttctccaagcccatttcctgggaagagctgctgcagtgaggctgttggttaggggactgaaatggagagaaaagatgatctgaaggtacctgtgggactgtcctagttcattgctgcagtgctcccatcccccaccaggtggcagcacagccccactgtgtcttccgcagtctgtcctgggcttgggtgagcccagcttgacctccccttggttcccagggtcctgctccgaagcagtcatctctgcctgagatccattcttcctttacttcccccaccctcctctcttggatatggttggttttggctcatttcacaatcagcccaaggctgggaaagctggaatgggatgggaacccctccgccgtgcatctgaatttcaggggtcatgctgatgcctctcgagacatacaaatccttgctttgtcagcttgcaaaggaggagagtttaggattagggccagggccagaaagtcggtatcttggttgtgctctggggtgggggtggggtgtttctgatgttattccagcctcctgctacattatatccagaagtaattgcggaggctccttcagctgcctcagcactttgattttggacagggacaaggtaggaagagaagcttcccttaaccagaggggccatttttccttttggctttcgagggcctgtaaatatctatatataattctgtgtgtattctgtgtcatgttggggtttttaatgtgattgtgtattctgtttacattaaaaagaagcaaaaataattcccgttggcttgtctacaggaaatatggcctctacgtatctcctccaggtctagaaagtggttttttctgct

SEQ ID NO: 463023 - DNA, 2368 bp, Homo sapiens
gatagcgccactgcactccagcctgggcgacagagcgagaccatctcaaaaaaaaaagttagaggtcctcttcagcccccgggatccccagctcttcccaggcattgtgctgggattagaccacaaggttgccccaggccctgccctcaaagagctcccagtccacctcccagtgcacaggctgagacacgtctagtgcagggttaagaatacagactgagtcaggaacctgcctctgatgcctgggtccaccactttatggatggcaacttaggcaagttactgggtctctctatgctttatttccttgtctgtgaaataggaataataatacctttatagggttataataataaggatgaactgagttattacaagtaaaatgcttggcacattgtttgtgttcagggtttgctgttatcatcattaacatcattatgtacatcactgtttacaggttttcctccagccagctaggaagctggctcaggagattgtattctgggctggggttttatgcttgtactcattatgttaagggagaagaagaagttgagcaagtccctgcagaaaccctctaccaaggcttgctccccagcctgcctcagtatatgattgccctcctgaagatcctgttggctgcagcacccacctcaaaagccaaaacagactcaatcaacatcctagcggacgtcttgcctgaggagatgcccaccacagtgttgcagagcatgaagctgggggtggatgtaaaccgccacaaagaggtcattgttaaggccatttctgctgtcctgctgctgctgctcaagcactttaagttgaaccatgtctaccagtttgaatacatggcccagcacctggtgtttgccaactgcattcctttgatcctaaagttcttcaatcaaaacatcatgtcctacatcactgccaagaacagcatttctgtcctggattaccctcactgcgtggtgcatgagctgccagagctgacggcggagagtttggaagcaggtgacagtaaccaattttgctggaggaacctcttttcttgtatcaatctgcttcggatcttgaacaagctgacaaagtggaagcattcaaggacaatgatgctggtggtgttcaagtcagcccccatcttgaagcgggccctaaaggtgaaacaagccatgatgcagctctatgtgctgaagctgctcaaggtacagaccaaatacttggggcggcagtggcgaaagagcaacatgaagaccatgtctgccatctaccagaaggtgcggcatcggctgaacgacgactgggcatacggcaatgatcttgatgcccggccttgggacttccaggcagaggagtgtgcccttcgtgccaacattgaacgcttcaacgcccggcgctatgaccgggcccacagcaaccctgacttcctgccagtggacaactgcctgcagagtgtcctgggccaacgggtggacctccctgaggactttcagatgaactatgacctctggttagaaagggaggtcttctccaagcccatttcctgggaagagctgctgcagtgaggctgttggttaggggactgaaatggagagaaaagatgatctgaaggtacctgtgggactgtcctagttcattgctgcagtgctcccatcccccaccaggtggcagcacagccccactgtgtcttccgcagtctgtcctgggcttgggtgagcccagcttgacctccccttggttcccagggtcctgctccgaagcagtcatctctgcctgagatccattcttcctttacttcccccaccctcctctcttggatatggttggttttggctcatttcacaatcagcccaaggctgggaaagctggaatgggatgggaacccctccgccgtgcatctgaatttcaggggtcatgctgatgcctctcgagacatacaaatccttgctttgtcagcttgcaaaggaggagagtttaggattagggccagggccagaaagtcggtatcttggttgtgctctggggtgggggtggggtgtttctgatgttattccagcctcctgctacattatatccagaagtaattgcggaggctccttcagctgcctcagcactttgattttggacagggacaaggtaggaagagaagcttcccttaaccagaggggccatttttccttttggctttcgagggcctgtaaatatctatatataattctgtgtgtattctgtgtcatgttggggtttttaatgtgattgtgtattctgtttacattaaaaagaagcaaaaataattcccgttggcttgtctacaggaaatatggcctctacgtatctcctccaggtctagaaagtggttttttctgct

SEQ ID NO: 463024 - DNA, 2165 bp, Homo sapiens
aagggatttgatcactgtacgtgaaaatattaaggacagaatatcgcgaggtattggtcagccaagatggcttctaacactggccgccacacttaatatggcggccagggaaatttcctggagaaaatcacgcgagagttgcatcacggcggctgtgcgcgagttaagctgggggtgtggagcagccaagatggagccggcagtcggcggtccgggcccactgatcgtgaacaacaaacagccccagcccccgccacctccgccgccggcagccgcacagccaccacccggggcaccgcgggccgccgcgggcctcctgcctgggggcaaagcccgcgagttcaaccgcaaccagcgcaaagactcagagggctattcggagtcaccagacctggagtttgagtatgctgacacagacaagtgggctgcagagctctcggagctttacagctacacggaagggccagaattcctgatgaatcgaaaatgctttgaggaggacttccggatccatgtgacagacaagaagtggactgagctggataccaaccagcaccggacccatgccatgaggctcctggatggcttggaagtcactgccagggagaagagactcaaggtggctcgagcaattctctatgttgctcaaggcacgtttggggagtgcagctcggaggcagaggtgcagtcctggatgcgctacaacatctttctcctcctggaggtgggcacgttcaatgctttggtggagcttctgaacatggaaatagacaacagtgccgcctgcagcagtgctgtgaggaagcctgccatctccctggctgacagcacagacctcagggtcctgctcaacatcatgtacctgatagtggagaccgttcatcaggagtgtgagggtgacaaggctgagtggaggaccatgcggcagaccttcagagccgagctgggctccccgctgtacaacaatgagccatttgccatcatgctgtttgggatggtgaccaaattttgcagtggtcacgcccctcactttcccatgaagaaagttctcttgctgctctggaagacagtattgtgcacgctaggcggctttgaggagctgcagagcatgaaggctgagaagcgcagcatcctgggcctccccccgcttcctgaggacagcatcaaagtgattcgcaacatgagagcagcctctccaccagcatctgcttcagacttgattgagcagcagcagaaacggggccgccgagagcacaaggctctgataaagcaggacaacctagatgccttcaacgagcgggatccctacaaggctgatgactctcgagaagaggaagaggagaatgatgatgacaacagtctggagggggagacgtttcccctggaacgggatgaagtgatgcctcccccgctacagcacccacagactgacaggctgacttgccccaaagggctcccgtgggctcccaaggtcagagagaaagacattgagatgttccttgagtccagccgcagcaaatttataggttacactctaggcagtgacacgaacacagtggtggggctgcccaggccaatccacgaaagcatcaagactctgaaacagcacaagtacacgtcgattgcagaggtccaggcacagatggaggaggaatacctccgctcccctctctcagggggagaagaagaagttgagcaagtccctgcagaaaccctctaccaaggcttgctccccagcctgcctcagtatatgattgccctcctgaagatcctgttggctgcagcacccacctcaaaagccaaaacagactcaatcaacatcctagcggacgtcttgcctgaggagatgcccaccacagtgttgcagagcatgaagctgggggtggatgtaaaccgccacaaagaggtcattgttaaggccatttctgctgtcctgctgctgctgctcaagcactttaagttgaaccatgtctaccagtttgaatacatggcccagcacctggtgtttgccaactgcattcctttgatcctaaagttcttcaatcaaaacatcatgtcctacatcactgccaagaacagcatttctgtcctggattaccctcactgcgtggtgcatgagctgccagagctgacggcggagagtttggtgagtggctgggctctcc

SEQ ID NO: 463025 - DNA, 352 bp, Homo sapiens
tgaggagctgcagagcatgaaggctgagaagcgcagcatcctgggcctccccccgcttcctgaggacagcatcaaagtgattcgcaacatgagagcagcctctccaccagcatctgcttcagacttgattgagcagcagcagaaacggggccgccgagagcacaaggtgaggacgacagaggtccctgtgactcctgagggccctcaaggtgcatgcttgcagcagcacagtccttggaggagcagggctgctggaaatgatctctgatcagccagtcagaatcatgcctccacagcgaggatactttgtccccagctctggtccagtgtatggtgagtgctcagcacgtgg

SEQ ID NO: 463026 - DNA, 1270 bp, Homo sapiens
agaaacacctacttggaaagcaccgaaacaactgaattggaaaatgtggaaaggggattgggggaggggactctttctgagatctggctccagtactaacagcaaagggaacttgggcaaattacagactctctgtgccttggttttgtcatcagcaaaacagaatcatcccataaactacctggacccatttcaaggagctttgggaagagcccagatcactgatggaattggacagtgcgtggaaatggttcagcaggacgagggatcaccaaccacccgtgaccatgagcttgatcttgccagaccgttacctggtacactggctgctacctccctcactcttgtcagagtcggagctacaggcagtgccttcagctctgagctcaggcatcccggtccctgtttttgcggttaaggactctaaagtgttgtgtcgtgttcatcaactttttctcaacctccctggctctacctcttctgccacaaacgtcagcatggtggtatctgccgaccctttgtccagcgagagggcagagatgaacatcctagaaatcaaccaggaattgcgctcgcagctggcagagagcaatcagcagttccgagacctcaaagagaaattccttataactcaagctactgcctactccctggccaaccagctgaagaaatacaagtgtgaagagtacaaagacatcatagactctgtgctgagggatgaactgcagtccatggagaagctggcagagaagctcaggcaagctgaggagctcaggcagtataaagccctggttcactctcaggcaaaagagctgacccagttacgggagaagttacgggaagggagagatgcctcccgctggctgaacaagcatctgaaaaccctcctcactcctgatgaccctgacaagtcccagggtcaggacctccgagagcagctggctgaggggcacaggctggcagagcaccttgttcacaagctgagcccagaaaatgatgaagatgaagatgaggatgaagacgacaaagacgaggaggttgagaaagtacaggaatcacctgcccccagagaggtgcagaagactgaagaaaaggaagtccctcaggactcactggaggaatgtgctgtcacttgttcaaatagtcacaacccttctaactccaaccagcctcacaggagcaccaaaatcacatttaaggaacacgaagtcgactctgctctggttgtagagagtgaacaccctcatgatgaagaggaggaagctctaaa

SEQ ID NO: 463027 - DNA, 2945 bp, Homo sapiens
tcattgccccagcaaccacagggcctgggactggggggttcccagatccttgaagctcactccgcctcctcactctcactgcatttcccaccttcctgtgtgccttgcggcatcttcatcactgaggcacctggttacgcttcacctcttgtttcctgccctcactgcattccctcacctctacctttttatccttccaccctaggcttctctcctccctcttccctcactcctgactcttcctcttcccagcggacggctggaggaccgctcagtctctcctctctcacttcccttcctctctctcaccttcaccacccaacacctccctccctgcctctttctttctgctccctcattctctccccaccactctcttctcgtggcccccttgcccgcgcgccctcttcccttccccttgcctcactctctcagctttcttcccacagttgagctcgggcagctctttctggggatagctatggggctttgggggaagaaagggacagtggctccccatgaccagagtccaagacgaagacctaaaaaagggcttatcaagaaaaaaatggtgaagagggaaaaacagaagcgcaatatggaggaactgaagaaggaagtggtcatggatgatcacaaattaaccttggaagagctgagcaccaagtactccgtggacctgacaaagggccatagccaccaaagggcaaaggaaatcctgactcgaggtggacccaatactgttaccccaccccccaccactccagaatgggtcaaattctgtaagcaactgttcggaggcttctccctcctactatggactggggccattctctgctttgtggcctacagcatccagatatatttcaatgaggagcctaccaaagacaacctctacctgagcatcgtactgtccgtcgtggtcatcgtcactggctgcttctcctattatcaggaggccaagagctccaagatcatggagtcttttaagaacatggtgcctcagcaagctctggtaattcgaggaggagagaagatgcaaattaatgtacaagaggtggtgttgggagacctggtggaaatcaagggtggagaccgagtccctgctgacctccggcttatctctgcacaaggatgtaaggtggacaactcatccttgactggggagtcagaaccccagagccgctcccctgacttcacccatgagaaccctctggagacccgaaacatctgcttcttttccaccaactgtgtggaaggaaccgcccggggtattgtgattgctacgggagactccacagtgatgggcagaattgcctccctgacgtcaggcctggcggttggccagacacctatcgctgctgagatcgaacacttcatccatctgatcactgtggtggccgtcttccttggtgtcactttttttgcgctctcacttctcttgggctatggttggctggaggctatcatttttctcattggcatcattgtggccaatgtgcctgaggggctgttggccacagtcactgtgtgcctgaccctcacagccaagcgcatggcgcggaagaactgcctggtgaagaacctggaggcggtggagacgctgggctccacgtccaccatctgctcagacaagacgggcaccctcacccagaaccgcatgaccgtcgcccacatgtggtttgatatgaccgtgtatgaggccgacaccactgaagaacagactggaaaaacatttaccaagagctctgatacctggtttatgctggcccgaatcgctggcctctgcaaccgggctgactttaaggctaatcaggagatcctgcccattgctaagagggccacaacaggtgatgcttccgagtcagccctcctcaagttcatcgagcagtcttacagctctgtggcggagatgagagagaaaaaccccaaggtggcagagattccctttaattctaccaacaagtaccagatgtccatccaccttcgggaggacagctcccagacccacgtactgatgatgaagggtgctccggagaggatcttggagttttgttctacctttcttctgaatgggcaggagtactcaatgaacgatgaaatgaaggaagccttccaaaatgcctacttagaactgggaggtctgggggaacgtgtgctaggcttctgcttcttgaatctgcctagcagcttctccaagggattcccatttaatacagatgaaataaatttccccatggacaacctttgttttgtgggcctcatatccatgattgaccctccccgagctgcagtgcctgatgctgtgagcaagtgtcgcagtgcaggaattaaggtgatcatggtaacaggagatcatcccattacagctaaggccattgccaagggtgtgggcatcatctcagaaggcactgagacggcagaggaagtcgctgcccggcttaagatccctatcagcaaggtcgatgccagtgctgccaaagccattgtggtgcatggtgcagaactgaaggacatacagtccaagcagcttgatcagatcctccagaaccaccctgagatcgtgtttgctcggacctcccctcagcagaagctcatcattgtcgagggatgtcagaggctgggagccgttgtggccgtgacaggtgacggggtgaacgactcccctgcgctgaagaaggctgacattggcattgccatgggcatctctggctctgacgtctctaagcaggcagccgacatgatcctgctggatgacaactttgcctccatcgtcacgggggtggaggagggtgaggaggcagggtgcccatggtggagacttcaaccctggactcagggagactgagactctggtatacataatatcgtcattgtcctctcactggacttcaagagagatccagaattctgcattccaggttccctgctttctgcctggagct

SEQ ID NO: 463028 - DNA, 817 bp, Homo sapiens
gttgcttccaagatggctgaataggaacagctccggtctacagcttcaagtgagatagacgcagaagacaggtgatttctgcatttccaactgaggtacctggttcatctcactgggactcgttggacagtggatgcagcccacggaggatgagccaaagcagggtggggtgtcgcctcacccgggaagtgcaaggggttgggggatttctttttcctagccaagggaagctgtcccatgcccatggagccttgcctgctgctagcacagcagtctgagatcaacctgatagttggatatatatatatatatatatgcggaatgctacatcacaagaataagaatgtgaaaagaaccagtttcttttgtaatcctaaacgttctagtctgagaattaaaagccattgttcgaagaagggtgcccagggtccagctggtcgccgaaagcttgtccgcaatacaggctaaggaccagcttctttggaagagaacagatgagggaagcaggagagaaaaaagggagaggcagacgtcacttccccttgccggctccggcagcggatgagccagcgcaggggctgctgcttcgccacatgctgcttcgccacgaaggagttcccgtgccgtgggagcgggttcaggaccgctggttttgtttgctgcagaaacgcatactgggcgtcagcgtaagctgagaatcaggtctttgttcccatctgtaacttcactgaaactaaaaatttgggacatcgtggttctcacgtttgtaatcccagcaatctatgagtgtggcccaaggaagccaaaatttagacaa

SEQ ID NO: 463029 - DNA, 3084 bp, Homo sapiens
ttccctagagcctcctccgcaaagctgaggagctcctgccaagcaccgccttaggtattacttcctccagaggctcccagcaccatgacggtttcatacactctcaaagtggcggaggcccgcttcggaggtttctctggcctgcttctccgctggaggggaagcatctacaagctcctctacaaggaattcctcctctttggggccttgtacgctgtgcttagcatcacctaccggctgctgctgacccaggagcagaggtacgtgtatgctcaggtggcccggtactgcaaccgctcagcagacctcattcccttgtcctttgtattgggtaaggctcccttctagttttccctgtgtcccccttactgtgttccctgacctctgggttgggttgacagctccgagggtcagaattacccaacagatggtgtggtgacacacctgcagtctcagctactcgagaggctgaggtgagaggatcgcttgagcccaggagttccagtccagcctgggcaatgtagcgagactctgctaaaaaaaaaaaaaaaaaaaaaaagaattactcaacacggtggcagagccttcctggtcagccagagcaggcccagcaggcacaggagctgggtgctgggtccaggacttccagagggcagggccctatcacttgccggaccctcacttccagcaaggcacaagacacctgctggcctcacaagcccaccctgggcactgcaggggagctggacagaggtgacaaccccttccccaccctcctgggaagcagtctcctggctttgaatccccactttccctctgctgaaggaagtttgccctcctccctcctcctggcctcgcacagcagggcactggagctgaatgtttccttccccctgccacgattcaactggcctggaccaggccctttgctgggggaggctctccactctcccttcctactccctctatcacggcggccaagcaggtttctatgtgactctcgtggtgaaccgctggtggtcccagtacacaagcatcccgctgccagaccagctgatgtgcgtcatctcggctagcgtgcacggcgtggaccagcggggccgcctgctgcgccgcaccctcatccgctacgcgaacctggcgtccgtgctggtgctgcgctcggtcagcacccgcgtgcttaagcgcttccccaccatggagcacgtggtggacgcaggtgcgccgcccgccgggagcctctgggggtccggcccacagccggatgcaggaacgcggaaccgcgagtcctgggacagccggtggacgcgagggaggggagccagacggcggaacagcagcctcccctggcggcagagggtgcaactgcaccccacctgctttaccccctcaggtttcatgtcccaggaagagaggaaaaagtttgagagcctgaaatccgacttcaacaagtactgggtcccctgcgtctggttcaccaacctggcggcccaggcccggagggacgggcgaatacgtgacgatatcgctctctgtctacttttggaagagctgaacaagtaccgagccaagtgcagcatgctattccactatgactggatcagcatccccctcgtggtgaccatagccgtctactctttctttgccctctccctggttggccgccagtttgtggagccagaggcaggggctgccaaacctcagaagcttctgaagccaggccaggagccagccccagccctgggagacccggacatgtacgtgcctctcaccactctgctgcagttcttcttctatgctggctggctcaaggtggctgaacagatcatcaacccatttggtgaggatgatgacgactttgagacaaatcagctcatagaccgcaacttgcaggtgtccctgctatccgtggacgaaatgtaccagaaccttccccccgctgagaaggaccagtactgggatgaggaccagccgcagccaccctacactgtggccacggcggccgagtctctgcggccctcattcctgggctccaccttcaacctgcgccgatcccgcgtccccgctcccgccctgtgccccggctcagcccgccctcccgcccgcagcatgagcgacgaccctgagcagagcctgcaggtggaggcgtcccccggatctggtcggcccgcgcccgccgcgcagaccccgttgctcggccgcttcctgggcgtaggggcgccctccccggccatcagcctccggaacttcggccgcgtgcgaggcaccccccgccccccgcatctgctgcgcttccgggcggaggagggcggcgaccccgaggccgcagcccgcatcgaggaggaatcggcggagtccggggacgaggccctggagccctgaggtctcgcctgcccccgcccggtttcccccacccactgccctccttccctcccgtgcccggtcctgccagccagctctattagagcagcttttcctgtgtgccttgaaggccagagcatttagggacagaacttgaaagagaagatggcgaaaagggcctgagccagggctgggaatgtgtccactttggtgggagagaaggtcggttgcttgggggacgtgaagctagaaaaataaatgagcccaggcatagaggactagagcccaggtgatgctgtgctgcttgtccaggaaacacaatttgagagtcatgtgaaacgtgcttgaaggggtataccttaccctggtaaccttactcaaaagaagggtcagtgtgtgctgggggacttttgccttgtttgtaatgttaaagtttttgtttacattgagaatatattcaagtttttgtttaagtgttgtttagtttttgtttatattgagaatatatttattacttgtgcagttataattgtttaaaattgaattggcatgcatgcagtaggatgaagatgaaggaagggtttgggaatctgtcttggaggctgattaaagtcagatgtgaaggcagccatccaccacccaccctagacctagcatttggacttgtgtgccaagctcttctccactgccaccaaccacacagggggaaaaagtacagtttac

SEQ ID NO: 463030 - DNA, 3259 bp, Homo sapiens
caacagccatttgatgccagtaaacctcctattgactttttggaaaaagcaggatgaaatgcacttttctggaatatctggatggcaaaacatctgtatcagcattaatataagcccaacttcaatgtctcagggcttatggaaaatatttgcatttttctttcctcaagagactgccttatttcatatatgtatgtgtgtgtatgtgtgtttatatataattttatatgtatatgtgtgtatgtatatatacacgtatatgtgtaaatatacgtatatatacacgtatacacatacatatacgtgtatacgtgtatatatacatatatacatatatgcatacatatatatatacgggcaaagacttaatatactatccacaggctattcagattgttcaagaggctctcagttgaagaagcaaacagacaaacaaaacggtttcatacacaggcaggcatttggctgagtaggtcggcaggatatggaaacttgctttgaggtgtttttggattctcacctagaattctactacttaatggctgtgtggcttctttgcaggctatatactgaattcataaaggatgttatgagagtaaattcaaagaattctgatgttttgaaatttgttgtgacttggttaactatggtgaaatgttacattcgtgttacattatggcttttgtttatacgggtctgattatgggataacttaataaagttgtaaaaaactctatgtttttcaaaaattctgtgtttttcttatgtgaagaatttgtttcaactattcttcaaacaccagaaaaggagtcaccgtatactttacttttcatataaagattactcaatatattttaaaatgggtgttccagaattagacttccagattccttgaattgagagtgtggaaaaggataggcagctcctgtaataggagacattcttttaaaagcctggaatgctgaaaccctcttagactgaaaacatgtcaggacatgcctttttgggatactgtcaaacggtttaggctcagaattccacattccgtacttttgaagttgttttctgttggcaaatgacctcttgattattttcatgtgttttacatagtttgaaagtggctgactgagaatttgaatataggtccgacataattcaaatattgtgctcttgaccacttaactaaattaactctactttctgattgattcacatatgttgaaatctactcattctcctcctagtgtcattatgtttgtttattctctcctttatatttttaaggcctgctggtctatcctttccaggatctacacttatgctggacccactaagctgtcctagaacatcatagtaaatgttcaccagatattaattatttgagtgagaatggttgtgagcattgggtactcccccagccagtacccttctctcttgcagtagtatattttgtagattaaataaaactcaagataaaaaaaacaaattaataaatgatcaatggaaacagaaatttggaacataaaagtattatttcaaaatgaacacattatatgtaaaagctcacaaccaggaatttcttcagttgggtttgcagcaatgttatgtcactaatactatatttctctctgtatggccaaacctgtaaagcctcaatatctgattatggagcacatctagactgttaaaaagctttctataatattaataaaatcaaataataaataaaaattaaattgactaatcatagcaatttcattttgagaatgttttgtaggctgaaggcaaatccttgagatatttttgcaggagcgtcattgcgaaacagaatctgcagtagaactatgtcatcttctggttctgagtgtgccctctcattgctggcagatggcaagtatttatttgcttgctagctctttagtggaactggtcttctgtttccactgtcgcctcgtgtgacacaaactgccacctatctcccaaggttctttctttgtaacagaaccctagtttttggctggactcatttccccagtggtagaggctgctggctggtcatgtcatgagcccaggtcttcttcttgggcacaaccagatgccatttctcagcctcccttgcagttatatgcagctgtgtgtttgagttctggccgttagtgagtggaagtgatgtgtcccttctactcacacttctgtagtcctggcctacagaaactcacaatggttctctatactctttatctttccacagcttaatgcagttaagtaacaagatcttggaagacaagtgttgaaggtgaaagaggcacaagatagaagaaacctgggtccttagatccttgcttggaggaaaaccacctgccaatccagaacatcattttggacttcatttcatattagatattatgttaccaatgagcagggactatgatgaatgtgtctttagaacacccaatgaagtgccacttgccacaagaagctaagtcacaatctgatggccagaggaggcaatcattcttcctacagttttgtgcataaaccttcctgcctctctgctggggaccacctatggggaaaggaaaacttctctctcatggctctcctttcccaggaaaactttagctcctgttgagaccaacaccttccctggagaatgcagagtgaagggattaggcccatcacaattttccattcatgatgttgggtcaagcaaggcatcacacagaatgaatagaaacagaaacagccccacatgtgaagtaggagccatgctggaatgaacaagggccacggtatggcagttacctcttgttagtgtgcaagactatgcaaagccttctccctaatgctgattttctatttctaaattgctgtgggcatagagaaactcacactggttaaggatatgtgtgcaataaacataaatgcttttcaagtcaggaactgagggctggttcttctctgagaaaagcataagaaaagcgtctctcaagtgttgttttattttttaaaaaattcattgtttctaagctattttctagatatgtgaggctagcaatggctcagttctatgtaaataaaaatatatattaagtattgtcaacctacccgccccacccctggcagagattgcttactcaaatgcttacattcggatgatatatatctttcttgccctgaagttttgaaaattttaatagctccatggattgaaatgacatgagagaaaaatatttcaagtctcttttagaatttttat

SEQ ID NO: 463031 - DNA, 1318 bp, Homo sapiens
tctttccctctttctgggtctccatggaacagacagctgagacaagcctgctagcctcattgcctttgcacaagctcttccctctgcctggaacacttgttgcttcaggagtcggctcgatgtaacttctacagggacctgagccccaatccaagttagacacctggttattgcagcagcctgtatctcaccgtcccagaatgaatcatgactgcaatgaaaacgatggcatgagcatttgttaccatcaggcttccgccctagattatgagctccctgaggacaagcagagggttcatctctctttatagctagaacccagcacagcgcctggcactcaggaggcacccaattactttggctgactggatagacatacatacagacggacggataaatggctggaagaggagtgattgaaaaaatacattttaaaatgccctggctgcatttcttagagcagttataatgcgcgcaattcacacgggaattattttcaccctttgagggtccgcacccaccggtgccccagtcgcctttcccaggcaaggccactgggcggggcatccggggccgtcggagtgacgtaacagcggggcgcgtccggagccggccctcacttcctgattggcaagcgcggtggccacacccaccgccgcagccgtcggagtagagatggtggcagcgatgggcggagggggaggcccggcgttcgcgcagacggcggtggggcggtggggcggtggggcggtggggcggccgcgccggcttcagggcgtcggggtctcccggggcacgttcatgaagccggcgaggtggagactgggcgccgagcggtttgcgaggctcgcgcggttccggggggcagtgggacggcggagggctcgtgcgctgcggctggaccgctccccgcggcgggccgggcacaggcgaggaaagtcccagaaacacagccccaccctccctctcaccctccttgacacgctcgcctcttccccaccaccccaaactcagacccagaagaactgcgggaaactaggcgcctgcagacctggtttcttagccctaactctgtgtgacccagaacaggagtccatgacttgtggacgttatgacacaaacctctgctgggatcacttcttccctgagccatcccctcacaccttttacctggctaactcctcatccctgatcatcatggaagaggatggatcctgacccctaaggtgggtctcagttcagctgaggactgacctaaacactcttcccttccctatttaacttgtatttatccttcaaaaaaaaaaaatctcagttt

SEQ ID NO: 463032 - DNA, 1185 bp, Homo sapiens
gtgaattattcctgcttttaggtcacagtttcagtacagaactctgagaggcccaaaaatgtgaatgtggtcttccagtcacttactaagtaagtgccctgttcgttatcggatcgactgccgtgatattgcaatgcttgtgttcaagtcacccttatttgacttaataatggccccaaagtgcaagagtagtcatgctagcaatttggatatggcaaagagaagccataaagttctttctttaaatgaaaagtggacgagcatctactgtgctttcacagcggctatcactattgccagcagcaagactgtcagctcggcgccctcgtctggttggatgggaaactgcaactgccgtcctctcatttcctcacatggtggagaacaaggagcaagagcaactctcatttctcttatgagggagaatcctattcatgaagcctctacccacgtgacctaattacctccaaaggcctatctaatactgtcacactgggtcttaggatttcagcataggcattttggggggacacaaacatttagtccataacacttgagttgcatctttttaaatgcatattctgaggccccaacccaagactctgtgcttgagaaacagatacagtgatataaaattttgatggctggaactttccttagtctttgaaaagagttgagacaatagacatcatagagaagttcagggggccgggcgaggtgcctcatgcctgtaatccctgcactttggaggccaaggtagagtgattaagctcaagagttcaagaccagcctgggcaacacggcaaaactccatctcccaaaaaaataccaaaaaattatctgggagtggtggtgcacatctgtagtcacagctacttgggaggctgaggtgggaggaatacttgagcctgggaggttgacgctgcagtgagccaagatcccaccgctgcactccagcctgggtgacagagtgagactgtctcaaaaagagtgagagaaagaagttcaggggcctctgaagacaaactgtttcaccatttagcaaataaccaggaagagatgaaagtggatgagaaaccctgtgatgggggcatctgtcaagttgataagccaggtaggattctgctgggcatcagttacatgaagcagacaaaagatatcattcttagaaatgactgttgaact

SEQ ID NO: 463033 - DNA, 1357 bp, Homo sapiens
gtgaattattcctgcttttaggtcacagtttcagtacagaactctgagaggcccaaaaatgtgaatgtggtcttccagtcacttactaagtaagtgccctgttcgttatcggatcgactgccgtgatattgcaatgcttgtgttcaagtcacccttatttgacttaataatggccccaaagtgcaagagtagtcatgctagcaatttggatatggcaaagagaagccataaagttctttctttaaatgaaaagtggacgagcatctactgtgctttcacagcggctatcactattgccagcagcaagactgtcagctcggcgccctcgtctggttggatgggaaactgcaactgccgtcctctcatttcctcacatggtggagaacaaggagcaagagcaactctcatttctcttatgagggagaatcctattcatgaagcctctacccacgtgacctaattacctccaaaggcctatctaatactgtcacactgggtcttaggatttcagcataggcattttggggggacacaaacatttagtccataacacttgagttgcatctttttaaatgcatattctgaggccccaacccaagactctgtgcttgagaaacagatacagtgatataaaattttgatggctggaactttccttagtctttgaaaagagttgagacaatagacatcatagagaagttcagggggccgggcgaggtgcctcatgcctgtaatccctgcactttggaggccaaggctggtctcaaactcttgaactccagcaatccaccctccttggcctcccaaagtgttgggattacaggcatgagccacagtccctcctaaccccctacccctgttttttttttgagacaaaaaaagagatgggaaagaaaaagccccaaagaaactgctcagtacaccaaggatcacaaaagggtaatttgtaatttggtgatttgtatgtagtgtagcacagaaaaaaaattgcacaagtttttccataaatgagaccaaaggttcaaattcatcctgtgtcaggttcaaattcatcctgtgtctgctctgcagccattttagtaagctgggcaaggaggtcatttagaaattgggtttttcctctttcccctgactcttcgcaccaagtcacatccctgatgtagatactcttgggggaggggaaaacatctggctctatgcaaacagggctcatcaaaaatctttatgtgccaaaatggatactgacattgctatgaacaaatctgttttttcttccctccctgcctaaagactcctaataagggacattaaatcatacacaactgaatctaagatatgaaaaactagtttcaatgac

SEQ ID NO: 463034 - DNA, 1427 bp, Homo sapiens
tttggtcagaacttccccaagtggagtgaaactcaggagctgagaaaccgagtcactgtgaaaagatgggaaattatctcctgcgaaaactcagttgcctgggagagaatcaaaagaagcccaagaaaggaaacccagatgaggaaagaaaacggcaggaaatgactacatttgaaagaaaacttcaagatcaagataagaaaagccaagaagtttcatccacttctaatcaggaaaacgagaatggcagtggttctgaagaagtgtgctacactgtcattaatcacatcccccatcagagatcctccctgagctccaatgatgatggctatgagaacattgactccctcacaaggaaagtgagacagtttagagaaaggtcagagacagaatatgcccttcttaggacttctgttagtaggccttgttcctgcacccatgagcatgattatgaagttgtgtttccacactaaaatcctcaagctgctttatcaccttccagcaatgaagacaatgcagaatagcagactctggcgaagttgttcaccctgagcagtgcatgaaacattcctttctggctaaagtttagaaatattatcttattatatatccttaggcaactctgatatgtggcatctctgtggcttaggtgaaatcatagaaattgacacaatgacctaaaatattctatgtgtttttgcttgtaaagtttgaggacatggaggtgataaaaaaaactttcttaggacaataatgtaaaatgaaaataaatttctaatccccctgactaactgaatggaccctcttctaggccaaagagacctcagatgaacctgaaagactgaattctggccatgataggaagggaggtgagacacaccttgttataccccttcccttttggagtttatgcacaagtgaccaggatgagtcataagactgatgaaatagactgattgtggcaataagagtcccaattccaacctgactctggtgtagatcacacactgtctgagggattccatctatgagactttgtctacataacagagaccttggtttccacaacccctttattttagctaaagcattcttttctactgacttcttaagtctttagacaaagcttaactctttcaaccaattgccaatcagacaaactttgaatctacctatgacctgtaagctctctcctgcttcaagatcttgcctctttaagctgaaccgatgtgcactttccatttaatgatttatgtctttgcttgtaactcctgtctccctaaaatgtataaaagtaaacggtgacctgaccacctcaggcacactttctcaggacctcctgagagtgtatcccaggccatggtaagtcatgttggctcagaatcaacctctttaaatattttacagaatttgggttttggttacca

SEQ ID NO: 463035 - DNA, 1379 bp, Homo sapiens
tcgtgtgcctggaaatggctaacatggggaattttatgttatatgaattagttacacacacatttgtaggcaatttgggagtgttcttggtcctcctggctttgcctggaaagaatgccctccccacccgctctggttccagcccaccacccttacaggcctgcaaagctccctcttcaactctggactttgtaccagtcaccggacgttcagttgtttatcaacctgagcacctgcctgctgaggtgtctgcccctctagggcccgctggacgcttctctggatcccagctgtacaaaccgcaagcattggggggtgagggtgaggtctacacccataaagttcttggcaaaagcttgggggagaggttctgccggccccagccggaagcttactccgcggattgtgcacagttcttgaaggtgggaacagaagagaaggcccgggggggccggggagggggtacccaggctctgcacagtacccaaggggcttctggcagcaggaaggaagctacacatcagagttggggacttgtgccctggggctgcctggcatctgggggcctcctcagagccagggctctttctggttgaggctgagactcactggtgtcatcaggcccctccatgaatgagacaaacaaaacacttgttgggccttcggagctccccacagcgtctgctgtggcccctggcccaggcactggggctcgggcatggcctgtgctggtaggatttgtgctgggggctgtggtcctctcgctcctcattgcacttgctgccaaatgccacctctgccgccgataccatgccagctaccggcaccgcccactgcctgagacaggaaggggaggccgcccacaggtggctgaagatgaggatgatgatggcttcatcgaggacaattacattcagcctgggactggcgagctggggacagagggtagcagggaccacttctccctctgagctcccatctttagaccctccccactccctccatgcctgacagcttaaggacagtggttatgacatgggggccttgaacctcagggacagaggtggctggggcttaaaggttggccagggatggagtaaaccccacttccctgacactagccagcaaagtgacaatgaccctctcttgctcaataactctcaactgttccctgctgttctcaggataaagccaaacaaaggcttgagtgtggacataaggccctctgtgatcatgcctctcggcctcttggtttcttttcttgccttcccctactttactgtcgaaatcaatgttattctccctcccaccacttcccatgcagtttccccaggcacctttgctcacattggtccccctgcctacgctactcttctcct

SEQ ID NO: 463036 - DNA, 1177 bp, Homo sapiens
gaccttcaaagtagtgtctctgcttaaaagtgtgggaccatccagttgcaggaaaacaagcttaacacgcccactgattctacattatgctcctacctcccagcagcctctccaggcccagaactttctccagtcagcctctacagaccaagctcatgactcacaatggcctatttaggcccataccctacctcacggcagtctccgcagatgagcctactgcctcacaacagcctccacaggcacagctccatcgttacaatggcctctttagacccagctcctgcctcccagccttctctccaggccctgaactttctcaagtcgacctcaccaggcccagctcatgcttctttgcagcctctccaggcccagctcctgcatcttggtggcacctccaggcccagcctctgcctcccgtcggcctctacaatcccaacatctgcctcacagcagattcttcaggcccagcatctgcctcactgcctagcgtttgctgctttgcatcctctccaggccctggacttcctccagtcggcctctccaggcccagctcttcctctcggcggcctctgcaggcccagactgtcgtcaagtcggcctgtccagggccagctcctgcctcccggcggcctctgcaggcccaagtcgtcctcaagttggcctccccaggcccagcaacggcctctcggcggcctttccgggtgcaaaaccgcttcggcaggcccagctcccgcctgccagtggcctcttcaggcccatggggctcattcctcacaacggcctttccaggcccagtttttcccttccggcggcctctccgggcccagaacctcctcaagtcggcctctccagacccacttgcagcctccgggcgtcctctctgggcccagctcttcctcccggctgctctccaggcccgactcctgcctctcaacaacctttttggactcagtgcctacccatctcctggcggccttggtcggcccacagcttcctcaagccaagctccccaggcccaggtcaggcctcacggtggcctctccaggatgagctcctgccctccgatggcatctgcaggccccaaatggtctccggtcggtgggctcctccacgccaagcttgggcctcccggcgacctctgcagacccaagttgtcctgaagtcggcctctccc

SEQ ID NO: 463037 - DNA, 1244 bp, Homo sapiens
cggctcccacttggttgcgactacaggtgcttgcaccatgcccaactaatatttgggaattttcatataagtggattccagaggggtgacagcaaaacgtgggaccatccagttgcaggaaaacaagcttaacacgcccactgattctacattatgctcctacctcccagcagcctctccaggcccagaactttctccagtcagcctctacagaccaagctcatgactcacaatggcctatttaggcccataccctacctcacggcagtctccgcagatgagcctactgcctcacaacagcctccacaggcacagctccatcgttacaatggcctctttagacccagctcctgcctcccagccttctctccaggccctgaactttctcaagtcgacctcaccaggcccagctcatgcttctttgcagcctctccaggcccagctcctgcatcttggtggcacctccaggcccagcctctgcctcccgtcggcctctacaatcccaacatctgcctcacagcagattcttcaggcccagcatctgcctcactgcctagcgtttgctgctttgcatcctctccaggccctggacttcctccagtcggcctctccaggcccagctcttcctctcggcggcctctgcaggcccagactgtcgtcaagtcggcctgtccagggccagctcctgcctcccggcggcctctgcaggcccaagtcgtcctcaagttggcctccccaggcccagcaacggcctctcggcggcctttccgggtgcaaaaccgcttcggcaggcccagctcccgcctgccagtggcctcttcaggcccatggggctcattcctcacaacggcctttccaggcccagtttttcccttccggcggcctctccgggcccagaacctcctcaagtcggcctctccagacccacttgcagcctccgggcgtcctctctgggcccagctcttcctcccggctgctctccaggcccgactcctgcctctcaacaacctttttggactcagtgcctacccatctcctggcggccttggtcggcccacagcttcctcaagccaagctccccaggcccaggtcaggcctcacggtggcctctccaggatgagctcctgccctccgatggcatctgcaggccccaaatggtctccggtcggtgggctcctccacgccaagcttgggcctcccggcgacctctgcagacccaagttgtcctgaagtcggcctctccc

SEQ ID NO: 463038 - DNA, 1139 bp, Homo sapiens
tggaaataaagtgcctaataaatgtaaatgtgcttaaatcttttggcccagctcctacctcccagcagcctctccaggcccagaactttctccagtcagcctctacagaccaagctcatgactcacaatggcctatttaggcccataccctacctcacggcagtctccgcagatgagcctactgcctcacaacagcctccacaggcacagctccatcgttacaatggcctctttagacccagctcctgcctcccagccttctctccaggccctgaactttctcaagtcgacctcaccaggcccagctcatgcttctttgcagcctctccaggcccagctcctgcatcttggtggcacctccaggcccagcctctgcctcccgtcggcctctacaatcccaacatctgcctcacagcagattcttcaggcccagcatctgcctcactgcctagcgtttgctgctttgcatcctctccaggccctggacttcctccagtcggcctctccaggcccagctcttcctctcggcggcctctgcaggcccagactgtcgtcaagtcggcctgtccagggccagctcctgcctcccggcggcctctgcaggcccaagtcgtcctcaagttggcctccccaggcccagcaacggcctctcggcggcctttccgggtgcaaaaccgcttcggcaggcccagctcccgcctgccagtggcctcttcaggcccatggggctcattcctcacaacggcctttccaggcccagtttttcccttccggcggcctctccgggcccagaacctcctcaagtcggcctctccagacccacttgcagcctccgggcgtcctctctgggcccagctcttcctcccggctgctctccaggcccgactcctgcctctcaacaacctttttggactcagtgcctacccatctcctggcggccttggtcggcccacagcttcctcaagccaagctccccaggcccaggtcaggcctcacggtggcctctccaggatgagctcctgccctccgatggcatctgcaggccccaaatggtctccggtcggtgggctcctccacgccaagcttgggcctcccggcgacctctgcagacccaagttgtcctgaagtcggcctctccc

SEQ ID NO: 463039 - DNA, 1092 bp, Homo sapiens
  misc_feature (3)..(3): n is a, c, g, or t
  misc_feature (5)..(9): n is a, c, g, or t
  misc_feature (12)..(12): n is a, c, g, or t
  misc_feature (14)..(16): n is a, c, g, or t
gtntnnnnntgntnnnagattgtaaaacactcagattgacttttattaccttgatcagtacaaaaagtacttactgggtttatatcgtttctcttttggtgccgagcggcttctgaggtggagatatggatctgggggatgtcagcgtagagaaggtgatggaatccacagacggcatgagctctccacagatgtgtggggatatcctgcacatacatcagctctcagggctggaggtgaccgtggaggagagggatcctgtgagctctaatacaaaaaaccgagacattctgaacgttgctatagaggttagcaaagcagaaggctctgagggtagaggatgtgcctggcaaaatccaagtgggtttctggctgaagctgttctgtgggctgccatgtttgtgggacatctcatctgcagccgccgcagcgacctccttgtccgtccagccaaggggagggaccggaagccaagcggaggggccggtagcgccgtcgttgctgatgcttctgcttttggaattcggatcataaactgacagggttcttcctgtttcttaataaagctatttgttttactgtctaatgtgtttctaagcagaaatagacaaacaaaaggacaattgattctagaagagagatttagtatggagtatttgaagaaaagtattgccttagaaataaggatgttttgtagttaattttacattaaaagttctgccatattgattaggatttagaaataacatacgaagagttcttcctgagtagcagtataggaacaccagaactctataaacattttattcatcattcttcatctgatttttttccaaaatctttttgctccctttgatttctctctttttttctgctctttcaaatgcctagacagagccatattgattaggccagtatttacatatcacatgcccctgacgtgggtttaatgccccgtagtgtttgatgctgtggtctgggaaagaatggaacaggtagctgcccgctgagtcaacgaggcccatgcagttatcatcgatttttatttttctctttaatcatttagccaaggttgcctctttaaaatatcta

SEQ ID NO: 463040 - DNA, 968 bp, Homo sapiens
gcctaggacagctcctctcctgccagagctaggcaggcgccgaagtagccgcatggccccgtcagaagaccccagggactggagagccaacctcaaaggcaccatccgtgagacaggcctggagaccagctccggtgggaagctggctggccatcagaagaccgtccccacggctcacctgacttttgttattgactgcacccacgggaagcagctctccctggcagcaaccgcatcaccaccccaagcccccagtcccaatcgagggcttgtcaccccaccaatgaagacctacatcgtgttctgtggggaaaactggccccatctgactcgggtgacccccatgggtgggggatgccttgcccaggccagggccaccctgccgctctgcagagggtctgtggcctcagcttccttcccagtcagcccgctctgcccccaggaggttcccgaggctaaggggaaacccgtgaaggctgcgcctgtgaggtcttcaacttggggaacagtcaaggactcactgaaagccctctcctcttgtgtctgtgggcaggccgattagctggaagggccgggctctgatgcccagaggctgcaattcccagggcctggccctgcttccccagctaagcaggagtcttttgtgcttgagccaaggaaacatcattagatccgctaaggggcatctgaaacatccgtcgagtggcagaggcaggataagtcacctgcacatgaagagactcattcattcatacagcaaatattactggtacatcttccacatgccaggccctgcaaagtgctggggagataccatggttttcctggagctggtatttttggggtggagggaacccaccctgaataaataaagtaacccaataaataaagaagatgattttgaacagcgatgaatgctctgcaggaactgaaacaggatgctagagggagagtgattggggtgaaga

SEQ ID NO: 463041 - DNA, 7280 bp, Homo sapiens
  misc_feature (6052)..(6052): n is a, c, g, or t
cgtctagcgctctctgtatcaatgccccaactctggttgcagagctattttgctgcatgtgaggatgagatccctgccatccggaaccatgacaaggtcctacagcgtctgtgtgagcacctggaccacgccctgctgtacggactgcaagacctctcctctggctactgggtgctcgtggtgcattttactcggagagaggccatcaagcagatcgaggtgctgcagcacgtggccaccaacctggggcgcagccgtgcctggctgtacctggccctcaacgagaactccttggagagctacctgcggttgttccaggagaacctgggcctgctgcataagtactacgtcaagaatgccctggtctgcagccacgatcacctgacgctcttcctgaccttggtgtccgggctagagttcattcgtttcgagctggatctggatgccccttacctagacctggccccctacatgcccgactactacaaacctcagtacctgctggactttgaagaccgccttcccagctcggtccacggctcagacagtctgtccctcaactctttcaactccgtcacctccaccaacctggagtgggatgacagtgcgattgccccatctagtgaggattatgattttggagatgtgtttccagcagtgccgtctgtacccagcacagactgggaagatggagacctcacagacacggtcagtggtccccgctccacagcctccgacctgaccagcagcaaggcctccaccaggagccccacccagcgccagaaccccttcaacgaggagccggcagagactgtgtcctcctctgacaccacccccgtgcacaccacctctcaggagaaggaggaggcccaggccctggacccgccggatgcctgcacggagctcgaggtcatcagggtcaccaagaagaagaaaattggcaagaagaaaaagagcagatcagatgaggaggcaagtccactccaccccgcctgcagccagaagaaatgtgccaagcagggggacggtgacagccgcaacggcagcccaagccttgggcgggactcgccagacactatgcttgcctccccccaggaggagggagaggggccgagcagcaccacggagagcagcgagcgctccgagccgggcctgctgatccctgagatgaaggacacctccatggagcgcttggggcagcccctgagcaaggttatcgaccagctcaacgggcagctggaccccagcacctggtgctcccgtgctgagcccccagaccagtcctttcggaccggctctcccggggatgccccggagaggccgccgctttgcgactttagtgaggggctttcagccccaatggacttctaccgctttaccgtcgagagtccaagcactgttacatcaggtggcggccaccatgaccctgcagggcttggccaaccgctgcatgttcctagtagccctgaggctgctggccaagaagaagagggaggaggaggagagggacagacgcctcggcccctagaggataccacgagggaggctcaggagctggaggcccagctgtccctggtcagggaggggcctgtgtctgagccagagcctgggacccaggaggttctctgccagctcaagcgagaccagcccagcccgtgtctgagtagcgctgaggattctggggtggatgagggacaggggagcccttcggagatggtccattcctcggagttcagagtagacaacaatcacctgctcctgctcatgatccacgtgttccgagaaaacgaagagcagctgttcaaaatgatccggatgagcaccgggcacatggagggcaacctgcagctgctgtacgtgctgctcacagactgctatgtctacctgctccggaaaggggccacagagaagccatacctggtggaagaggccgtttcttacaatgaacttgactatgtgtcggttggccttgaccagcagacggtgaagctggtgtgcaccaaccgcaggaagcagtttctgctggacacggctgatgtggcgctggctgagttctttttggcttctttgaagtcagccatgatcaaaggctgtcgagaacctccctaccccagcatcctgacggatgccaccatggagaagctggcactggccaaatttgtggcccaagaatcgaagtgtgaggcatctgctgtcaccgtgcgcttctacggccttgtgcactgggaggaccccacagacgagtccctgggccccacgccctgccactgctcaccccccgagggcaccatcaccaaagaaggcatgctgcactacaaggcgggcacctcctacctgggcaaggaacactggaagacgtgcttcgtggtgctcagcaacgggatcctctaccagtacccggaccgcaccgacgtcatccctctgctctcggtgaacatggggggggagcagtgcggtggctgccggagagccaacaccacggatcggccccacgccttccaggtcattctctccgaccggccctgcctggagctaagtgccgagagcgaggccgagatggccgagtggatgcagcatctctgccaggctgtgtccaaaggggtcatcccccagggcgtagctcccagcccctgcataccctgctgcctggtcctcacggatgaccgcctctttacgtgccatgaggattgccagaccagcttcttccgctctttgggcacagccaagctgggcgacatcagcgccgtctccaccgagccgggcaaggagtactgcgtcttggagttctcccaggacagccagcagctcctcccgccctgggtcatctacctgagctgcacttctgaactggaccgattgctgtctgcactgaactctgggtggaaaaccatctatcaggtggacctcccccacacggcgatccaggaagcctccaacaagaagaaattcgaggatgccttgagcctcatccacagcgcctggcagcggagcgacagtctctgccgcggccgagcctcccgagacccctggtgctgaggcagagctggttggcgtccctggtgggcaggaaaggaaggcacgccagccggcaggcacactgtcacggctgttgtcatgctgtcgggagcctacagtccacccctgccctgggcggcagaaccaccgagtgtggcttaagacagggtccctccactccagggatccagatcaggtgcccggcacccctgggcatcctgcccgacaggtagcgaatggaggtcgctgggggcagagggtccgagccctgtgggctctgcggatgcacgccctcctcccgggcctccgcctcagtctgcagaatttctgccgagtggcaccgagaacaccatccatctaaggacgaacaaaagaaccaggagggcgggacccccctcttcctctcctgggttgggggctggggccctgagtgcccagccatccttgttcgtgtttgaacactctcctggccacgtggggaagcgggaacacggggtgtctgcgcatgtttcctcctcctagctccatcactgcgcacacagctgcctgcctcgccagatgcaggggggcgggcagccctccctggctgccaggaggctctgcatgcccacagtcctgccctgcctgtcccctcaacccggcagtgcctgtagcaccgaggagcaaagggggtggatggggggcttggagaagggcggagcccaccagcctggcatccatgttgacatcttctgactgtcccctgcttggctggagccaggcccttccctagagtttcgtcaagagcctcctggggaaggggtcaggtggtttgggttttgttttttaaaataaaatagacatgttatattgccaaggcttgtcactggccctttttgagcagggtaggggaagggagctctccaaatcccttgggcccttttctgcaaaccttcctccatcatctgccctgtgcctgacacaagggacacacgggacatgcagaaccagatcagccaccgctgccgggcggactcaccgtctgcagaccctcaggccctgggagtttctcggcccgacctttgccctccgtcctgttcctgtttgctgcagcagccaggggaggagcagccaccagctcaagccccagggcacgtctgcaccgccgcccaccatctgcagcccaccccggggcaggacgctcctgcctccacagccccgggggcctgtcagaccaggacccttaccctctagacatggcctcggtcccctgcaaaccccagccccgtagccctgcgaggttacagacagcctaaacgccaccaccacagggcctgtgccgtgcccctgacccgggcacagaaggccactggcccggaggccatggagacggtgcccccagcagtggacctggtgctgggtgcttctgcctgctgcctggcctgtgtcttcaccaaccccctggaggtggtgaagacgcggctgcagctgcagggggagctgcaggcccggggcacctacccacggccctaccatggcttcatagcctctgtcgctgctgtggcccgagcagacgggctgtggggcctgcagaaggggctggctgccggccttctgtaccaaggcctcatgaatggcgttcgtttctactgctacagcctggcgtgccaggctggcctcacgcagcaaccaggtggcaccgtggttgcgggagccgtggcgggggcactgggagccttcgtggggagccctgcttacctgatcaaaacgcagctgcaagctcagacagtggccgcagtggccgtgggacaccagcacaatcaccagactgtcctgggtgccttggagaccatctggcggcagcaagggctcttggggctgtggcagggcgttggtggggctgtgccccgagtcatggtgggctcagctgcccagctggccaccttcgcctctgccaaggcctgggtacagaagcaacagtggctccctgaggacagctggctggtggccctggctgggggcatgatcagcagcatagccgtggttgtcgtcatgactcccttcgatgtggtcagcacgcggctatacaatcagccggtggacacagctggcaggggccagctctatgggggcctcaccgactgcatggtgaagatctggcggcaggagggccccctggcactctacaagggcctgggccccgcctacctgcgcctgggcccccacaccatcctcagcatgctcttctgggacgagcttcggaaactggctgggcgggcccagcacaagggcacctagacgacggccctcacccccacgtcctgacacggccggcacttggccggaagtgagagcctgctccaggacaactggctgtcccggggcgggccatgggcccaggccctgccagaggtcccgggagagtgtggacagctctggtccatccagccccttggcccacccaggtccagagcatccacttcaagttaccacccattctgtcttccagacagttctcttccttctctgtactgcgtactgggtcaccacatcccagagccttgctcagttatagcaactgctgcgggcgtgcacatggcataggcccagtaacttacatacatcggctcacttaggcctcagacagcagcacgaggcaggcacttttacttcttttaccattagaaagccaaggcctagagtggtgggctttgaccacagccacacaattttgaagtggcagagccaggactggagcttagccctgctcaccctagacctatgcgcttgacaagtgcgtgactgtgacaggcccatgggcccggactgcccataggggtcactgtaccatggcaaaggctgaggtgcaccaggaggctgtggcgtcgtcacctgccttatttgctggagaagctgtagcaaagaaccacagactgggcgacttagacaatagaaatgtattttctcacagttctggaggctggatgctggagaccaaggtgtcagtgggctggtttcttctgaggcctctgtccatggcttgcagatgctgctttcnctctgtgtctgcacatggtggtccctcgatgtgcgtctgggtcctgatctcctcctcttataaggacacaaatcatgttggcttagggcccaccctcatgaccccactttaatttttttttttttttttgagatgaagtctcactctgccacccaagctggagtgcagtggcacgatctcggttcactgcaaccttggcctcctaggttcaagcaattctcctgccccagcctcctgagtagctgggattacaggtgtgtgccaccacacccggccaatttttgtatctttagtagagatggggttttgccatgttggccagactggtctcgaactcctgacctcaagtgatccactggccttggcctcccaaagtgctgggattacaggcatgagccacctcacttggcccaattttaacttaattatctctgtcaagagcctatctccatatacagtcacatcctgagctactagggggtaggacttcaacatgcacttctgcaggggccgcagttcagccaacatcatctttttttttgagatggagtctcgctttgttgcccaggctggagtgcggtggtgcaatctcggctcaccacaacctccacctcccaggttcaagtgattctcctgcctcagcctcccgagttgctgggactataggtgtgcgccaccatgcccagctaattttgtatttttagtagagacaggctttcgctgtgttggccaggctggtcttgaatgcctgaccttgccgcccgcctcggcctcccaaaatgctgggattacaggcgtgagccaccgcgcctggcctcagccaacatcatctaagggctctcacggagggcctcccagctgcccgccctgtgggcatttgcacatatcctgacaagcctgaaagaagctccgggtgcccattgttcagtccaggtgcccattgttcccgggactgaggcccgggaaagggaagcgacgtggcagggccagcagcagaccctgggcctttctctagactgagcaccattccccgtgggtgtgctctcagcgccgcaccgaccttcacactgcagagatggatgccaactccctggcaggggcaggactgctgccgagcagccccacctgccctcccagccacaccccaagtctgtaagggccgctcccaggaacacctgctactgcacactccaaaccaataaagttttatattttgtttacttcaaaa

SEQ ID NO: 463042 - DNA, 1216 bp, Homo sapiens
tatccaagttaaaatgattacgcagccagggatttgcaccaaccagtctcacactataagcggcagtgattctattattaaccccccgcccacgatgataaagaaaaaatgaggaaatgctgtgaagaactaatagaacgtttcagaagcagaacaagtcgagagcagtgatgacccttttgttcctgctagtacctcctgtctgtctggccgaactcaccatcagatgatgtcttgaacctcacctagatgggctggtggtgtgtggccaggttaagagcaccaacaggagtaagaaagtgacctgcctggttttaccgtgtgtactaggggaggggttgaaagctttcggttgatacatcacctctgggagttgaagaagaatgcaattaagagagctaaagaagtcagtatagaatctgaaactcagaggtcaactgatgtgtcaaagatacctccacaaatcagtaccttgattaaaactaaaattggagtcatcttcatatcttcatctttctccctcttcattaggaccgattgtagtctgtttccctctcactcacttgcaatctttattgctttagtgttgcatttgatttttatctttgtttttgttttaaatactgtcattaaagtcatagaaaaatctaaaataaaactggttgaataaaaattttaaaatcgactctaatgtaataaaccagacaaaaatgatactttacatgttatatcttccctttaaactacaaatattcattgagtctataagcaacagggaccatggggggcctcagacttcagcacctgagaggcagtttcagtcgtattggggagatgcaggcatctgggttgctgcacatcaccagggcagggttctctcagcagccctggagtgcagagttcccatcagctcagcagtgaggggcacatggggctccagtgaggaaacagagaaagttaaaagctgtgagactgaaagtaacttgcaacgtttgaacagcagcaagaagatctgtggccccagactgagtcctgatgagacatatggtgtctgggcaaggggtgtggtggaggaggtgaagttggattgccgtttatacacacaggaatattggggctgggcaggttggcatggaacgctgaaactgaaatttgggactccagttgcccagtacacatctacatgaagatgatgcaaggctagtgtatacacgaa

SEQ ID NO: 463043 - DNA, 1486 bp, Homo sapiens
tttcctaggaagctgatgcttacaacaatggagattagcaatacctggacagagttgagcttcaaaggatactgagaaatggctaaagcagatgataaagaaaaaatgaggaaatgctgtgaagaactaatagaacgtttcagaagcagaacaagtcgagagcagtgatgacccttttgttcctgctagtacctcctgtctgtctggccgaactcaccatcagatgatgtcttgaacctcacctagatgggctggtggtgtgtggccaggttaagagcaccaacaggagtaagaaagtgacctgcctggttttaccgtgtgtactaggggaggggttgaaagctttcggttgatacatcacctctgggagttgaagaagaatgcaattaagagagctaaagaagtcagtaggtatctctcctgaacaattctggttttcttctaatagcttttacaatttttacctctgttatgaaatgcaaacttttaaccaatattagtaatagtaatctcaaatctcatcatcatcaaaatcttatttatgaaatataggagttagttcatatacagccttagccttttccacattataaaatatattccatatatatgtgtgatcttcatttaatattcaagtaaatgttgtaagatattgttatttttattctaacatttcacaggtatagaatctgaaactcagaggtcaactgatgtgtcaaagatacctccacaaatcagtaccttgattaaaactaaaattggagtcatcttcatatcttcatctttctccctcttcattaggaccgattgtagtctgtttccctctcactcacttgcaatctttattgctttagtgttgcatttgatttttatctttgtttttgttttaaatactgtcattaaagtcatagaaaaatctaaaataaaactggttgaataaaaattttaaaatcgactctaatgtaataaaccagacaaaaatgatactttacatgttatatcttccctttaaactacaaatattcattgagtctataagcaacagggaccatggggggcctcagacttcagcacctgagaggcagtttcagtcgtattggggagatgcaggcatctgggttgctgcacatcaccagggcagggttctctcagcagccctggagtgcagagttcccatcagctcagcagtgaggggcacatggggctccagtgaggaaacagagaaagttaaaagctgtgagactgaaagtaacttgcaacgtttgaacagcagcaagaagatctgtggccccagactgagtcctgatgagacatatggtgtctgggcaaggggtgtggtggaggaggtgaagttggattgccgtttatacacacaggaatattggggctgggcaggttggcatggaacgctgaaactgaaatttgggactccagttgcccagtacacatctacatgaagatgatgcaaggctagtgtatacacgaa

SEQ ID NO: 463044 - DNA, 6834 bp, Homo sapiens
tatagcttcaggcttttggctaagataccctgtctacgctgttctcctctatcttctctattatagtgacgtctgtgtacattctacctcagcgtctacgctgttctcctctatcttctctattacagtgggtgtctgtgtacattctttctcagcgtctacactattctctatcttctctattacagtgggcgtctgtgtacattcttgctcagcatctacgctgttctccatcttctctatcacagtgggcgtctgtttacattcttgctcagcgtctgcgctgttctccatcctctgtatcacagtggacgtttgtgtacattcttgctcagcgtctacgctgttctcctctatcttctctattacagtgggcgtctgtgtacattctcgctcagcgtctacactgttctctactctattacagtgggcatctgtgtacattcttgctcagcgtctacactgttctcctctgtcttctctatcacagtggacatctgtgtacatacttgctcagcgtctacactgttctctatcttctctattacagtggaaatctctgtacattcttgctcattatctacactgttctcctctatcttctctatcacagtggacatctgtgtacattcttgctcagcatctacactgttctctatcttctctatcacagtgggtgtctgtgtacattcttgctcagcgtctacactgtcctctatcttctctattacagtggacgtctgtgtacattctacctcagcgtctatgctgttctcctctactctatcacagtgggtgtttgtgtacattcttgctcagagtctacactgttctcttctatcttctctattacagtgggcgtctgtgtacattctacctcagcgtctacgctgttctcctctatcttctctattacagtggacatctgtgtacattcttgctcagagtctacactgttctctatcttctctattacagtgggcgtctgtgtacattcttgttcagcatctacgctgttctccatcttctctgttacagtggctgtctgtgtacattctcgctcagcatctatgctgttctcttctaggaatagcatctccgtgtttactttgtttaacttccaccttggataaagccttggtgtcattgtcaatcaagatctcctggtaagcatccaccccaccaagccagcgaatcaggtgtgctcttctgaattttgtacgtgacaagatattggaaatgtgtcaaacgttgtcctgaagggagggagtatccagtaatttctgtttagagccctgtaactgctctaagccctcacagtaaatacttttttcaaaacaaaacaaaacttaaaatagcctggttggctgtataccaaagttccctgtttggtgcactgaattggaaataattccacaagcagatgcattcatttgtttaatccaagaattattaagtgatttccttattctttatatatccagtgtgaggtgctgagtgcattcatagaagagaaatatcaggttccctgtccctggggtgtgctcagctcagtgacttcacagagggcacgtgatcttagagtagtagcagacgtggagcatagcctgaggcacaatcccagactgaattttgtattaggtatagtgacagttaatctaactctaaaaacatcagttatggacataaggatgggaacagtaggtactgggactactagagggggaagaggggatgggggcaagggctgaaaaactacccattgggtactaggctcaccccctgggtgatggagtcatttctaccccaagcctcagcgccacactacatacccatgtatcgagcctgtggatgtacccccgaatctaaaatagaagttgaaattataagcaaaaatttacattaaaaaaccctttaatgcccattagttacttataatctgtttaaagaatagccagttgctctcagccttttcatttgtttcattaattgcatctgtttatttactcagtctggtcaagaaaaatacccttaatcgtttatattaaaaagtaggtgccactataaaattctaagcttttgctgaaaatcgtgacctttgattgttcatactggtaatttatttctcatttttatgttgcaattacaacattcaaagcagtagactaagatctaatgatttagaagcaccagaggcattgctgggccaggatgacaagcctttaatgactctcttaggcagtaaaaaagccactgcaattgctgtatgaatattcatttaagaagcattcattggttgtaaatcttttaacatgtagactttaaaaaagatgaataacatactatgtaccccggtcattcttattgaatgtgtcttcagatattttttatcaaattcattttactgctctttttgcttatgaaaataaaatagtatttcattagttgagctcatttgaatattagaaataaacagagttcatatcatgtgaaattgctgacagctcttaaaatcagtcctgcactttgcccagaggcattattcacattgctggttacatctgttcttgggaaagagaacctgccttgactgtgaatgggggtccagtttgccccaggtttagtccctgtgatactcagcaaatgttgcctggttctttactaaatatggctaccctgtgatgagaagctttgggctgattgggccttatttgtcttcttttctcttactgggaaagcaaagactgctgaacataactgatgtcagaatgggcccgtgttagctatatactgtgtacaggtcaagcacataactattaatagtaaaaatcaacttagacaggggaacgggattcagatccagcagttttatcctagcccacactcttaaccacaattacaatggcaaacaaataaatatttttaattgtatgcagtatgatttagtattggaaagactgtttaaattttttaaatagactttaaattttagaaagtgtagatatacagcaaaattgtgaatagtacagagtgttcccctatatattctgtacccagttttccctattgacaccttatattagtatggtgcattattacaattaatgaaccaatattgatatactggtactaactaaagtccatactttattcagattcccttggattttacccagtgtctgtaccagtatgccacacaggataccacgttatttttggtccttgtgttgctttaggcttctcttggtacagtttttcatactttctttgtttttgatgatccttgacagtttggaggaatattattggtcaggtattttgtagaacgtaccttacgtggaaagaaggtaatacctgtctgaattttttttcatgattagagtggagttacggattttggggaggaagaccacagagataaagtgccgttttcattacatcctacctggaatatgctctattgacttgacttgttgattttgaccttgatcacctagctgaggtcgcgtttgtcagccttcgccactgcagagctcctccttttcccttccacactgtcctcgtcacagggacgtcactaggcaccacccagacctaaggagaggggagccacgttccacctccttgaaggaggagtatttaatatgtaaattatttggaattcctctgaacaggagatttgtcttttatttatatcagtatgtattcgtacacaatttattttatatctctagttataatccaatactactttatgttcttgcccaaaatattctaacttttggccgcagggaactttttcagttgatttctgtgtccgtttgacatatcctcatcattgcagagttgtttttttttttctttagcacctcctcactttctggcactacaagatgcttcaggcttattttttatgtttcctgctcatatcctagaagcagccatttcttcaatgtgccctgttttcttttattggagaatagttttagaaattggagaatttagaaattggagaatagttttagaaaacaagattgggcactatttatgtttattgctaatgagttttctttgcttctaggccctatgaaagttttaacttttaaattttttaagctgcttgagctgctatactaagcaactatttctgtaaatgttggtggccaaaagtgttaaataaatagtttaaaatttgtttttcattggggaaagaatgttgtattgtagttacagttgagaattgccaaaaataaaatttaaaaagaacaatacttagaagaacatttctaaaaacatttcttagaattgtataattgtctcagtcaacttgcttttattatttttcaagataatttttaatgattttatacaaagcagtgattccctgggtaatgattgtgaagattttgccttttgtgcttctcttttacagtggatttttcatttatttaacttggattagaattagaaatgcaaatacgtcagcaattgaatttaccccttggaatcttgctttttgctggacatttactatctgaattacacaaaggaaaaaagacaaggagcagtgtctgtacccaggagttattgtctagtagttaataacaagcactgtacaagcattgatcagtcaaaacaggaaatttagaaacaaccaggagaccatatcagatgtattctgggcaaatatcacccctgcccaggcctaaagaactgccaaaaatctttaaaatattggcttataaataatgtgaagtagaaaaaaaatttaaacatgacatctcagtgatatttctgcaaagggaggtttttttttaaataaagaagtgacagtaaaattgattttcactagctttaaagacagtatcatcctctgtatcgtaagatattactctgagaaacaccccttcattctttcaggtgaaaggcagcctattatcacaggcagccaaccactgcaacagctggtattgacaaaggctctgaccccttttggttaaaaatgaagcaaaaatctgagtgttcgtagggcttcctaacctccggttgagctatatgtaagaacccttcacccattataataatccaggtatgcgatgttgtattacagtgacctgcagggtcatgacttagtgagaggcattctttgtcaacacagggaaagttaacacagaaggtaaaatttagaagaaaggtgaatggttataatattctttcagtgcgtgtgtgtgtgtgtgtgtgcgcgcgtgcacgcacatttgtgtgtatatatttgtatattccttcagcaacatgtcatatggtctaggaatccctgggcgatttctggttttggagaataggatgtgaatgtacctctgaaactgacagaatgatgtattaccttgtaggtcactggagtagagtccagatgtgcttaagcatttatgaaaagttacctattgtcacagaggccccgtaccacatgagtcctgtgagactttaaaggaaatctaaccaaaattgaactctatttcaggtatagcattttctgtggtttgataatgacattatacctattaaaataattttttgccctcattattaaaaccattagtttatttagtgacttcacagtcacaagttttttatatttcctgggcaagcaaaacctcagtagcataaacttagttttgtcactgccccggggatcccacttcatatgggccaataaatttccaggcaactacaagtattatgtcatatgtgcaaaaatgtgatgtcttttttgatccaaacctttgccagacattcaagagaggttaggatgtagtaagtgtttgtaaaagactggagctctcagtaggccaagtatagcgtagaaactggcagtggtgaaaacctggctgcaggtacaagagaacacacgtatatggattgtagttacagctttagtgtgagcgaattaatcttcattgtacgagggacccaatgtaattcttcagacgtttttgtggaaaatcttcgtgaaggagacttagatcattgttgtgccgtagaatttctctgataatggaaatgttctctctttgttgtgcaatatggcaatcagtagccgttttcatgtatcaaacacttgaaatgcgttgaatgtgactgaggaattgaatttcaaatttaattttaatgatgttttaaatttaaatagctacatgtggttagtgactaccttttggatagcacagctctagatggctaggtttggcatgtctactcgtgagataatgtctgtgaaaaactgtggcatgcagccgggtgcagtggctgacgcctgtaatcccagcactttcggaggcctaagcaggcggaacacgaggtcgggagttcgagaccagcctggccgatatagtgaaaccctgtctctactaaagatacaaaaattagccgggcatgatggcacatgcccgtagtcccagctactcgggaggctgaggcaggagaaccgcttgaacccaggaggtgggaggttgtggtgagctgagatcgcactactgcactccagcctgggtgactgggcgagcctccatgtcaaaaaaaaaaaaacaaaaaaaccccacaagaactgtagtatatgaagtgttcaaaaaaatgtttacttttccccttaggaagtgtgtagacccccttgatacttttttaaaacaacaacccacaggttaataaatcttttgttttaactttcccagtatagtgccattgctcatgtacctcttaaatttcatgatggtatgaggaacctttagagctgcagttatagagaagtacataaaaacagcgtacctctcttaattgtgc

SEQ ID NO: 463045 - DNA, 696 bp, Homo sapiens
agaggatccggggaagaagatcaaacccaccatgcgccagctcagcagggagctgctggatgagaaagggcctgaagtcttgcaggactcactggatagatgttattcaactccttcaggttgtcttgaactgactgactcatgccagccctacagaagtgccttttatgtattggagcaacagcgtgttggcttggctgttgacatggatgaaattgaaaagtaccaagaagtggaagaagaccaagacccatcatgccccaggctcagcagggagctgctggatgagaaagagcctgaagtcttgcaggactcactggatagatgttattcgactccttcaggttatcttgaactgcctgacttaggccagccctacagcagtgctgtttactcattggaggaacagtaccttggcttggctcttgacgtggacaaaattgaaaagaaggggaaggggaaaaaaagaaggggaagaagatcaaagaaggaaagaagaaggggaagaaaagaaggggaagaagatcaaaacccaccatgccccaggctcaacggcgtgctgatggaagtggaagagcgtgaagtcttacaggactcactggatagatgttattcgactccgtcaatgtactttgaactacctgactcattccagcactacagaagtgtgttttactcatttgaggaacagcacat

SEQ ID NO: 463046 - DNA, 3520 bp, Homo sapiens
tttaatcttctgtcatctctgtcccacctggctcatcagggagatgcagaaggctgaagaaaaggaagtccctgaggactcactggaggaatgtgccatcacttattcaaatagccatggctcttatgactccaaccagccacataggaaaaccaaaatcacatttgaggaagacaaagtcgactcaactctcattggctcatcctctcatgttgaatgggaggatgctgtacacattattccagaaaatgaaagtgatgatgaggaagaggaagaaaaagggccagtgtctcccaggaatctgcaggagtctgaagaggaggaagtcccccaggagtcctgggatgaaggttattcgactctctcaattcctcctgaaatgttggcctcgtaccagtcttacagcagcacatttcactcattagaggaacagcaagtctgcatggctgttgacataggcagacatcggtgggatcaagtgaaaaaggaggaccaagaggcaacaggtcccaggctcagcagggagctgctggatgagaaagggcctgaagtcttgcaggactcactggatagatgttattcaactccttcaggttgtcttgaactgactgactcatgccagccctacagaagtgccttttatgtattggagcaacagcgtgttggcttggctgttgacatggatgaaattgaaaagtaccaagaagtggaagaagaccaagacccatcatgccccaggctcagcagggagctgctggatgagaaagagcctgaagtcttgcaggactcactggatagatgttattcgactccttcaggttatcttgaactgcctgacttaggccagccctacagcagtgctgtttactcattggaggaacagtaccttggcttggctcttgacgtggacagaattaaaaaggaccaagaagaggaagaagaccaaggcccaccatgccccaggctcagcagggagctgctggatgagaaagggcctgaagtcttgcaggactcactggatagatgttattcaactccttcaggttgtcttgaactgactgactcatgccagccctacagaagtgccttttatgtattggagcaacagcatgttggcttggctgttgacatggatgaaattgaaaagtaccaagaagtggaagaagaccaagacccatcatgccccaggctcagcagggagctgctggatgagaaagagcctgaagtcttgcaggactcactggatagatgttattcgactccttcaggttatcttgaactgcctgacttaggccagccctacagcagtgctgtttactcattggaggaacagtaccttggcttggctcttgacgtggacagaattaaaaaggaccaagaagaggaagaagaccaaggcccaccatgccccaggctcagcagggagctgctggaggtagtagagcctgaagtcttgcaggactcactggatagatgttattcaactccttccagttgtcttgaacagcctgactcctgccagccctatggaagttccttttatgcattggaggaaaaacatgttggcttttctcttgacgtgggagtggccattactgagctgagagatgtcattgccacagggaggacctataggcacatgctcagcagggagctgctggatgagaaagggcctgaagtcttgcaggactcactggatagatgttattcaactccttcaggttgtcttgaactgactgactcatgccagccctacagaagtgccttttatgtattggagcaacagcatgttggcttggctgttgacatggatgaaattgaaaagtaccaagaagtggaagaagaccaagacccatcatgccccaggctcagcagggagctgctggatgagaaagagcctgaagtcttgcaggactcactggatagatgttattcgactccttcaggttatcttgaactgcctgacttaggccagccctacagcagtgctgtttactcattggaggaacagtaccttggcttggctcttgacgtggacagaattaaaaaggaccaagaagaggaagaagaccaaggcccaccatgccccaggctcagcagggagctgctggaggtagtagagcctgaagtcttgcaggactcactggatagatgttattcaactccttccagttgtcttgaacagcctgactcctgccagccctatggaagttccttttatgcattggaggaaaaacatgttggcttttctcttgacgtgggagtggccattactgagctgagagatgtcattgccacagggaggacctataggcacatgctcagcagggagctgctggatgagaaagggcctgaagtcttgcaggactcactggatagatgttattcaactccttcaggttgtcttgaactgactgactcatgccagccctacagaagtgccttttatgtattggagcaacagcgtgttggcttcgctgttgacatggatgaaattgaaaagtaccaagaagtggaagaagaccaagacccatcatgccccaggctcagcagggagctgctggatgagaaagagcctgaagtcttgcaggactcactggatagatgttattcgactccttcaggttatcttgaactgcctgacttaggccagccctacagcagtgctgtttactcattggaggaacagtaccttggcttggctcttgacgtggacagaattaaaaaggaccaagaagaggaagaagaccaaggcccaccatgccccaggctcagcagggagctgctggaggtagtagagcctgaagtcttgcaggactcactggatagatgttattcaactccttccagttgtcttgaacagcctgactcctgccagccctatggaagttccttttatgcattggaggaaaaccatgttggcttttctcttgacgtgggagtggccattactgagctgagagatgtcattgccacagggaggacctataggcacatgctcagcagggagctgctggatgagaaagggcctgaagtcttgcaggactcactggatagatgttcttcaactccttcaggttgtcttgaactgactgactcatgccagccctacagaagtgccttttatgtattggagcaacagcatgttggcttggctgttgacatggatgaaattgaaaagtaccaagaagtggaagaagaccaagacccatcatgccccaggctcagcagggagctgctggatgagaaagagcctgaagtcttgcaggactcactggatagatgttattcgactccttcaggttatcttgaactgcctgacttaggccagccctacagcagtgctgtttactcattggaggaacagtaccttggcttggctcttgacgtggacagagccgctggcaggagacagcatgtcacccaggactctgccggtgcagaatatgaacaatgccatgttcttgcagaaaacgcttagcctgagtttcataggagatccacattgaaatatattaac

SEQ ID NO: 463047 - DNA, 1015 bp, Homo sapiens
  misc_feature (283)..(283): n is a, c, g, or t
  misc_feature (396)..(396): n is a, c, g, or t
atggttctcctcatctacatagagaaacagctccacacccccatgtacttcctcctcagtcaactgtcccttatggacctcatgctcatctgcaccactctacccaagatgatcttcagctacttgtctgggaagaaatctatctctctggcaggttgtggaactcagatattcttctatgtgtccctgcttggagctgaatgtttcttgttggctgtcatggcttatgaccgctatgtggctatatgtcaccctcttcagtacaccatcctcatgaatccgnaactctgtgtcttcatgactgttgcttcctggaccttggggtctcttgatgggatcatagtgcttgcagctgtcctgtcattttcttactgcagctctctggaaattcatcantttttctgtgatgttgctgcccttttacctctatcctgcacagaaacatctgcatttgaaagactacttgtcatttgttgtgtggtaatgctaatctttccagtttcagttatcatactttcctattcccatgtccttcgagccgtcatccacatgggctctggggaaagtcgtcgcaaggccttcactacctgctcctcccacctgtctgtggtcggactctactacggtgctgctatgttcatgtacatgagaccagcttctaaacatacgccagaccaggacaagatggtgtcggccttctacactattctcacccctatgctgaaccctctcatttatagcctccgcaacaaagaagtgttcagggcactacagaagaaggctccactgatcgttcacatgcaaggacagcaatttaacaataatccatacacgaacaacacattcatgagagccaaaaatcagaggggaattactgatcccagtggtcaaaacttgtgttcccacaaaccttgacactgagggctaaaatgcgctgaggctctaagtaaacttaaaaggcggtctatgccataagtactgcaactcttagatgtttcgggctacagccctccct

SEQ ID NO: 463048 - DNA, 1301 bp, Homo sapiens
ctcgcctttatccgtttttccaggtccttcacgtcctcctcttcttcctcccattggttacatcaaaggtccgggggccccccagggccaccttgtcttcctccaccaaagccacctcggtccatgcccagccaccacggaagccacttctgtctctaccacagccacctctgaacattccaccgggaccaccatgatccatgaggccacctcttcctccccacatgccaccagggccacctctgccatgatcaccacccgggggtgggaagggtggcgggaggaagccttcaggctttggagccttacacttgttgctctctgttctccaggcgaagttctggtttccacaacccggattgggacactgcctgtctccagcttggtgctggacgtttcctcctccagaggtgttccctcgggaaccctggggtcctcttggagggaggcctcctctatctcctccacggcctcccatgtgacccatgggtcccccaggacttcctgggcctcctggacctccgcagagtggtggtggcatccctctgccctcacggggtggcataccaccctgcatactgttcactggaggcctcttccgagcaagagagactttaagtttgctcccttgaaaatctttcccatcaaaccattccacggcagctttggcagtagactcataaggacatttatgcttgtcggatcatgtgttctgatttctggtactcgatgccctgccaaggattgattcactcttgccacatgttccccaggcctagtgcatcaataggctaatagtgaagtaaatgggctttggagtcagacagacatcctaggtgggcatctcagcaccagcacatattagctgttcttcagcagttttctcatctgtaaaggagagataataacacttacctcacaagatttggggtatttggctttgttttttattttttcaagcagtgagttaagaaatattgtgtaattattacatactttaaacagtttcaagcatatagtaagcacttgataaatgttagctgtctttattttggaaacattggtgctgtaaatttaaattctgcttatcttcattcaagtcaaaattatataagactcttttctgtttcccaagtctgtagttgtacttttctaattgtaaaacatggtatctggtataaatgggtcccctccttgggggagcgtctcctttttagcccagaaagtaaaggcaaaattttgcagtgcttctttctaattttcagactgctctagagtgaatcctatttaatcagcttatt

SEQ ID NO: 463049 - DNA, 1092 bp, Homo sapiens
  misc_feature (5)..(5): n is a, c, g, or t
  misc_feature (7)..(9): n is a, c, g, or t
  misc_feature (11)..(11): n is a, c, g, or t
gtagntnnntnaggtggcagcggggtggctgcccaggggacagtcccctcctcctcagctggctggatgctcacagcgcgcccttcctgagctcttggcaaatgcacgtgttaacccgctgcggggaggaagctggaagtgccggggagtaggggagtgagggagggctggacttccgcaggagaaataaagcgacttgcagtgacactggctgtcccccttccctccccgcctcgctgccctctcagcctcctgcttaaggagactcttctggagaaacatgctttaggaggcctgaaagccaaggctgctccgtggctgtggaggtcaaggctgtgtgcgtaagaagcccagggcgtgggtctggccttgtgtgggcctggtgctccttctccactgggaattagggattaatcccagaattttcagaaaaaatttttttgagaagatgagcttaaatgacagtatcttctcccggattagaattacgcttgcattatgatggaaataatgaacaggttgtaattttaaaatgtgtcattttgtcaggaagattactaagtgatgcactttataagctgttacccaccaatgttgacagatactttctggaggtggaaaaagaggtatcagaatccaaagaaacactgcccccaccaaaatttgagacccatttacttgcatcagtgacactgaacacccagctttgtttcatttggtgcagagaaaagtgggctgtgtgcctttcctccctgcccagactcccgtgtggtggcattgaagagtgtccttcatggggggacagctgggccacataccccggcggcagcatggaggccccagggacagtggcagcagacggcttagcctcaactaatagcaaacaggactttcaacctctttctcactggcaagttttcagggtttaagacgtattgtctttagaagcgagggactctgtgtgtgctccaagaatgggttactagtccagcaggaaagaacaatgagtacaggcaggactccttccttttttagtttggaaattaactcatctttagtcattttacagtctaaaatcctttttggaataag

SEQ ID NO: 463050 - DNA, 1378 bp, Homo sapiens
gcttcctctcagcccgctctgagctggaagcagcatgtgggacctggccctgatcttcctcgcagcagcctgcgtgttctcactaggggtcactctgtgggtcatttgcagccattttttcactgtgcacatccctgcagcggttggccaccctgtgaaactgagagtcctccattgcatcttccagctgctgttgacttgggggatgatatttgagaagctcagaatctgttctatgccccaatttttctgtttcatgcaagatctgcctccgctaaagtatgaccccgatgttgtggtcacggatttccgctttgggacaatccctgtgaagctgtaccaacccaaggcatccacctgcaccctgaagcctggcatcgtgtactaccacggtggcgggggcgtcatggggagtttgaaaacccaccatggcatatgctctcgtttgtgcaaggagagtgactccgtggttctggcagttggttaccgcaagttacctaagcataagtttccagtgccagtaagagactgcttggtggccaccatccacttcctgaagtccctggatgcatatggagtggatccagcccgggttgtggtctgcggtgacagtttcggaggggcaatagccgcagtggtttgtcaacaacttgtggacaggccagatctgccccggatccgggctcagatcctgatctatgccattctccaagccctggatttacaaaccccttcgtttcaacagaggaaaaacatcccactgctcacctggagtttcatctgctactgtttttttcaaaacctggatttcagctcctcctggcaagaggtcatcatgaaaggtgcccatttgcctgctgaagtctgggaaaagtacagaaagtggttgggcccagaaaacatccctgagaggtttaaggagaggggttaccaactgaagccccatgagcccattaatgaagctgcttacttggaagtaagtgttgtcctggatgtgatgtgctcgcccctgattgcagaagatgacatagtgtctcagctcccggaaacctgcatcgtgagctgtgagtatgatgctctccgggacaattcactgttgtacaagaaaaggctggaagacctgggagtgcccgtgacctggcaccatatggaggatggtttccatggagtgctcaggaccattgacatgagcttcttgcactttccctgctccatgagaattctgagtgcattagttcaatttgtaaagggactccggtaagagctgttctcagcctccctaaggggcagttcaggctcccagattgatccagactgtgtgtgactttcgtccatttgacttgactttggaatagcacaagggcatcatgtacttcac

SEQ ID NO: 463051 - DNA, 2615 bp, Homo sapiens
aggagggcgccacccaacgggcgggcgccaggggcaaccctgagaagctgacccttgagcccagagggggcaccgggcccagggatggccgctgacccccaggacccgcgcctggcccgaccagcgagttgcggcgggagaaggacgcggccaggcccagcatggagccccggcgcgaggccggggctggacctggacctgccggtcgggcctcatcaatgctgggcaggcagcctcggggccgcaccggtgagggtttccgcccggagtctttggcattctcctcctcctggcgtcccgggggcagaggcctgctggccatggacctgctggctggaggaaccacactcagggtggccttcaccaggcatctgtctacccaccccagcctcttgctcagtgatgtcaaggcactccgaagccttgtcaacaacccgcgatacagtgatgtttgcttcgtggttggtcaagaacggcaggaggtatttgcccatcggtgcttgttggcctgtagatgcaacttcttccagcgacttctgggcacagagccaggccccggggtgcccagtcctgtggtgctaagcactgtgccaactgaggccttcctggcagtgctggagttcctatataccaacagtgtcaagctgtaccgccactctgtgctggaagtgctgacagcggctgtggagtatgggctggaggaactgagagagtcccgccactagggagaggagaagacttcccagaggaggaaacatttgtgttcgatctggtagaacaaataggattttgttcctaggggaagtgggaagatggtattctagtcacagaggcaccaaaggagctagtgagacatttggtgtgtctgaactgtgaggagagggcaagacgagactgcagaggacgccagggcctggttcatgtagggccctcaagcttttggacttcttttaagcagagggcagtggagattcactgaaggtttccgataagggagtgaagaattggaaactcaggggagaagggattggaagaggtggagaggactcgctagtccagtcaggaggctagtgcagcagtcaagagatgagagatgtcacggatgaaattcaagtttctgctaaaaatagaagtatccttgagtcaggaagggaacaagtggaggaagataagcatcctgaaagaaggggagaattttgcatggcctttatctggttttgattagtggcgaatgtactagaagctgtgcctgcagtttgtggtgaaggtgctggatgtggacttggtttgtgaggccctgcaggtggccgtaacctttggcctggggcagctgcaggagcgctgcgtggctttcatagaggcccacagccaggtactgctcccttcatactcctcaccctacgcaccgcattctgctcctccctgacccatttgccggctcgcaggaggccctccggacccgaggcttcctggagctgtcggcggccgcgctgctgcccctgctccgcagcgacaagctctgcgtggacgaggctgaactggtccgcgcggcccgaagctgggcgcgcgtgggcgcggtgagtggggctgggggagcgcaagggcacggaaggaggtgctggccacgagactggtgagcgggcggcaggacaggtgcccgactcagggctggcgtttgcaggcggtgctggagcggccggtggctgaggtggcggccccggtggtgaaagagctgagactagccttgctggccccggcggagctgagcgccctggaagagcagaaccggcaggaaccactcatcccggtggggacgcggggaaccggcccagctccactcagcagggggtacagggcgctgggagggggcaggagcagcccggcccacggtcctcggggcgaggggccaccgcgggactgcgcactaactggccttgctctgcaggtggagcagattgtggaggcgtggaaatgccatgccctgcggagaggggatgaggcccggggcgccccgtgtcgccgccggagaggcaccctgccccgggagcatcaccgctttctggacctgtccttcaaatgatccaacgccgggactcgcagggagccctcgacccgcccagctgagcctgccccaaactacagctcccgaagtgctcggcgttcggagcgggcttccgttcccagcgtgcccagtgagccgggcgccggaagaaccgttgtctgccacgcgcagccccttgtgcgggatcaagcccgtgtgggcgaggtggggtcgggccgggcagggcttgggctgggcctccctgagggggtgaaactcgaaaacgaggatttccttcgttccacaccctgactctacgccctgcccctgggcattgtcgtctactagtctattctgatgactcccacatatctatctgttcagctcagctccctctttcttttctttttctttctctttctttctttctttctttctttctttctttctttctttctttctttctttctttctttctttttctttctttctctttccttccttccttccttccttccttctttctttctctttctctatctctttctttctttctttctttctctcctctctc

SEQ ID NO: 463052 - DNA, 2373 bp, Homo sapiens
aggagggcgccacccaacgggcgggcgccaggggcaaccctgagaagctgacccttgagcccagagggggcaccgggcccagggatggccgctgacccccaggacccgcgcctggcccgaccagcgagttgcggcgggagaaggacgcggccaggcccagcatggagccccggcgcgaggccggggctggacctggacctgccggtcgggcctcatcaatgctgggcaggcagcctcggggccgcaccggtgagggtttccgcccggagtctttggcattctcctcctcctggcgtcccgggggcagaggcctgctggccatggacctgctggctggaggaaccacactcagggtggccttcaccaggcatctgtctacccaccccagcctcttgctcagtgatgtcaaggcactccgaagccttgtcaacaacccgcgatacagtgatgtttgcttcgtggttggtcaagaacggcaggaggtatttgcccatcggtgcttgttggcctgtagatgcaacttcttccagcgacttctgggcacagagccaggccccggggtgcccagtcctgtggtgctaagcactgtgccaactgaggccttcctggcagtgctggagttcctatataccaacagtgtcaagctgtaccgccactctgtgctggaagtgctgacagcggctgtggagtatgggctggaggaactgagagagtcccgccactagggagaggagaagacttcccagaggaggaaacatttgtgttcgatctggtagaacaaataggattttgttcctaggggaagtgggaagatggtattctagtcacagaggcaccaaaggagctagtgagacatttggtgtgtctgaactgtgaggagagggcaagacgagactgcagaggacgccagggcctggttcatgtagggccctcaagcttttggacttcttttaagcagagggcagtggagattcactgaaggtttccgataagggagtgaagaattggaaactcaggggagaagggattggaagaggtggagaggactcgctagtccagtcaggaggctagtgcagcagtcaagagatgagagatgtcacggatgaaattcaagtttctgctaaaaatagaagtatccttgagtcaggaagggaacaagtggaggaagataagcatcctgaaagaaggggagaattttgcatggcctttatctggttttgattagtggcgaatgtactagaagctgtgcctgcagtttgtggtgaaggtgctggatgtggacttggtttgtgaggccctgcaggtggccgtaacctttggcctggggcagctgcaggagcgctgcgtggctttcatagaggcccacagccaggtactgctcccttcatactcctcaccctacgcaccgcattctgctcctccctgacccatttgccggctcgcaggaggccctccggacccgaggcttcctggagctgtcggcggccgcgctgctgcccctgctccgcagcgacaagctctgcgtggacgaggctgaactggtccgcgcggcccgaagctgggcgcgcgtgggcgcggcggtgctggagcggccggtggctgaggtggcggccccggtggtgaaagagctgagactagccttgctggccccggcggagctgagcgccctggaagagcagaaccggcaggaaccactcatcccggtggagcagattgtggaggcgtggaaatgccatgccctgcggagaggggatgaggcccggggcgccccgtgtcgccgccggagaggcaccctgccccgggagcatcaccgctttctggacctgtccttcaaatgatccaacgccgggactcgcagggagccctcgacccgcccagctgagcctgccccaaactacagctcccgaagtgctcggcgttcggagcgggcttccgttcccagcgtgcccagtgagccgggcgccggaagaaccgttgtctgccacgcgcagccccttgtgcgggatcaagcccgtgtgggcgaggtggggtcgggccgggcagggcttgggctgggcctccctgagggggtgaaactcgaaaacgaggatttccttcgttccacaccctgactctacgccctgcccctgggcattgtcgtctactagtctattctgatgactcccacatatctatctgttcagctcagctccctctttcttttctttttctttctctttctttctttctttctttctttctttctttctttctttctttctttctttctttctttctttttctttctttctctttccttccttccttccttccttccttctttctttctctttctctatctctttctttctttctttctttctctcctctctc

SEQ ID NO: 463053 - DNA, 2414 bp, Homo sapiens
aggagggcgccacccaacgggcgggcgccaggggcaaccctgagaagctgacccttgagcccagagggggcaccgggcccagggatggccgctgacccccaggacccgcgcctggcccgaccagcgagttgcggcgggagaaggacgcggccaggcccagcatggagccccggcgcgaggccggggctggacctggacctgccggtcgggcctcatcaatgctgggcaggcagcctcggggccgcaccggtgagggtttccgcccggagtctttggcattctcctcctcctggcgtcccgggggcagaggcctgctggccatggacctgctggctggaggaaccacactcagggtggccttcaccaggcatctgtctacccaccccagcctcttgctcagtgatgtcaaggcactccgaagccttgtcaacaacccgcgatacagtgatgtttgcttcgtggttggtcaagaacggcaggaggtatttgcccatcggtgcttgttggcctgtagatgcaacttcttccagcgacttctgggcacagagccaggccccggggtgcccagtcctgtggtgctaagcactgtgccaactgaggccttcctggcagtgctggagttcctatataccaacagtgtcaagctgtaccgccactctgtgctggaagtgctgacagcggctgtggagtatgggctggaggaactgagagagtcccgccactagggagaggagaagacttcccagaggaggaaacatttgtgttcgatctggtagaacaaataggattttgttcctaggggaagtgggaagatggtattctagtcacagaggcaccaaaggagctagtgagacatttggtgtgtctgaactgtgaggagagggcaagacgagactgcagaggacgccagggcctggttcatgtagggccctcaagcttttggacttcttttaagcagagggcagtggagattcactgaaggtttccgataagggagtgaagaattggaaactcaggggagaagggattggaagaggtggagaggactcgctagtccagtcaggaggctagtgcagcagtcaagagatgagagatgtcacggatgaaattcaagtttctgctaaaaatagaagtatccttgagtcaggaagggaacaagtggaggaagataagcatcctgaaagaaggggagaattttgcatggcctttatctggttttgattagtggcgaatgtactagaagctgtgcctgcagtttgtggtgaaggtgctggatgtggacttggtttgtgaggccctgcaggtggccgtaacctttggcctggggcagctgcaggagcgctgcgtggctttcatagaggcccacagccaggtactgctcccttcatactcctcaccctacgcaccgcattctgctcctccctgacccatttgccggctcgcaggaggccctccggacccgaggcttcctggagctgtcggcggccgcgctgctgcccctgctccgcagcgacaagctctgcgtggacgaggctgaactggtccgcgcggcccgaagctgggcgcgcgtgggcgcggcggtgctggagcggccggtggctgaggtggcggccccggtggtgaaagagctgagactagccttgctggccccggcggagctgagcgccctggaagagcagaaccggcaggaaccactcatcccggtggggacgcggggaaccggcccagctccactcagcagggggtggagcagattgtggaggcgtggaaatgccatgccctgcggagaggggatgaggcccggggcgccccgtgtcgccgccggagaggcaccctgccccgggagcatcaccgctttctggacctgtccttcaaatgatccaacgccgggactcgcagggagccctcgacccgcccagctgagcctgccccaaactacagctcccgaagtgctcggcgttcggagcgggcttccgttcccagcgtgcccagtgagccgggcgccggaagaaccgttgtctgccacgcgcagccccttgtgcgggatcaagcccgtgtgggcgaggtggggtcgggccgggcagggcttgggctgggcctccctgagggggtgaaactcgaaaacgaggatttccttcgttccacaccctgactctacgccctgcccctgggcattgtcgtctactagtctattctgatgactcccacatatctatctgttcagctcagctccctctttcttttctttttctttctctttctttctttctttctttctttctttctttctttctttctttctttctttctttctttctttttctttctttctctttccttccttccttccttccttccttctttctttctctttctctatctctttctttctttctttctttctctcctctctc

SEQ ID NO: 463054 - DNA, 284 bp, Homo sapiens
gctgggtgactcaccgctccaagcctgctcactgcttctggggtggaactagtgtcttggagcagggacaccgccacccaacccacattcatttctgttcccagctgtgcctgcagtttgtggtgaaggtgctggatgtggacttggtttgtgaggccctgcaggtgggtgctgctggacaggcatggtaggagtctggctctgtgtgtggaaatgggctcccagcacctgggagcctgggcctgctgtgtctggcctggaaataacttgggtacatggtggtg

SEQ ID NO: 463055 - DNA, 2477 bp, Homo sapiens
aggagggcgccacccaacgggcgggcgccaggggcaaccctgagaagctgacccttgagcccagagggggcaccgggcccagggatggccgctgacccccaggacccgcgcctggcccgaccagcgagttgcggcgggagaaggacgcggccaggcccagcatggagccccggcgcgaggccggggctggacctggacctgccggtcgggcctcatcaatgctgggcaggcagcctcggggccgcaccggtgagggtttccgcccggagtctttggcattctcctcctcctggcgtcccgggggcagaggcctgctggccatggacctgctggctggaggaaccacactcagggtggccttcaccaggcatctgtctacccaccccagcctcttgctcagtgatgtcaaggcactccgaagccttgtcaacaacccgcgatacagtgatgtttgcttcgtggttggtcaagaacggcaggaggtatttgcccatcggtgcttgttggcctgtagatgcaacttcttccagcgacttctgggcacagagccaggccccggggtgcccagtcctgtggtgctaagcactgtgccaactgaggccttcctggcagtgctggagttcctatataccaacagtgtcaagctgtaccgccactctgtgctggaagtgctgacagcggctgtggagtatgggctggaggaactgagagagtcccgccactagggagaggagaagacttcccagaggaggaaacatttgtgttcgatctggtagaacaaataggattttgttcctaggggaagtgggaagatggtattctagtcacagaggcaccaaaggagctagtgagacatttggtgtgtctgaactgtgaggagagggcaagacgagactgcagaggacgccagggcctggttcatgtagggccctcaagcttttggacttcttttaagcagagggcagtggagattcactgaaggtttccgataagggagtgaagaattggaaactcaggggagaagggattggaagaggtggagaggactcgctagtccagtcaggaggctagtgcagcagtcaagagatgagagatgtcacggatgaaattcaagtttctgctaaaaatagaagtatccttgagtcaggaagggaacaagtggaggaagataagcatcctgaaagaaggggagaattttgcatggcctttatctggttttgattagtggcgaatgtactagaagctgtgcctgcagtttgtggtgaaggtgctggatgtggacttggtttgtgaggccctgcaggtggccgtaacctttggcctggggcagctgcaggagcgctgcgtggctttcatagaggcccacagccaggtactgctcccttcatactcctcaccctacgcaccgcattctgctcctccctgacccatttgccggctcgcaggaggccctccggacccgaggcttcctggagctgtcggcggccgcgctgctgcccctgctccgcagcgacaagctctgcgtggacgaggctgaactggtccgcgcggcccgaagctgggcgcgcgtgggcgcggtgagtggggctgggggagcgcaagggcacggaaggaggtgctggccacgagactggtgagcgggcggcaggacaggtgcccgactcagggctggcgtttgcaggcggtgctggagcggccggtggctgaggtggcggccccggtggtgaaagagctgagactagccttgctggccccggcggagctgagcgccctggaagagcagaaccggcaggaaccactcatcccggtggagcagattgtggaggcgtggaaatgccatgccctgcggagaggggatgaggcccggggcgccccgtgtcgccgccggagaggcaccctgccccgggagcatcaccgctttctggacctgtccttcaaatgatccaacgccgggactcgcagggagccctcgacccgcccagctgagcctgccccaaactacagctcccgaagtgctcggcgttcggagcgggcttccgttcccagcgtgcccagtgagccgggcgccggaagaaccgttgtctgccacgcgcagccccttgtgcgggatcaagcccgtgtgggcgaggtggggtcgggccgggcagggcttgggctgggcctccctgagggggtgaaactcgaaaacgaggatttccttcgttccacaccctgactctacgccctgcccctgggcattgtcgtctactagtctattctgatgactcccacatatctatctgttcagctcagctccctctttcttttctttttctttctctttctttctttctttctttctttctttctttctttctttctttctttctttctttctttctttttctttctttctctttccttccttccttccttccttccttctttctttctctttctctatctctttctttctttctttctttctctcctctctc

SEQ ID NO: 463056 - DNA, 2518 bp, Homo sapiens
aggagggcgccacccaacgggcgggcgccaggggcaaccctgagaagctgacccttgagcccagagggggcaccgggcccagggatggccgctgacccccaggacccgcgcctggcccgaccagcgagttgcggcgggagaaggacgcggccaggcccagcatggagccccggcgcgaggccggggctggacctggacctgccggtcgggcctcatcaatgctgggcaggcagcctcggggccgcaccggtgagggtttccgcccggagtctttggcattctcctcctcctggcgtcccgggggcagaggcctgctggccatggacctgctggctggaggaaccacactcagggtggccttcaccaggcatctgtctacccaccccagcctcttgctcagtgatgtcaaggcactccgaagccttgtcaacaacccgcgatacagtgatgtttgcttcgtggttggtcaagaacggcaggaggtatttgcccatcggtgcttgttggcctgtagatgcaacttcttccagcgacttctgggcacagagccaggccccggggtgcccagtcctgtggtgctaagcactgtgccaactgaggccttcctggcagtgctggagttcctatataccaacagtgtcaagctgtaccgccactctgtgctggaagtgctgacagcggctgtggagtatgggctggaggaactgagagagtcccgccactagggagaggagaagacttcccagaggaggaaacatttgtgttcgatctggtagaacaaataggattttgttcctaggggaagtgggaagatggtattctagtcacagaggcaccaaaggagctagtgagacatttggtgtgtctgaactgtgaggagagggcaagacgagactgcagaggacgccagggcctggttcatgtagggccctcaagcttttggacttcttttaagcagagggcagtggagattcactgaaggtttccgataagggagtgaagaattggaaactcaggggagaagggattggaagaggtggagaggactcgctagtccagtcaggaggctagtgcagcagtcaagagatgagagatgtcacggatgaaattcaagtttctgctaaaaatagaagtatccttgagtcaggaagggaacaagtggaggaagataagcatcctgaaagaaggggagaattttgcatggcctttatctggttttgattagtggcgaatgtactagaagctgtgcctgcagtttgtggtgaaggtgctggatgtggacttggtttgtgaggccctgcaggtggccgtaacctttggcctggggcagctgcaggagcgctgcgtggctttcatagaggcccacagccaggtactgctcccttcatactcctcaccctacgcaccgcattctgctcctccctgacccatttgccggctcgcaggaggccctccggacccgaggcttcctggagctgtcggcggccgcgctgctgcccctgctccgcagcgacaagctctgcgtggacgaggctgaactggtccgcgcggcccgaagctgggcgcgcgtgggcgcggtgagtggggctgggggagcgcaagggcacggaaggaggtgctggccacgagactggtgagcgggcggcaggacaggtgcccgactcagggctggcgtttgcaggcggtgctggagcggccggtggctgaggtggcggccccggtggtgaaagagctgagactagccttgctggccccggcggagctgagcgccctggaagagcagaaccggcaggaaccactcatcccggtggggacgcggggaaccggcccagctccactcagcagggggtggagcagattgtggaggcgtggaaatgccatgccctgcggagaggggatgaggcccggggcgccccgtgtcgccgccggagaggcaccctgccccgggagcatcaccgctttctggacctgtccttcaaatgatccaacgccgggactcgcagggagccctcgacccgcccagctgagcctgccccaaactacagctcccgaagtgctcggcgttcggagcgggcttccgttcccagcgtgcccagtgagccgggcgccggaagaaccgttgtctgccacgcgcagccccttgtgcgggatcaagcccgtgtgggcgaggtggggtcgggccgggcagggcttgggctgggcctccctgagggggtgaaactcgaaaacgaggatttccttcgttccacaccctgactctacgccctgcccctgggcattgtcgtctactagtctattctgatgactcccacatatctatctgttcagctcagctccctctttcttttctttttctttctctttctttctttctttctttctttctttctttctttctttctttctttctttctttctttctttttctttctttctctttccttccttccttccttccttccttctttctttctctttctctatctctttctttctttctttctttctctcctctctc

SEQ ID NO: 463057 - DNA, 2511 bp, Homo sapiens
aggagggcgccacccaacgggcgggcgccaggggcaaccctgagaagctgacccttgagcccagagggggcaccgggcccagggatggccgctgacccccaggacccgcgcctggcccgaccagcgagttgcggcgggagaaggacgcggccaggcccagcatggagccccggcgcgaggccggggctggacctggacctgccggtcgggcctcatcaatgctgggcaggcagcctcggggccgcaccggtgagggtttccgcccggagtctttggcattctcctcctcctggcgtcccgggggcagaggcctgctggccatggacctgctggctggaggaaccacactcagggtggccttcaccaggcatctgtctacccaccccagcctcttgctcagtgatgtcaaggcactccgaagccttgtcaacaacccgcgatacagtgatgtttgcttcgtggttggtcaagaacggcaggaggtatttgcccatcggtgcttgttggcctgtagatgcaacttcttccagcgacttctgggcacagagccaggccccggggtgcccagtcctgtggtgctaagcactgtgccaactgaggccttcctggcagtgctggagttcctatataccaacagtgtcaagctgtaccgccactctgtgctggaagtgctgacagcggctgtggagtatgggctggaggaactgagagagtcccgccactagggagaggagaagacttcccagaggaggaaacatttgtgttcgatctggtagaacaaataggattttgttcctaggggaagtgggaagatggtattctagtcacagaggcaccaaaggagctagtgagacatttggtgtgtctgaactgtgaggagagggcaagacgagactgcagaggacgccagggcctggttcatgtagggccctcaagcttttggacttcttttaagcagagggcagtggagattcactgaaggtttccgataagggagtgaagaattggaaactcaggggagaagggattggaagaggtggagaggactcgctagtccagtcaggaggctagtgcagcagtcaagagatgagagatgtcacggatgaaattcaagtttctgctaaaaatagaagtatccttgagtcaggaagggaacaagtggaggaagataagcatcctgaaagaaggggagaattttgcatggcctttatctggttttgattagtggcgaatgtactagaagctgtgcctgcagtttgtggtgaaggtgctggatgtggacttggtttgtgaggccctgcaggtggccgtaacctttggcctggggcagctgcaggagcgctgcgtggctttcatagaggcccacagccaggtactgctcccttcatactcctcaccctacgcaccgcattctgctcctccctgacccatttgccggctcgcaggaggccctccggacccgaggcttcctggagctgtcggcggccgcgctgctgcccctgctccgcagcgacaagctctgcgtggacgaggctgaactggtccgcgcggcccgaagctgggcgcgcgtgggcgcggcggtgctggagcggccggtggctgaggtggcggccccggtggtgaaagagctgagactagccttgctggccccggcggagctgagcgccctggaagagcagaaccggcaggaaccactcatcccggtggggacgcggggaaccggcccagctccactcagcagggggtacagggcgctgggagggggcaggagcagcccggcccacggtcctcggggcgaggggccaccgcgggactgcgcactaactggccttgctctgcaggtggagcagattgtggaggcgtggaaatgccatgccctgcggagaggggatgaggcccggggcgccccgtgtcgccgccggagaggcaccctgccccgggagcatcaccgctttctggacctgtccttcaaatgatccaacgccgggactcgcagggagccctcgacccgcccagctgagcctgccccaaactacagctcccgaagtgctcggcgttcggagcgggcttccgttcccagcgtgcccagtgagccgggcgccggaagaaccgttgtctgccacgcgcagccccttgtgcgggatcaagcccgtgtgggcgaggtggggtcgggccgggcagggcttgggctgggcctccctgagggggtgaaactcgaaaacgaggatttccttcgttccacaccctgactctacgccctgcccctgggcattgtcgtctactagtctattctgatgactcccacatatctatctgttcagctcagctccctctttcttttctttttctttctctttctttctttctttctttctttctttctttctttctttctttctttctttctttctttctttttctttctttctctttccttccttccttccttccttccttctttctttctctttctctatctctttctttctttctttctttctctcctctctc

SEQ ID NO: 463058 - DNA, 2173 bp, Homo sapiens
cggcggtacatggcatcgaagacctgatgatccagcacaactgctcccgccagggccctacagcccctcccccgccccggggccccgcccttccaggcgcgggctccggcctccctgccccggacccttgtgactatgaaggccggttttcccggctgcatggtcgtcccccggggttcttgcattgcgcttccttcggggacccccatgtgcgcagcttccaccatcactttcacacatgccgtgtccaaggagcttggcctctactggataatgacttcctctttgtccaagccaccagctcccccatggcgttgggggccaacgctaccgccacccggaagctcaccatcatatttaagaacatgcaggaatgcattgatcagaaggtgtatcaggctgaggtggataatcttcctgtagcctttgaagatggttctatcaatggaggtgaccgacctgggggatccagtttgtcgattcaaactgctaaccctgggaaccatgtggagatccaagctgcctacattggcacaactataatcattcggcagacagctgggcagctctccttctccatcaaggtagcagaggatgtggccatggccttctcagctgaacaggacctgcagctctgtgttggggggtgccctccaagtcagcgactctctcgatcagagcgcaatcgtcggggagctataaccattgatactgccagacggctgtgcaaggaagggcttccagtggaagatgcttacttccattcctgtgtctttgatgttttaatttctggtgatcccaactttaccgtggcagctcaggcagcactggaggatgcccgagccttcctgccagacttagagaagctgcatctcttcccctcagatgctggggttcctctttcctcagcaaccctcttagctccactcctttctgggctctttgttctgtggctttgcattcagtaaggggaccatcagtcccattactagtttggaaatgatttggagatacagattggcatagaagaatgtaaagaatcattaaaggaagcagggcctaggagacacgtgaaacaatgacattatccagagtcagatgaggctgcagtccagggttgaaattatcacagaataaggattctgggcaaggttactgcattccggatctctgtggggctcttcaccaatttttccagcctcatttatagtaaacaaattgttctaatccatttactgcagatttcacccttataagtttagaggtcatgaaggttttaatgatcagtaaagatttaagggttgagatttttaagaggcaagagctgaaagcagaagacatgatcattagccataagaaactcaaaggaggaagacataattagggaaagaagtctatttgatgaatatgtgtgtgtaaggtatgttctgctttcttgattcaaaaatgaagcaggcattgtctagctcttaggtgaagggagtctctgcttttgaagaatggcacaggtaggacagaagtatcatccctaccccctaactaatctgttattaaagctacaaattcttcacaccatcctctgttgcctatgttgaatctctttacagatgcttgaaatggagtaaatgcaatgtgttcactccactgaaagagggctcggaagtatcagatactgttgctatctcagggagtttacaggctattggagagacaaaaccaattcacatgaaagagtgatgagtgtgtaattattcactaaatcctacagtatggtacattcagatgggaagatggtagatttgaactaaagtaataagaataataaaaggtaacagagaagatgggatttgaagtgagctttgaagactgggtaagattcaaattgttaacgatcttccaggcaatgaaaaccatctggagttatgcatggattcatgattcagcaaggaaatgagcaaaactcaaatgcagtagacaaggagtaatgggacagaaggttagatgggcagaggccagattatgaagcaccttaaaaagggggtaaggggtttaaatttgattaatatctaacacttattgaaacttaaaatctgccaggcaatgttttaaacacttttaaaacattgacttaattctcatagctctctaaggaaggtggtattcttatctctat

SEQ ID NO: 463059 - DNA, 2016 bp, Homo sapiens
ccttctctggttccctgacctcagtgagacagcagccggcctggggacctgggggagacacggaggaccccctggctggagctgacccacagagtagggaatcatggctggagaattggatagcagagtaatgtttgacctctggaaacactcattctcaatgcaagatcctccgctgcaatgctgactcaccatcatatttaagaacatgcaggaatgcattgatcagaaggtgtatcaggctgaggtggataatcttcctgtagcctttgaagatggttctatcaatggaggtgaccgacctgggggatccagtttgtcgattcaaactgctaaccctgggaaccatgtggagatccaagctgcctacattggcacaactataatcattcggcagacagctgggcagctctccttctccatcaaggtagcagaggatgtggccatggccttctcagctgaacaggacctgcagctctgtgttggggggtgccctccaagtcagcgactctctcgatcagagcgcaatcgtcggggagctataaccattgatactgccagacggctgtgcaaggaagggcttccagtggaagatgcttacttccattcctgtgtctttgatgttttaatttctggtgatcccaactttaccgtggcagctcaggcagcactggaggatgcccgagccttcctgccagacttagagaagctgcatctcttcccctcagatgctggggttcctctttcctcagcaaccctcttagctccactcctttctgggctctttgttctgtggctttgcattcagtaaggggaccatcagtcccattactagtttggaaatgatttggagatacagattggcatagaagaatgtaaagaatcattaaaggaagcagggcctaggagacacgtgaaacaatgacattatccagagtcagatgaggctgcagtccagggttgaaattatcacagaataaggattctgggcaaggttactgcattccggatctctgtggggctcttcaccaatttttccagcctcatttatagtaaacaaattgttctaatccatttactgcagatttcacccttataagtttagaggtcatgaaggttttaatgatcagtaaagatttaagggttgagatttttaagaggcaagagctgaaagcagaagacatgatcattagccataagaaactcaaaggaggaagacataattagggaaagaagtctatttgatgaatatgtgtgtgtaaggtatgttctgctttcttgattcaaaaatgaagcaggcattgtctagctcttaggtgaagggagtctctgcttttgaagaatggcacaggtaggacagaagtatcatccctaccccctaactaatctgttattaaagctacaaattcttcacaccatcctctgttgcctatgttgaatctctttacagatgcttgaaatggagtaaatgcaatgtgttcactccactgaaagagggctcggaagtatcagatactgttgctatctcagggagtttacaggctattggagagacaaaaccaattcacatgaaagagtgatgagtgtgtaattattcactaaatcctacagtatggtacattcagatgggaagatggtagatttgaactaaagtaataagaataataaaaggtaacagagaagatgggatttgaagtgagctttgaagactgggtaagattcaaattgttaacgatcttccaggcaatgaaaaccatctggagttatgcatggattcatgattcagcaaggaaatgagcaaaactcaaatgcagtagacaaggagtaatgggacagaaggttagatgggcagaggccagattatgaagcaccttaaaaagggggtaaggggtttaaatttgattaatatctaacacttattgaaacttaaaatctgccaggcaatgttttaaacacttttaaaacattgacttaattctcatagctctctaaggaaggtggtattcttatctctat

SEQ ID NO: 463060 - DNA, 5469 bp, Homo sapiens
agggcagtgaagctattccatatgataccacaatggcggatacacgtcagtatacatttgcccaaacccatagaatgtacaccaagagtgaactcaaacttaaactatgggctttggacgataaagatgctggccgtgagtactcacctgccgccaccacggcagagaatgggggcggcaagaagaaacagaaggagaaggaactggatgagctgaagaaggaggtggcaatggatgaccacaagctgtccttggatgagctgggccgcaaataccaagtggacctgtccaagggcctcaccaaccagcgggctcaggacgttctggctcgagatgggcccaacgccctcacaccacctcccacaacccctgagtgggtcaagttctgccgtcagcttttcggggggttctccatcctgctgtggattggggctatcctctgcttcctggcctacggcatccaggctgccatggaggatgaaccatccaacgacaatctatatctgggtgtggtgctggcagctgtggtcattgtcactggctgcttctcctactaccaggaggccaagagctccaagatcatggattccttcaagaacatggtacctcagcaagcccttgtgatccgggagggagagaagatgcagatcaacgcagaggaagtggtggtgggagacctggtggaggtgaagggtggagaccgcgtccctgctgacctccggatcatctcttctcatggctgtaaggtggataactcatccttaacaggagagtcggagccccagacccgctcccccgagttcacccatgagaaccccctggagacccgcaatatctgtttcttctccaccaactgtgttgaaggagaccggacggtgatgggccgcatagctactctcgcctcaggcctggaggttgggcggacacccatagcaatggagattgaacacttcatccagctgatcacaggggtcgctgtattcctgggggtctccttcttcgtgctctccctcatcctgggctacagctggctggaggcagtcatcttcctcatcggcatcatagtggccaacgtgcctgaggggcttctggccactgtcactgtgtgcctgaccctgacagccaagcgcatggcacggaagaactgcctggtgaagaacctggaggcggtggagacgctgggctccacgtccaccatctgctcggacaagacgggcaccctcacccagaaccgcatgaccgtcgcccacatgtggttcgacaaccaaatccatgaggctgacaccaccgaagatcagtctggggccacttttgacaaacgatcccctacgtggacggccctgtctcgaattgctggtctctgcaaccgcgccgtcttcaaggcaggacaggagaacatctccgtgtctaagcgggacacagctggtgatgcctctgagtcagctctgctcaagtgcattgagctctcctgtggctcagtgaggaaaatgagagacagaaaccccaaggtggcagagattcctttcaactctaccaacaagtaccagctgtctatccacgagcgagaagacagcccccagagccacgtgctggtgatgaagggggccccagagcgcattctggaccggtgctccaccatcctggtgcagggcaaggagatcccgctcgacaaggagatgcaagatgcctttcaaaatgcctacatggagctggggggacttggggagcgtgtgctgggattctgtcaactgaatctgccatctggaaagtttcctcggggcttcaaattcgacacggatgagctgaactttcccacggagaagctttgctttgtggggctcatgtctatgattgaccctccccgggctgctgtgccagatgctgtgggcaagtgccgaagcgcaggcatcaaggtgatcatggtaaccggggatcaccctatcacagccaaggccattgccaaaggcgtgggcatcatatcagagggtaacgagactgtggaggacattgcagcccggctcaacattcccatgagtcaagtcaaccccagagaagccaaggcatgcgtggtgcacggctctgacctgaaggacatgacatcggagcagctcgatgagatcctcaagaaccacacagagatcgtctttgctcgaacgtctccccagcagaagctcatcattgtggagggatgtcagaggcagggagccattgtggccgtgacgggtgacggggtgaacgactcccctgcattgaagaaggctgacattggcattgccatgggcatctctggctctgacgtctctaagcaggcagccgacatgatcctgctggatgacaactttgcctccatcgtcacgggggtggaggagggccgcctgatctttgacaacttgaagaaatccatcgcctacaccctgaccagcaacatccccgagatcacccccttcctgctgttcatcattgccaacatccccctacctctgggcactgtgaccatcctttgcattgacctgggcacagatatggtccctgccatctccttggcctatgaggcagctgagagtgatatcatgaagcggcagccacgaaactcccagacggacaagctggtgaatgagaggctcatcagcatggcctacggacagatcgggatgatccaggcactgggtggcttcttcacctactttgtgatcctggcagagaacggtttcctgccatcacggctactgggaatccgcctcgactgggatgaccggaccatgaatgatctggaggacagctatggacaggagtggacctatgagcagcggaaggtggtggagttcacgtgccacacggcattctttgccagcatcgtggtggtgcagtgggctgacctcatcatctgcaagacccgccgcaactcagtcttccagcagggcatgaagaacaagatcctgatttttgggctcctggaggagacggcgttggctgcctttctctcttactgcccaggcatgggtgtagccctccgcatgtacccgctcaaagtcacctggtggttctgcgccttcccctacagcctcctcatcttcatctatgatgaggtccgaaagctcatcctgcggcggtatcctggtggctgggtggagaaggagacatactactgaccccattggaagaagaaccaggcatggaaagatggggagctctggaggtgttgtggggatggtgatggagagggatggaaataacgggtggcattgggtggcaacatttggggagagataatgaggcaactcagcaggctaagttgcggggtatataaattggggtgatgaccccatagacctaactgtgaacaatcagattagacactatgtgttagagtccccccgaccagatccttttccatcccactccactatgttgtctattttttctgaggaattaagggttaccccaccctgcccactcccatcccttcaaccccacttcctactgtaatagatcagcatccaaaagcaggaacccatctaaaccagaaggaagccctctcagatcaccccagcctcactccatttcccacttccacccccgttagcttcctgcaggactctatccctggcttccccttcagaccttgcaatcacaaaaggttcttctggtgagtgcaagagcctgagactggaaaaggtggacttgtctcccagtcgaggctggtaagggaccttcagggagagctgggcagacaggtgggagatggaggtagggctggctggaggaaggaaacaacaaaggaagtgaggtagtgccaatgacaggacatttgacatgagtctccagatagatgtcgtggactccagctctacgtcccacattttagaataccccaccagcagaacaaactcagatctcatcagggtagcagcagaggcaggaccagaaggcaatcaagagcttccagaaatgccacacttgtgtgccacagagttccccgctgacccttggttaggggtcctcttagtccacaaggtccggatgtcactcatgtacttaataacacttcaccttctgtaatactaagtcctcagagctccatgctgttctgaaagggatggccacaagttctttcccagcctcttccattccctttcttttcatgcccatcccgatgaacctgcatcattccccgacactgccaagccaaccctggaaaaggagttcgctggccattggctagaatcagggtggagaagttccctgaaccttcctgtctcccagggacatgtatgcttccagggacaagcttaggtcatgaacatggtcagaacctttggacaagaggaaaaatactaagagatttgctttttctgggtgcggtggctcatgcctgtaatcccagcactttgggaggccgaggcaggtggatcatgaggtcaggagttcgaggcgagcctggccaacatggtgaaaccctgtctctactaaaagtacaaaaaattagccagtcatggtggcacacgcctgtaatctcagctactcaggaggctgaggcaggagaattgcttgaacctgtgaggaagaggttgcagtgagctgagatcgtgccattacactccagcctgggcgaaagggtgagactccatctcaaaaaaaaaaaaaatgatttgcttttgacgtcttaggtggcagggctgttccctccaggcaaatgcccttcaaaccgacgatcattgtgcccacttaccctgggctggagagttggtttcaggttcctacaggagatagctttctttcccttactccctatctaacacttttgctctgcaggcagccttgcccattctctaagcctggcttagaaggcactgggaatgtcctgtagagagagacctagataggtcatgcaagtgagaaagacatctgaggaaaatggaagacctaaggcagacaggaaggaagcacaaaagacaagcattgggtcagacccataaaccacctcccaaaggctgtcatttcattgcactggaattttgctttatcagaagcaaggaagtaagggagtcattgccttgggcctgggaatctaagtgggagacaatattaatttggatccgattaattggagattactaactgtggacaaaagtttatctttgcacaatcaataaaaatggcatttttttagtaaattaagagcataaacaatattgctagaggtggcatgtttagtctaccaaaaacaatacttttcaggcactttagaaatatccttttagaagcagcgagtgcatgggctaattatcatcaatctttatgtatttgttaaagaaacatctacaggatctttattggtgaccttttgtaagacattagtttgaggtactacctatgtacttgaaaataataaagtggcatttctttatgaaaaaaaaagaaatctcttccataattcagatttctacactttatacttgcctccctcct

SEQ ID NO: 463061 - DNA, 5422 bp, Homo sapiens
agggcagtgaagctattccatatgataccacaatggcggatacacgtcagtatacatttgcccaaacccatagaatgtacaccaagagtgaactcaaacttaaactatgggctttggacgataaagatgctggccgtgagtactcacctgccgccaccacggcagagaatgggggcggcaagaagaaacagaaggagaaggaactggatgagctgaagaaggaggtggcaatggatgaccacaagctgtccttggatgagctgggccgcaaataccaagtggacctgtccaagggcctcaccaaccagcgggctcaggacgttctggctcgagatgggcccaacgccctcacaccacctcccacaacccctgagtgggtcaagttctgccgtcagcttttcggggggttctccatcctgctgtggattggggctatcctctgcttcctggcctacggcatccaggctgccatggaggatgaaccatccaacgacaatctatatctgggtgtggtgctggcagctgtggtcattgtcactggctgcttctcctactaccaggaggccaagagctccaagatcatggattccttcaagaacatggtacctcagcaagcccttgtgatccgggagggagagaagatgcagatcaacgcagaggaagtggtggtgggagacctggtggaggtgaagggtggagaccgcgtccctgctgacctccggatcatctcttctcatggctgtaaggtggataactcatccttaacaggagagtcggagccccagacccgctcccccgagttcacccatgagaaccccctggagacccgcaatatctgtttcttctccaccaactgtgttgaaggagaccggacggtgatgggccgcatagctactctcgcctcaggcctggaggttgggcggacacccatagcaatggagattgaacacttcatccagctgatcacaggggtcgctgtattcctgggggtctccttcttcgtgctctccctcatcctgggctacagctggctggaggcagtcatcttcctcatcggcatcatagtggccaacgtgcctgaggggcttctggccactgtcactgtgtgcctgaccctgacagccaagcgcatggcacggaagaactgcctggtgaagaacctggaggcggtggagacgctgggctccacgtccaccatctgctcggacaagacgggcaccctcacccagaaccgcatgaccgtcgcccacatgtggttcgacaaccaaatccatgaggctgacaccaccgaagatcagtctggggccacttttgacaaacgatcccctacgtggacggccctgtctcgaattgctggtctctgcaaccgcgccgtcttcaaggcaggacaggagaacatctccgtgtctaagcgggacacagctggtgatgcctctgagtcagctctgctcaagtgcattgagctctcctgtggctcagtgaggaaaatgagagacagaaaccccaaggtggcagagattcctttcaactctaccaacaagtaccagctgtctatccacgagcgagaagacagcccccagagccacgtgctggtgatgaagggggccccagagcgcattctggaccggtgctccaccatcctggtgcagggcaaggagatcccgctcgacaaggagatgcaagatgcctttcaaaatgcctacatggagctggggggacttggggagcgtgtgctgggattctgtcaactgaatctgccatctggaaagtttcctcggggcttcaaattcgacacggatgagctgaactttcccacggagaagctttgctttgtggggctcatgtctatgattgaccctccccgggctgctgtgccagatgctgtgggcaagtgccgaagcgcaggcatcaaggtgatcatggtaaccggggatcaccctatcacagccaaggccattgccaaaggcgtgggcatcatatcagagggtaacgagactgtggaggacattgcagcccggctcaacattcccatgagtcaagtcaaccccagagaagccaaggcatgcgtggtgcacggctctgacctgaaggacatgacatcggagcagctcgatgagatcctcaagaaccacacagagatcgtctttgctcgaacgtctccccagcagaagctcatcattgtggagggatgtcagaggcagggagccattgtggccgtgacgggtgacggggtgaacgactcccctgcattgaagaaggctgacattggcattgccatgggcatctctggctctgacgtctctaagcaggcagccgacatgatcctgctggatgacaactttgcctccatcgtcacgggggtggaggagggccgcctgatctttgacaacttgaagaaatccatcgcctacaccctgaccagcaacatccccgagatcacccccttcctgctgttcatcattgccaacatccccctacctctgggcactgtgaccatcctttgcattgacctgggcacagatatggtccctgccatctccttggcctatgaggcagctgagagtgatatcatgaagcggcagccacgaaactcccagacggacaagctggtgaatgagaggctcatcagcatggcctacggacagatcgggatgatccaggcactgggtggcttcttcacctactttgtgatcctggcagagaacggtttcctgccatcacggctactgggaatccgcctcgactgggatgaccggaccatgaatgatctggaggacagctatggacaggagtggacctatgagcagcggaaggtggtggagttcacgtgccacacggcattctttgccagcatcgtggtggtgcagtgggctgacctcatcatctgcaagacccgccgcaactcagtcttccagcagggcatgaagaacaagatcctgatttttgggctcctggaggagacggcgttggctgcctttctctcttactgcccaggcatgggtgtagccctccgcatgtacccgctcaaagtcacctggtggttctgcgccttcccctacagcctcctcatcttcatctatgatgaggtccgaaagctcatcctgcggcggtatcctggtggctgggtggagaaggagacatactactgaccccattggaagaagaaccaggcatggaaagatggggagctctggaggtgttgtggggatggtgatggagagggatggaaataacgggtggcattgggtggcaacatttggggagagataatgaggcaactcagcaggctaagttgcggggtatataaattggggtgatgaccccatagacctaactgtgaacaatcagattagacactatgtgttagagtccccccgaccagatccttttccatcccactccactatgttgtctattttttctgaggaattaagggttaccccaccctgcccactcccatcccttcaaccccacttcctactgtaatagatcagcatccaaaagcaggaacccatctaaaccagaaggaagccctctcagatcaccccagcctcactccatttcccacttccacccccgttagcttcctgcaggactctatccctggcttccccttcagaccttgcaatcacaaaaggttcttctggtgagtgcaagagcctgagactggaaaaggtggacttgtctcccagtcgaggctggtaagggaccttcagggagagctgggcagacaggtgggagatggaggtagggctggctggaggaaggaaacaacaaaggaagtgaggtagtgccaatgacaggacatttgacatgagtctccagatagatgtcgtggactccagctctacgtcccacattttagaataccccaccagcagaacaaactcagatctcatcagggtagcagcagaggcaggaccagaaggcaatcaagagcttccagaaatgccacacttgtgtgccacagagttccccgctgacccttggttaggggtcctcttagtccacaaggtccggatgtcactcatgtacttaataacacttcaccttctgtaatactaagtcctcagagctccatgctgttctgaaagggatggccacaagttctttcccagcctcttccattccctttcttttcatgcccatcccgatgaacctgcatcattccccgacactgccaagccaaccctggaaaaggagttcgctggccattggctagaatcagggtggagaagttccctgaaccttcctgtctcccagggacatgtatgcttccagggacaagcttaggtcatgaacatggtcagaacctttggacaagaggaaaaatactaagagatttgctttttctgggtgcggtggctcatgcctgtaatcccagcactttgggaggccgaggcaggtggatcatgaggtcaggagttcgaggcgagcctggccaacatggtgaaaccctgtctctactaaaagtacaaaaaattagccagtcatggtggcacacgcctgtaatctcagctactcaggaggctgaggcaggagaattgcttgaacctgtgaggaagaggttgcagtgagctgagatcgtgccattacactccagcctgggcgaaagggtgagactccatctcaaaaaaaaaaaaaatgatttgcttttgacgtcttaggtggcagggctgttccctccaggcaaatgcccttcaaaccgacgatcattgtgcccacttaccctgggctggagagttggtttcaggttcctacaggagatagctttctttcccttactccctatctaacacttttgctctgcaggcagccttgcccattctctaagcctggcttagaaggcactgggaatgtcctgtagagagagacctagataggtcatgcaagtgagaaagacatctgaggaaaatggaagacctaaggcagacaggaaggaagcacaaaagacaagcattgggtcagacccataaaccacctcccaaaggctgtcatttcattgcactggaattttgctttatcagaagcaaggaagtaagggagtcattgccttgggcctgggaatctaagtgggagacaatattaatttggatccgattaattggagattactaactgtggacaaaagtttatctttgcacaatcaataaaaatggcatttttttagtaaattaagagcataaacaatattgctagaggtggcatgtttagtctaccaaaaacaatacttttcaggcactttagaaatatccttttagaagcagcgagtgcatgggctaattatcatcaatctttatgtatttgttaaagaaacatctacaggatctttattggtgaccttttgtaagacattagtttgaggtactacctatgtacttgaaaataataaagtggcatttctttatgaaaaaaaaagaaa

SEQ ID NO: 463062 - DNA, 5315 bp, Homo sapiens
agggcagtgaagctattccatatgataccacaatggcggatacacgtcagtatacatttgcccaaacccatagaatgtacaccaagagtgaactcaaacttaaactatgggctttggacgataaagatgctggccgtgagtactcacctgccgccaccacggcagagaatgggggcggcaagaagaaacagaaggagaaggaactggatgagctgaagaaggaggtggcaatggatgaccacaagctgtccttggatgagctgggccgcaaataccaagtggacctgtccaagggcctcaccaaccagcgggctcaggacgttctggctcgagatgggcccaacgccctcacaccacctcccacaacccctgagtgggtcaagttctgccgtcagcttttcggggggttctccatcctgctgtggattggggctatcctctgcttcctggcctacggcatccaggctgccatggaggatgaaccatccaacgacaatctatatctgggtgtggtgctggcagctgtggtcattgtcactggctgcttctcctactaccaggaggccaagagctccaagatcatggattccttcaagaacatggtacctcagcaagcccttgtgatccgggagggagagaagatgcagatcaacgcagaggaagtggtggtgggagacctggtggaggtgaagggtggagaccgcgtccctgctgacctccggatcatctcttctcatggctgtaaggtggataactcatccttaacaggagagtcggagccccagacccgctcccccgagttcacccatgagaaccccctggagacccgcaatatctgtttcttctccaccaactgtgttgaaggagaccggacggtgatgggccgcatagctactctcgcctcaggcctggaggttgggcggacacccatagcaatggagattgaacacttcatccagctgatcacaggggtcgctgtattcctgggggtctccttcttcgtgctctccctcatcctgggctacagctggctggaggcagtcatcttcctcatcggcatcatagtggccaacgtgcctgaggggcttctggccactgtcactgtgtgcctgaccctgacagccaagcgcatggcacggaagaactgcctggtgaagaacctggaggcggtggagacgctgggctccacgtccaccatctgctcggacaagacgggcaccctcacccagaaccgcatgaccgtcgcccacatgtggttcgacaaccaaatccatgaggctgacaccaccgaagatcagtctggggccacttttgacaaacgatcccctacgtggacggccctgtctcgaattgctggtctctgcaaccgcgccgtcttcaaggcaggacaggagaacatctccgtgtctaagcgggacacagctggtgatgcctctgagtcagctctgctcaagtgcattgagctctcctgtggctcagtgaggaaaatgagagacagaaaccccaaggtggcagagattcctttcaactctaccaacaagtaccagctgtctatccacgagcgagaagacagcccccagagccacgtgctggtgatgaagggggccccagagcgcattctggaccggtgctccaccatcctggtgcagggcaaggagatcccgctcgacaaggagatgcaagatgcctttcaaaatgcctacatggagctggggggacttggggagcgtgtgctgggattctgtcaactgaatctgccatctggaaagtttcctcggggcttcaaattcgacacggatgagctgaactttcccacggagaagctttgctttgtggggctcatgtctatgattgaccctccccgggctgctgtgccagatgctgtgggcaagtgccgaagcgcaggcatcaaggtgatcatggtaaccggggatcaccctatcacagccaaggccattgccaaaggcgtgggcatcatatcagagggtaacgagactgtggaggacattgcagcccggctcaacattcccatgagtcaagtcaaccccagagaagccaaggcatgcgtggtgcacggctctgacctgaaggacatgacatcggagcagctcgatgagatcctcaagaaccacacagagatcgtctttgctcgaacgtctccccagcagaagctcatcattgtggagggatgtcagaggcagggagccattgtggccgtgacgggtgacggggtgaacgactcccctgcattgaagaaggctgacattggcattgccatgggcatctctggctctgacgtctctaagcaggcagccgacatgatcctgctggatgacaactttgcctccatcgtcacgggggtggaggagggccgcctgatctttgacaacttgaagaaatccatcgcctacaccctgaccagcaacatccccgagatcacccccttcctgctgttcatcattgccaacatccccctacctctgggcactgtgaccatcctttgcattgacctgggcacagatatggtccctgccatctccttggcctatgaggcagctgagagtgatatcatgaagcggcagccacgaaactcccagacggacaagctggtgaatgagaggctcatcagcatggcctacggacagatcgagaacggtttcctgccatcacggctactgggaatccgcctcgactgggatgaccggaccatgaatgatctggaggacagctatggacaggagtggacctatgagcagcggaaggtggtggagttcacgtgccacacggcattctttgccagcatcgtggtggtgcagtgggctgacctcatcatctgcaagacccgccgcaactcagtcttccagcagggcatgaagaacaagatcctgatttttgggctcctggaggagacggcgttggctgcctttctctcttactgcccaggcatgggtgtagccctccgcatgtacccgctcaaagtcacctggtggttctgcgccttcccctacagcctcctcatcttcatctatgatgaggtccgaaagctcatcctgcggcggtatcctggtggctgggtggagaaggagacatactactgaccccattggaagaagaaccaggcatggaaagatggggagctctggaggtgttgtggggatggtgatggagagggatggaaataacgggtggcattgggtggcaacatttggggagagataatgaggcaactcagcaggctaagttgcggggtatataaattggggtgatgaccccatagacctaactgtgaacaatcagattagacactatgtgttagagtccccccgaccagatccttttccatcccatcccatcccttcaaccccacttcctactgtaatagatcagcatccaaaagcaggaacccatctaaaccagaaggaagccctctcagatcaccccagcctcactccatttcccacttccacccccgttagcttcctgcaggactctatccctggcttccccttcagaccttgcaatcacaaaaggttcttctggtgagtgcaagagcctgagactggaaaaggtggacttgtctcccagtcgaggctggtaagggaccttcagggagagctgggcagacaggtgggagatggaggtagggctggctggaggaaggaaacaacaaaggaagtgaggtagtgccaatgacaggacatttgacatgagtctccagatagatgtcgtggactccagctctacgtcccacattttagaataccccaccagcagaacaaactcagatctcatcagggtagcagcagaggcaggaccagaaggcaatcaagagcttccagaaatgccacacttgtgtgccacagagttccccgctgacccttggttaggggtcctcttagtccacaaggtccggatgtcactcatgtacttaataacacttcaccttctgtaatactaagtcctcagagctccatgctgttctgaaagggatggccacaagttctttcccagcctcttccattccctttcttttcatgcccatcccgatgaacctgcatcattccccgacactgccaagccaaccctggaaaaggagttcgctggccattggctagaatcagggtggagaagttccctgaaccttcctgtctcccagggacatgtatgcttccagggacaagcttaggtcatgaacatggtcagaacctttggacaagaggaaaaatactaagagatttgctttttctgggtgcggtggctcatgcctgtaatcccagcactttgggaggccgaggcaggtggatcatgaggtcaggagttcgaggcgagcctggccaacatggtgaaaccctgtctctactaaaagtacaaaaaattagccagtcatggtggcacacgcctgtaatctcagctactcaggaggctgaggcaggagaattgcttgaacctgtgaggaagaggttgcagtgagctgagatcgtgccattacactccagcctgggcgaaagggtgagactccatctcaaaaaaaaaaaaaatgatttgcttttgacgtcttaggtggcagggctgttccctccaggcaaatgcccttcaaaccgacgatcattgtgcccacttaccctgggctggagagttggtttcaggttcctacaggagatagctttctttcccttactccctatctaacacttttgctctgcaggcagccttgcccattctctaagcctggcttagaaggcactgggaatgtcctgtagagagagacctagataggtcatgcaagtgagaaagacatctgaggaaaatggaagacctaaggcagacaggaaggaagcacaaaagacaagcattgggtcagacccataaaccacctcccaaaggctgtcatttcattgcactggaattttgctttatcagaagcaaggaagtaagggagtcattgccttgggcctgggaatctaagtgggagacaatattaatttggatccgattaattggagattactaactgtggacaaaagtttatctttgcacaatcaataaaaatggcatttttttagtaaattaagagcataaacaatattgctagaggtggcatgtttagtctaccaaaaacaatacttttcaggcactttagaaatatccttttagaagcagcgagtgcatgggctaattatcatcaatctttatgtatttgttaaagaaacatctacaggatctttattggtgaccttttgtaagacattagtttgaggtactacctatgtacttgaaaataataaagtggcatttctttatgaaaaaaaaagaaa

SEQ ID NO: 463063 - DNA, 5371 bp, Homo sapiens
agggcagtgaagctattccatatgataccacaatggcggatacacgtcagtatacatttgcccaaacccatagaatgtacaccaagagtgaactcaaacttaaactatgggctttggacgataaagatgctggccgtgagtactcacctgccgccaccacggcagagaatgggggcggcaagaagaaacagaaggagaaggaactggatgagctgaagaaggaggtggcaatggatgaccacaagctgtccttggatgagctgggccgcaaataccaagtggacctgtccaagggcctcaccaaccagcgggctcaggacgttctggctcgagatgggcccaacgccctcacaccacctcccacaacccctgagtgggtcaagttctgccgtcagcttttcggggggttctccatcctgctgtggattggggctatcctctgcttcctggcctacggcatccaggctgccatggaggatgaaccatccaacgacaatctatatctgggtgtggtgctggcagctgtggtcattgtcactggctgcttctcctactaccaggaggccaagagctccaagatcatggattccttcaagaacatggtacctcagcaagcccttgtgatccgggagggagagaagatgcagatcaacgcagaggaagtggtggtgggagacctggtggaggtgaagggtggagaccgcgtccctgctgacctccggatcatctcttctcatggctgtaaggtggataactcatccttaacaggagagtcggagccccagacccgctcccccgagttcacccatgagaaccccctggagacccgcaatatctgtttcttctccaccaactgtgttgaaggagaccggacggtgatgggccgcatagctactctcgcctcaggcctggaggttgggcggacacccatagcaatggagattgaacacttcatccagctgatcacaggggtcgctgtattcctgggggtctccttcttcgtgctctccctcatcctgggctacagctggctggaggcagtcatcttcctcatcggcatcatagtggccaacgtgcctgaggggcttctggccactgtcactgtgtgcctgaccctgacagccaagcgcatggcacggaagaactgcctggtgaagaacctggaggcggtggagacgctgggctccacgtccaccatctgctcggacaagacgggcaccctcacccagaaccgcatgaccgtcgcccacatgtggttcgacaaccaaatccatgaggctgacaccaccgaagatcagtctggggccacttttgacaaacgatcccctacgtggacggccctgtctcgaattgctggtctctgcaaccgcgccgtcttcaaggcaggacaggagaacatctccgtgtctaagcgggacacagctggtgatgcctctgagtcagctctgctcaagtgcattgagctctcctgtggctcagtgaggaaaatgagagacagaaaccccaaggtggcagagattcctttcaactctaccaacaagtaccagctgtctatccacgagcgagaagacagcccccagagccacgtgctggtgatgaagggggccccagagcgcattctggaccggtgctccaccatcctggtgcagggcaaggagatcccgctcgacaaggagatgcaagatgcctttcaaaatgcctacatggagctggggggacttggggagcgtgtgctgggattctgtcaactgaatctgccatctggaaagtttcctcggggcttcaaattcgacacggatgagctgaactttcccacggagaagctttgctttgtggggctcatgtctatgattgaccctccccgggctgctgtgccagatgctgtgggcaagtgccgaagcgcaggcatcaaggtgatcatggtaaccggggatcaccctatcacagccaaggccattgccaaaggcgtgggcatcatatcagagggtaacgagactgtggaggacattgcagcccggctcaacattcccatgagtcaagtcaaccccagagaagccaaggcatgcgtggtgcacggctctgacctgaaggacatgacatcggagcagctcgatgagatcctcaagaaccacacagagatcgtctttgctcgaacgtctccccagcagaagctcatcattgtggagggatgtcagaggcagggagccattgtggccgtgacgggtgacggggtgaacgactcccctgcattgaagaaggctgacattggcattgccatgggcatctctggctctgacgtctctaagcaggcagccgacatgatcctgctggatgacaactttgcctccatcgtcacgggggtggaggagggccgcctgatctttgacaacttgaagaaatccatcgcctacaccctgaccagcaacatccccgagatcacccccttcctgctgttcatcattgccaacatccccctacctctgggcactgtgaccatcctttgcattgacctgggcacagatatggtccctgccatctccttggcctatgaggcagctgagagtgatatcatgaagcggcagccacgaaactcccagacggacaagctggtgaatgagaggctcatcagcatggcctacggacagatcgagaacggtttcctgccatcacggctactgggaatccgcctcgactgggatgaccggaccatgaatgatctggaggacagctatggacaggagtggacctatgagcagcggaaggtggtggagttcacgtgccacacggcattctttgccagcatcgtggtggtgcagtgggctgacctcatcatctgcaagacccgccgcaactcagtcttccagcagggcatgaagaacaagatcctgatttttgggctcctggaggagacggcgttggctgcctttctctcttactgcccaggcatgggtgtagccctccgcatgtacccgctcaaagtcacctggtggttctgcgccttcccctacagcctcctcatcttcatctatgatgaggtccgaaagctcatcctgcggcggtatcctggtggctgggtggagaaggagacatactactgaccccattggaagaagaaccaggcatggaaagatggggagctctggaggtgttgtggggatggtgatggagagggatggaaataacgggtggcattgggtggcaacatttggggagagataatgaggcaactcagcaggctaagttgcggggtatataaattggggtgatgaccccatagacctaactgtgaacaatcagattagacactatgtgttagagtccccccgaccagatccttttccatcccactccactatgttgtctattttttctgaggaattaagggttaccccaccctgcccactcccatcccttcaaccccacttcctactgtaatagatcagcatccaaaagcaggaacccatctaaaccagaaggaagccctctcagatcaccccagcctcactccatttcccacttccacccccgttagcttcctgcaggactctatccctggcttccccttcagaccttgcaatcacaaaaggttcttctggtgagtgcaagagcctgagactggaaaaggtggacttgtctcccagtcgaggctggtaagggaccttcagggagagctgggcagacaggtgggagatggaggtagggctggctggaggaaggaaacaacaaaggaagtgaggtagtgccaatgacaggacatttgacatgagtctccagatagatgtcgtggactccagctctacgtcccacattttagaataccccaccagcagaacaaactcagatctcatcagggtagcagcagaggcaggaccagaaggcaatcaagagcttccagaaatgccacacttgtgtgccacagagttccccgctgacccttggttaggggtcctcttagtccacaaggtccggatgtcactcatgtacttaataacacttcaccttctgtaatactaagtcctcagagctccatgctgttctgaaagggatggccacaagttctttcccagcctcttccattccctttcttttcatgcccatcccgatgaacctgcatcattccccgacactgccaagccaaccctggaaaaggagttcgctggccattggctagaatcagggtggagaagttccctgaaccttcctgtctcccagggacatgtatgcttccagggacaagcttaggtcatgaacatggtcagaacctttggacaagaggaaaaatactaagagatttgctttttctgggtgcggtggctcatgcctgtaatcccagcactttgggaggccgaggcaggtggatcatgaggtcaggagttcgaggcgagcctggccaacatggtgaaaccctgtctctactaaaagtacaaaaaattagccagtcatggtggcacacgcctgtaatctcagctactcaggaggctgaggcaggagaattgcttgaacctgtgaggaagaggttgcagtgagctgagatcgtgccattacactccagcctgggcgaaagggtgagactccatctcaaaaaaaaaaaaaatgatttgcttttgacgtcttaggtggcagggctgttccctccaggcaaatgcccttcaaaccgacgatcattgtgcccacttaccctgggctggagagttggtttcaggttcctacaggagatagctttctttcccttactccctatctaacacttttgctctgcaggcagccttgcccattctctaagcctggcttagaaggcactgggaatgtcctgtagagagagacctagataggtcatgcaagtgagaaagacatctgaggaaaatggaagacctaaggcagacaggaaggaagcacaaaagacaagcattgggtcagacccataaaccacctcccaaaggctgtcatttcattgcactggaattttgctttatcagaagcaaggaagtaagggagtcattgccttgggcctgggaatctaagtgggagacaatattaatttggatccgattaattggagattactaactgtggacaaaagtttatctttgcacaatcaataaaaatggcatttttttagtaaattaagagcataaacaatattgctagaggtggcatgtttagtctaccaaaaacaatacttttcaggcactttagaaatatccttttagaagcagcgagtgcatgggctaattatcatcaatctttatgtatttgttaaagaaacatctacaggatctttattggtgaccttttgtaagacattagtttgaggtactacctatgtacttgaaaataataaagtggcatttctttatgaaaaaaaaagaaa

SEQ ID NO: 463064 - DNA, 5561 bp, Homo sapiens
  misc_feature (5443)..(5443): n is a, c, g, or t
  misc_feature (5458)..(5459): n is a, c, g, or t
  misc_feature (5556)..(5556): n is a, c, g, or t
agggcagtgaagctattccatatgataccacaatggcggatacacgtcagtatacatttgcccaaacccatagaatgtacaccaagagtgaactcaaacttaaactatgggctttggacgataaagatgctggccgtgagtactcacctgccgccaccacggcagagaatgggggcggcaagaagaaacagaaggagaaggaactggatgagctgaagaaggaggtggcaatggatgaccacaagctgtccttggatgagctgggccgcaaataccaagtggacctgtccaagggcctcaccaaccagcgggctcaggacgttctggctcgagatgggcccaacgccctcacaccacctcccacaacccctgagtgggtcaagttctgccgtcagcttttcggggggttctccatcctgctgtggattggggctatcctctgcttcctggcctacggcatccaggctgccatggaggatgaaccatccaacgacaatctatatctgggtgtggtgctggcagctgtggtcattgtcactggctgcttctcctactaccaggaggccaagagctccaagatcatggattccttcaagaacatggtacctcagcaagcccttgtgatccgggagggagagaagatgcagatcaacgcagaggaagtggtggtgggagacctggtggaggtgaagggtggagaccgcgtccctgctgacctccggatcatctcttctcatggctgtaaggtggataactcatccttaacaggagagtcggagccccagacccgctcccccgagttcacccatgagaaccccctggagacccgcaatatctgtttcttctccaccaactgtgttgaaggagaccggacggtgatgggccgcatagctactctcgcctcaggcctggaggttgggcggacacccatagcaatggagattgaacacttcatccagctgatcacaggggtcgctgtattcctgggggtctccttcttcgtgctctccctcatcctgggctacagctggctggaggcagtcatcttcctcatcggcatcatagtggccaacgtgcctgaggggcttctggccactgtcactgtgtgcctgaccctgacagccaagcgcatggcacggaagaactgcctggtgaagaacctggaggcggtggagacgctgggctccacgtccaccatctgctcggacaagacgggcaccctcacccagaaccgcatgaccgtcgcccacatgtggttcgacaaccaaatccatgaggctgacaccaccgaagatcagtctggggccacttttgacaaacgatcccctacgtggacggccctgtctcgaattgctggtctctgcaaccgcgccgtcttcaaggcaggacaggagaacatctccgtgtctaagcgggacacagctggtgatgcctctgagtcagctctgctcaagtgcattgagctctcctgtggctcagtgaggaaaatgagagacagaaaccccaaggtggcagagattcctttcaactctaccaacaagtaccagctgtctatccacgagcgagaagacagcccccagagccacgtgctggtgatgaagggggccccagagcgcattctggaccggtgctccaccatcctggtgcagggcaaggagatcccgctcgacaaggagatgcaagatgcctttcaaaatgcctacatggagctggggggacttggggagcgtgtgctgggattctgtcaactgaatctgccatctggaaagtttcctcggggcttcaaattcgacacggatgagctgaactttcccacggagaagctttgctttgtggggctcatgtctatgattgaccctccccgggctgctgtgccagatgctgtgggcaagtgccgaagcgcaggcatcaaggtgatcatggtaaccggggatcaccctatcacagccaaggccattgccaaaggcgtgggcatcatatcagagggtaacgagactgtggaggacattgcagcccggctcaacattcccatgagtcaagtcaaccccagagaagccaaggcatgcgtggtgcacggctctgacctgaaggacatgacatcggagcagctcgatgagatcctcaagaaccacacagagatcgtctttgctcgaacgtctccccagcagaagctcatcattgtggagggatgtcagaggcagggagccattgtggccgtgacgggtgacggggtgaacgactcccctgcattgaagaaggctgacattggcattgccatgggcatctctggctctgacgtctctaagcaggcagccgacatgatcctgctggatgacaactttgcctccatcgtcacgggggtggaggagggccgcctgatctttgacaacttgaagaaatccatcgcctacaccctgaccagcaacatccccgagatcacccccttcctgctgttcatcattgccaacatccccctacctctgggcactgtgaccatcctttgcattgacctgggcacagatatggtccctgccatctccttggcctatgaggcagctgagagtgatatcatgaagcggcagccacgaaactcccagacggacaagctggtgaatgagaggctcatcagcatggcctacggacagatcgagaacggtttcctgccatcacggctactgggaatccgcctcgactgggatgaccggaccatgaatgatctggaggacagctatggacaggagtggacctatgagcagcggaaggtggtggagttcacgtgccacacggcattctttgccagcatcgtggtggtgcagtgggctgacctcatcatctgcaagacccgccgcaactcagtcttccagcagggcatgaagaacaagatcctgatttttgggctcctggaggagacggcgttggctgcctttctctcttactgcccaggcatgggtgtagccctccgcatgtacccgctcaaagtcacctggtggttctgcgccttcccctacagcctcctcatcttcatctatgatgaggtccgaaagctcatcctgcggcggtatcctggtggctgggtggagaaggagacatactactgaccccattggaagaagaaccaggcatggaaagatggggagctctggaggtgttgtggggatggtgatggagagggatggaaataacgggtggcattgggtggcaacatttggggagagataatgaggcaactcagcaggctaagttgcggggtatataaattggggtgatgaccccatagacctaactgtgaacaatcagattagacactatgtgttagagtccccccgaccagatccttttccatcccactccactatgttgtctattttttctgaggaattaagggttaccccaccctgcccactcccatcccttcaaccccacttcctactgtaatagatcagcatccaaaagcaggaacccatctaaaccagaaggaagccctctcagatcaccccagcctcactccatttcccacttccacccccgttagcttcctgcaggactctatccctggcttccccttcagaccttgcaatcacaaaaggttcttctggtgagtgcaagagcctgagactggaaaaggtggacttgtctcccagtcgaggctggtaagggaccttcagggagagctgggcagacaggtgggagatggaggtagggctggctggaggaaggaaacaacaaaggaagtgaggtagtgccaatgacaggacatttgacatgagtctccagatagatgtcgtggactccagctctacgtcccacattttagaataccccaccagcagaacaaactcagatctcatcagggtagcagcagaggcaggaccagaaggcaatcaagagcttccagaaatgccacacttgtgtgccacagagttccccgctgacccttggttaggggtcctcttagtccacaaggtccggatgtcactcatgtacttaataacacttcaccttctgtaatactaagtcctcagagctccatgctgttctgaaagggatggccacaagttctttcccagcctcttccattccctttcttttcatgcccatcccgatgaacctgcatcattccccgacactgccaagccaaccctggaaaaggagttcgctggccattggctagaatcagggtggagaagttccctgaaccttcctgtctcccagggacatgtatgcttccagggacaagcttaggtcatgaacatggtcagaacctttggacaagaggaaaaatactaagagatttgctttttctgggtgcggtggctcatgcctgtaatcccagcactttgggaggccgaggcaggtggatcatgaggtcaggagttcgaggcgagcctggccaacatggtgaaaccctgtctctactaaaagtacaaaaaattagccagtcatggtggcacacgcctgtaatctcagctactcaggaggctgaggcaggagaattgcttgaacctgtgaggaagaggttgcagtgagctgagatcgtgccattacactccagcctgggcgaaagggtgagactccatctcaaaaaaaaaaaaaatgatttgcttttgacgtcttaggtggcagggctgttccctccaggcaaatgcccttcaaaccgacgatcattgtgcccacttaccctgggctggagagttggtttcaggttcctacaggagatagctttctttcccttactccctatctaacacttttgctctgcaggcagccttgcccattctctaagcctggcttagaaggcactgggaatgtcctgtagagagagacctagataggtcatgcaagtgagaaagacatctgaggaaaatggaagacctaaggcagacaggaaggaagcacaaaagacaagcattgggtcagacccataaaccacctcccaaaggctgtcatttcattgcactggaattttgctttatcagaagcaaggaagtaagggagtcattgccttgggcctgggaatctaagtgggagacaatattaatttggatccgattaattggagattactaactgtggacaaaagtttatctttgcacaatcaataaaaatggcatttttttagtaaattaagagcataaacaatattgctagaggtggcatgtttagtctaccaaaaacaatacttttcaggcactttagaaatatccttttagaagcagcgagtgcatgggctaattatcatcaatctttatgtatttgttaaagaaacatctacaggatctttattggtgaccttttgtaagacattagtttgaggtactacctatgtacttgaaaataataaagtggcatttctttatgaaaaaaaaagaaaaactgagttttacccatctttataaatgatgctacactactaaactgtgatgcatttgacatctgtcattcntctgtggctgaccanncatgcaacattctttatattttgggcacttcattactgtgagaagcttaagaccttctttccacccgtgaacataagggggccacatacttggtttnccaat

SEQ ID NO: 463065 - DNA, 1584 bp, Homo sapiens
agtgcaagaagatgttatacttcacagtaagggctagtttctaaacatgaaagaacacatagcttatgtaacatgacatttgttggagaatatgccctagaaaatcatgatatcacagatatatactaaatatctgaaggagattacggagaaaacatttccagcggaggagttctttaatatagacagagcttgtttcagaattggtatcttcctgaatatttggctgcttggaaaaagttacattggtgccgggattcagcccttgcctggacagaggtggccgctagagtcatcagcatggacactggcaccagtgactacataggtcccaggatcgtagccagccacctcgggtgcctccggagaccacttgagaagtgcagagactgtgggccagcccctcattcttgtctgagacagtgatgccctccccactcagtaattatgcacagctagcagagctctgaaatgaatggcttcatttaatcacaaaagaaggaataccagcaagaccacccaggccccagctccggtttttcctgaagaatttggccgcatctccctttttgaaggcagagtttcatcttgctccagggagaagcaacttcctgggcatgcgtgttaagagacaaaaaatgatgacgtttgatgaccactccaccagaaaagggaagaaagcctgaggggcctgcgtggacctccctaaacacactgcgcatgctccattccaaacggtatggcgagcactgcgcatgcgggaaacccaccctcgctcccgccacatctgtgccccaataccacttgttacttagcatccatgctggctggctgccgtggccacacttacaggtggtgtgggtgggcactgttctcggtccacacatcctccccaagaaccctgttgaatggagatgtgacagggccaggggtcacttaaagattgttcacaggctgctaacaggctgggggaacagtgggtccaactgttctggaagagaaagcagatgtgtgaatggaagaaagagatgcattcgaggttacagaatgaaggtcagcgggaaagatgagaattcaggattctcactgatagttagaggaaagtgtggtagagacataatcaaagattcagacaaagatataactacagaatgcacatgacggttttgttaatacaccaaaaggaaaaaaattaaataacggactctcccaataaattgtgaccatctatagtttggaataacatgaagattgttaaaaactatgtttacaagaatggcaataacagagaaacacttgctatataattttcacaataacaaggtgaagaaatattatatatatatataataaaattcaaatttttaagagaaattaaaatgtatagaaaacattggaaaaggatacacttaataatctttttttcagcatggtagaattgtgggtgatttttgttccctttatattttttaatactttgtactttttaatgacaaatgtatatactaccatttaatgataaaaatatatttttaaaatactggataagaattattcaaataaatgccttatttaaaagttaaa

SEQ ID NO: 463066 - DNA, 618 bp, Homo sapiens
ttgctactttttatggagggtttttgaaggcgtctctcataagatggcatttgagcagagacctgaggaagtgaaagatggagggctgaagcttccagttagaggaacaagcaaagaccccgagcaggatcaggaaagtgtggtagagacataatcaaagattcagacaaagatataactacagaatgcacatgacggttttgttaatacaccaaaaggaaaaaaattaaataacggactctcccaataaattgtgaccatctatagtttggaataacatgaagattgttaaaaactatgtttacaagaatggcaataacagagaaacacttgctatataattttcacaataacaaggtgaagaaatattatatatatatataataaaattcaaatttttaagagaaattaaaatgtatagaaaacattggaaaaggatacacttaataatctttttttcagcatggtagaattgtgggtgatttttgttccctttatattttttaatactttgtactttttaatgacaaatgtatatactaccatttaatgataaaaatatatttttaaaatactggataagaattattcaaataaatgccttatttaaaagttaaa

SEQ ID NO: 463067 - DNA, 900 bp, Homo sapiens
agtgcaagaagatgttatacttcacagtaagggctagtttctaaacatgaaagaacacatagcttatgtaacatgacatttgttggagaatatgccctagaaaatcatgatatcacagatatatactaaatatctgaaggagattacggagaaaacatttccagcggaggagttctttaatatagacagagcttgtttcagaattggtatcttcctgaatatttggctgcttggaaaaagttacattggtgccgggattcagcccttgcctggacagaggtggccgctagagtcatcagcatggacactggcaccagtgactacataggtcccaggatcgtagccagccacctcgggtgcctccggagaccacttgagaagtgcagagactgtgggccagcccctcattcttgtctgagacagtgatgccctccccactcagtaattatgcacagctagcagagctctgaaatgaatggcttcatttaatcacaaaagaaggaataccagcaagaccacccaggccccagctccggtttttcctgaagaatttggccgcatctccctttttgaaggcagagtttcatcttggtttttgaaggcgtctctcataagatggcatttgagcagagacctgaggaagtgaaagatggagggctgaagcttccagttagaggaacaagcaaagaccccgagcaggatcaggtttgatgtcttcaagtaatatccaggatgggatgaagctgcaggggagtgagcaaggtgtagacaggtagaaggtgaggttggaggagtgggtggacggggaggaatcatcccacagggccttgtacgcactgcaaaaactttagtcttttgctctaagaaattaagtccgttaattaaaaacaaatgaacaga

SEQ ID NO: 463068 - DNA, 1614 bp, Homo sapiens
tgccgcagccagcagcctgcagccgccgccgggttgtgcctcagactgtcagataaatcggcgggccgggccggcgggtcggtgagcgcggcccgggccggacatggcggcgctctacgcctgcaccaagtgccaccagcgcttccccttcgaggcgctgtctcaggggcagcagctgtgcaaggaatgtcggattgcacaccctgttgtgaagtgcacctactgcaggactgagtaccagcaggagagtaaaaccaatacaatatgcaagaaatgtgctcagaacgtgcagttgtatggaacgcccaaaccttgtcagtattgcaacataattgcagcatttattgggaataaatgccagcgctgcacaaattcagaaaagaagtatggaccaccctattcttgtgaacagtgcaagcagcagtgtgcatttgacaggaaagatgatagaaagaaggtagatgggaaattgctgtgctggctgtgcacactttcatacaaacgggtccttcagaagaccaaagagcagaggaaacacctgagtagctcttctcgtgctggccaccaggagaaggagcagtatagtcgcctgagtggtggtggccattataacagccagaaaacactttctacatcttcaattcaaaatgaaatcccaaagaaaaagtccaagtttgagtcaatcacaactaatggagacagcttctccccagacctggctctggactcaccaggcactgaccactttgtcatcattgcccaactgaaggaagaagtggctaccctgaagaagatgttgcatcaaaaggatcaaatgattttagagaaagagaagaagattacagagttgaaggctgattttcagtaccaggaatcgcagatgagagccaaaatgaaccagatggagaaaacccacaaagaagtcacagaacaactgcagagatgggctctcgctatattgcctgggctagtcttgaactcctggcttcaagcaatcctcccacctcaacctcacaaagtgctaggattacaggcgtgagccaccatgcccagcctgtagatactttgtattgtttcactcttggatgtgttctgatcttttcccctcaaaaacagtagaattattaagtatgttctttgatttttgaataaaccagatgtgattccagatgtctgaattatagattctgtttatccagctcatgaagtcacttcacagtttgtattgcataaagcatccctttgtaacagtgggtcccaagagattgagcgtatgtgtttgagattcatccgtgtttttgcatgtctcagtaatttattccatgtctcagtagtttctttttatagctgaatagttttccactgtatggatgtaccacagtttatctcttcagcagttgatggacacttgagctgcttccagtttttggttattacgaataaagctgccgtaaacatttgcatacaggtcttttaatagaaatgtgtttttattattcttgggtaaatatatagcagtggagctgctgaattgctgggttgtatggtaaatttattcttaactgtatacgagactgtaaaactattttccaaagtgactgtaccattttgcat

SEQ ID NO: 463069 - DNA, 1040 bp, Homo sapiens
tgccgcagccagcagcctgcagccgccgccgggttgtgcctcagactgtcagataaatcggcgggccgggccggcgggtcggtgagcgcggcccgggccggacatggcggcgctctacgcctgcaccaagtgccaccagcgcttccccttcgaggcgctgtctcaggggcagcagctgtgcaaggaatgtcggattgcacaccctgttgtgaagtgcacctactgcaggactgagtaccagcaggagaggctagagtgcaatggcacgatctcggctcactgcaacctccacctcccaggttcaagcgattctcctgcctcatcctcccgagtagctgggattacaggctaaaaccaatacaatatgcaagaaatgtgctcagaacgtgcagttgtatggaacgcccaaaccttgtcagtattgcaacataattgcagcatttattgggaataaatgccagcgctgcacaaattcagaaaagaagtatggaccaccctattcttgtgaacagtgcaagcagcagtgtgcatttgacaggaaagatgatagaaagaaggtagatgggaaattgctgtgctggctgtgcacactttcatacaaacgggtccttcagaagaccaaagagcagaggaaacacctgagtagctcttctcgtgctggccaccaggagaaggagcagtatagtcgcctgagtggtggtggccattataacagcttctccccagacctggctctggactcaccaggcactgaccactttgtcatcattgcccaactgaaggaagaagtggctaccctgaagaagatgttgcatcaaaaggatcaaatgattttagagaaagagaagaagattacagagttgaaggctgattttcagtaccaggaatcgcagatgagagccaaaatgaaccagatggagaaaacccacaaagaagtcacagaacaactgcaggccaaaaaccgagagctcctgaagcaggcagctgctttgtccaagagcaagaagtcagagaagtcaggagctataacctctccatga

SEQ ID NO: 463070 - DNA, 1223 bp, Homo sapiens
tgccgcagccagcagcctgcagccgccgccgggttgtgcctcagactgtcagataaatcggcgggccgggccggcgggtcggtgagcgcggcccgggccggacatggcggcgctctacgcctgcaccaagtgccaccagcgcttccccttcgaggcgctgtctcaggggcagcagctgtgcaaggaatgtcggattgcacaccctgttgtgaagtgcacctactgcaggactgagtaccagcaggagaggctagagtgcaatggcacgatctcggctcactgcaacctccacctcccaggttcaagcgattctcctgcctcatcctcccgagtagctgggattacaggctaaaaccaatacaatatgcaagaaatgtgctcagaacgtgcagttgtatggaacgcccaaaccttgtcagtattgcaacataattgcagcatttattgggaataaatgccagcgctgcacaaattcagaaaagaagtatggaccaccctattcttgtgaacagtgcaagcagcagtgtgcatttgacaggaaagatgatagaaagaaggtagatgggaaattgctgtgctggctgtgcacactttcatacaaacgggtccttcagaagaccaaagagcagaggaaacacctgagtagctcttctcgtgctggccaccaggagaaggagcagtatagtcgcctgagtggtggtggccattataacaggtaacctcaagacacatgagatgggactagaagtgctggtaggtcagatgtaatgctcacataaccatcatggtacatactaccatctcatatacattttctatattctctgtaggtactagtctgtaggaggaagctcatttgtcatattttatagttcatatatcttccaaggaccagagagatttccataaagtgtcaggatttcctgactttgtattgtgtctgaaatgtttgtggaacttcgtttgtagtgttctcacccttagagtggattctctctccagaaaattggacatttcactttctgagagatacagctttttcaatgcatatttagccaggaggctgatagatgtcctaggtttgtcctggtggcacctagtcaaaaagatgtcttttcattgttgttttaagcgtcctttcagagtatctagtattgttaacggttctggctctggatggaatgctggctctgccaggttctctgcggggatcttgggcaagt

SEQ ID NO: 463071 - DNA, 139 bp, Homo sapiens
aggagagccctggatttcattaatttgggtgaccatttagctctctgaaagcaatttttttttattgcacagaaatttcttctggttattctgccttgtttccctcagattacagagttgaaggctgattttcagtacc

SEQ ID NO: 463072 - DNA, 1127 bp, Homo sapiens
tgccgcagccagcagcctgcagccgccgccgggttgtgcctcagactgtcagataaatcggcgggccgggccggcgggtcggtgagcgcggcccgggccggacatggcggcgctctacgcctgcaccaagtgccaccagcgcttccccttcgaggcgctgtctcaggggcagcagctgtgcaaggaatgtcggattgcacaccctgttgtgaagtgcacctactgcaggactgagtaccagcaggagaggctagagtgcaatggcacgatctcggctcactgcaacctccacctcccaggttcaagcgattctcctgcctcatcctcccgagtagctgggattacaggctaaaaccaatacaatatgcaagaaatgtgctcagaacgtgcagttgtatggaacgcccaaaccttgtcagtattgcaacataattgcagcatttattgggaataaatgccagcgctgcacaaattcagaaaagaagtatggaccaccctattcttgtgaacagtgcaagcagcagtgtgcatttgacaggaaagatgatagaaagaaggtagatgggaaattgctgtgctggctgtgcacactttcatacaaacgggtccttcagaagaccaaagagcagaggaaacacctgagtagctcttctcgtgctggccaccaggagaaggagcagtatagtcgcctgagtggtggtggccattataacagccagaaaacactttctacatcttcaattcaaaatgaaatcccaaagaaaaagtccaagtttgagtcaatcacaactaatggagacagcttctccccagacctggctctggactcaccaggcactgaccactttgtcatcattgcccaactgaaggaagaagtggctaccctgaagaagatgttgcatcaaaaggatcaaatgattttagagaaagagaagaagattacagagttgaaggctgattttcagtaccaggaatcgcagatgagagccaaaatgaaccagatggagaaaacccacaaagaagtcacagaacaactgcaggccaaaaaccgagagctcctgaagcaggcagctgctttgtccaagagcaagaagtcagagaagtcaggagctataacctctccatga

SEQ ID NO: 463073 - DNA, 1208 bp, Homo sapiens
tgccgcagccagcagcctgcagccgccgccgggttgtgcctcagactgtcagataaatcggcgggccgggccggcgggtcggtgagcgcggcccgggccggacatggcggcgctctacgcctgcaccaagtgccaccagcgcttccccttcgaggcgctgtctcaggggcagcagctgtgcaaggaatgtcggattgcacaccctgttgtgaagtgcacctactgcaggactgagtaccagcaggagagtaaaaccaatacaatatgcaagaaatgtgctcagaacgtgcagttgtatggaacgcccaaaccttgtcagtattgcaacataattgcagcatttattgggaataaatgccagcgctgcacaaattcagaaaagaagtatggaccaccctattcttgtgaacagtgcaagcagcagtgtgcatttgacaggaaagatgatagaaagaaggtagatgggaaattgctgtgctggctgtgcacactttcatacaaacgggtccttcagaagaccaaagagcagaggaaacacctgagtagctcttctcgtgctggccaccaggagaaggagcagtatagtcgcctgagtggtggtggccattataacagccagaaaacactttctacatcttcaattcaaaatgaaatcccaaagaaaaagtccaagtttgagtcaatcacaactaatggagacagcttctccccagacctggctctggactcaccaggcactgaccactttgtcatcattgcccaactgaaggaagaagtggctaccctgaagaagatgttgcatcaaaaggatcaaatgattttagagaaagagaagaagattacagagttgaaggctgattttcagtaccaggaatcgcagatgagagccaaaatgaaccagatggagaaaacccacaaagaagtcacagaacaactgcagagatgggctctcgctatattgcctgggctagtcttgaactcctggcttcaagcaatcctcccacctcaacctcacaaagtgctaggattacaggcgtgagccaccatgcccagcctgtagatactttgtattgtttcactcttggatgtgttctgatcttttcccctcaaaaacagtagaattattaagtatgttctttgatttttgaataaaccagatgcgcccgaaacactactcttatcattcttctaatactcaaacacaataa

SEQ ID NO: 463074 - DNA, 991 bp, Homo sapiens
  misc_feature (831)..(831): n is a, c, g, or t
taggcctagtacgaggctgggggttgaatcggccgaggctgcaatccatgtaagatgtgacttgttcctccttgccttctgccatgattgtgaggcctccacagccatgcggaactgttgaaatacacactacctgaagctggataactcatgaactctgttgacaattatattctttgtctttttaattaactcatttggagttggtgtcctgaggacctaagcctaagaatcttcaagatggaagagtagagtgaacaatgaatgagccagagggctcttgtcctctgtgtgcagctctgggcagccagcaggtggatatgggacttggcctgctggaggggccctggcaagaggagctggcaggagcagatggcaaaggataaagcgctcccttgttggtgtccccacagtccaggctggtgctgatgccgtcctgccgtcctgcatcagagccactcatgcccgtgtgcgcactctttgtcggggtctgacaccgttgcatcgtatatcacctgtgttgtcatggtcagtgctcaacaaatgcccctactgattcaagtatatgagcaagtcaaataaaaaaataatatggccgggaaaaaaaaaaaaaaaaaaaaaaaaaaaaaaaaaaaaaaaaaaaaaaaaacgaaaaatccggggggggaaacacacctaaaagcgaggagaaaacgacccctcgtggacaccacagccaaggaaaagatgatgccgcgtagggagaagaaaacaccgggcgggtgtgtgatacaagcacaggggacacacccccgagaacgtgggtgggcgcggaacaccacccacggggangggcccacgcgaggtcattggtgggtgtcatgagcaaacacagttttgcctggccagaagagtatccgaaaagagacatctgtcagggagacaagcaacaaaccggtaacgcacgacgtgcgacagggcagcgaaaagggtcaaccccgcacggcgagct

SEQ ID NO: 463075 - DNA, 1566 bp, Homo sapiens
  misc_feature (1406)..(1406): n is a, c, g, or t
cagacaggccaggccagtgtgctggacctttcttgggaagtagaacatgaactcgagtgaactttcctcattactatgccaaagtctccaccctgggaggagctatacctgcattaccatgacatgcaacccatatgctggcatgatgactcatcatgtctgtgcaactgggacccctcctctacctgccatgatgcacccttctccattgccgcataaaaccctcctgtccccttctctccgggagacactgctttggagaacactcccagtatcctccttacttgcaccaagtaataaaactcttattgatcaaaacctgtgttctcgtggagttactcaccagctgaacaaatcctgttttattgagggtaacagaggtcctgaagaggtaggaattggatataaccagaggcatcacagacgatgccacagagtatgtgaatttagggctaagctttagtaagatctggcagcaaaaggcagagggcatttcagggagagaaacacccaaaggcacagggtaagtatggagaatgagggcatgggtgaagggactggcgaaaatcagattaaaaggactggctaaacactttatatacaaaattttatctcatttaatccttacaacagtccagaaaaaggcattgtaatccttgttatacagatgaggagattaaggtttagagaggttgaaatacacactacctgaagctggataactcatgaactctgttgacaattatattctttgtctttttaattaactcatttggagttggtgtcctgaggacctaagcctaagaatcttcaagatggaagagtagagtgaacaatgaatgagccagagggctcttgtcctctgtgtgcagctctgggcagccagcaggtggatatgggacttggcctgctggaggggccctggcaagaggagctggcaggagcagatggcaaaggataaagcgctcccttgttggtgtccccacagtccaggctggtgctgatgccgtcctgccgtcctgcatcagagccactcatgcccgtgtgcgcactctttgtcggggtctgacaccgttgcatcgtatatcacctgtgttgtcatggtcagtgctcaacaaatgcccctactgattcaagtatatgagcaagtcaaataaaaaaataatatggccgggaaaaaaaaaaaaaaaaaaaaaaaaaaaaaaaaaaaaaaaaaaaaaaaaacgaaaaatccggggggggaaacacacctaaaagcgaggagaaaacgacccctcgtggacaccacagccaaggaaaagatgatgccgcgtagggagaagaaaacaccgggcgggtgtgtgatacaagcacaggggacacacccccgagaacgtgggtgggcgcggaacaccacccacggggangggcccacgcgaggtcattggtgggtgtcatgagcaaacacagttttgcctggccagaagagtatccgaaaagagacatctgtcagggagacaagcaacaaaccggtaacgcacgacgtgcgacagggcagcgaaaagggtcaaccccgcacggcgagct

SEQ ID NO: 463076 - DNA, 935 bp, Homo sapiens
ctgctgatatagtttgtgtataagaaaatggctgagatctgtccccagactcagagagcttggattgcaacacccctccggagcagctcattgggcttggccaagtaccctctgagggccagctgtagtgctttagcaaataagcatccagagagatgtctggcctctcatgggctccagcccggatggccaagaggagctaaatttagcatagctattgttcatcggataagcccagagacacacagcctgcatgtggcacagctgaattcccatgtgggcttcttggaccttgtcgtttctgttcttactgtcatgatacagtccgtgacctgccagggctctggttcaacccactatgagctactgggaatcccaggatgtaacattcatctttatatccctatggccttgcactcacaagataacaggtgttcagtgccccaaaaggtgtttcttgctttgtcctgtgactgtggaccacctcttccctgggcaatccagagagctcttccaccatccaacagctgcaaccacactggctccaaaaaagtctgaacccaacttttgaagagggatgcaccttccatgtctgcctctccttgggagagaagatgaaatatttccatcttcactgacaaggacttctggcaatttggatgaatgatgccaagagaagaaagcaaccagcttataaacttcctaaggaagcaaatttcaaaagaaaccccaaacatcacgaatcacaagctgctttgttttcttattcatgaccttcatctaccttccctttcatcaagtaaatggaaatgtgtcattctgattaacggtgattgcttccttgtcatacatcaactaaaatgagatgtttcaccatcagatttaaggggacatgggcatatatttaagaggtatttttttaaaaggcattcttg

SEQ ID NO: 463077 - DNA, 967 bp, Homo sapiens
agcaaacttttgtaaaatgtactcagggatttctttgaagtatcctaaaggactgcctttaaaaagatgcatgtgtgtctctgatcgccctgcctttcaggccccaggcccctccaagctgcatggctgggggttcctggagtgctctacagcccaggatctatgcacagtctttgtacttacgcggaaaaaaagaaaaagaattgagacccactgtcttatgagctggcgaggcaatgagaacaccctggcagggcagctgagctgggtggatccttgttctgtcaccaagcctttaagtcatatgctgacatgttacagtcctgcctgggaccctgcccacaaatacttaagatacacgactttgggaatcacccaactgatggaaagaaccaggaaaggggtcaggatctgcaccttggcaaactttgaagaacacccaatttgatgaatgaaaactcctcacttgtgctctggtggtgttttaggacaatgggcccctcctggatgctccagtgaagccccatatcacctttttccttcctgtttgccatagctccaggtgtagggacagatcagaagattctggaaaaggcagatcaccaaagaactcaagatgtactgatattttgccagtttccttcatcaacaacttgtcttctttaccaactaagggcaaacaaagagaacaaactaaaaaaaaaaaaaaaagaaaagaaaagaattaaataattaaacaaagaacttaaataagaaggtaagaccccccccccaaatctcccaagatagtgagaaatgtatttgcgtcatgtctgcctaacaatgagctattattaggatggtagaaaatagcagcaagtaaggactacagatttcacccagaggcagagcagacaaaagagacaacagtttcctgggaaaggaagatgattccagtttaattcatccaacaaaactcttccaagaa

SEQ ID NO: 463078 - DNA, 1196 bp, Homo sapiens
aggcacagctgcagccatccagccatgactgcaaacccgggcatctctgcactctcagaggcccagcaagcccccctgccccgcaggctcagttttacctggtcctgccacctggcgtctctctgcttccagagcccactccaaattcagatccaagttgaggccaaacctgggcacagtcacaacccggcccggtttgtgcaagctcagggcagtgctgacatgccagccccctgccacatcggccccctccagactttgggcactggcaagaacaggagggaggctgaggtgtggctaagagtggctcagcagcaagaagaagagaagagagaaggagagaagagctgtgtcccttcagggaacacagacctaggagctcctccaaccagggctgtgacaccttctttgggtctcggcaggtcctgcatctccaagcctctgggtgccactgcattccctgatacccacagtggaagctgtttgcagtcggcctggtccagctgcaggctcacagggagctggcacctgtgcctggagctgcccaccccactgcagctggcatgcttggctgtgtgcagtggccagatcccatgctcaattgctcacacacccctcactgctctgtactcagctcgcccttggcaggtgtgggatccagaccactagcatgagctgagtggacagaactaacccagtgggcccgagcaaaacacagaaataaccaaatttccttatcaattgtctttaactataactatttaaagtcatttccacagttaattgcttaatggtgatgcagtttctaaaaacttcacaagcatgcaaaattctagaatagaagattcatgaaagaatgaaaaggaccatgaaaaacactcgggaacccagaggacagccaaccccttcacaatctagaatctaatgactggatcttctgagaacatcagaggactgcccttgccattcacatgacagcaaaactttaaaaccttaaactttgggttcatagtcttacaactcagaagggtccctccacactcggaaccatacaccccttggaactcttaaggatgttccagcataagaagacaccttctactcaagtcctttttccaccttttcaaatctcactgttctatttcccagtgggtttctaaaccaaataagtacacttgcaacggtaatagtgacac

SEQ ID NO: 463079 - DNA, 796 bp, Homo sapiens
tttgtcagactcttacattgacagggtgaagacactacccaggagaaaacagtgagggcagggttcaaggccaactcccacacagtcaggagaaatgtggatgcaattgtgctgtcgattttaaaggtctgcatctcctcatccctatccgattttaaaggtctgcatctcctcatccctatccgaatgcgtttccttctttaagaacgtgattctaaacggaagcgctctacatggtgtgagcctgttaccaagaatacatctcccgagagattcccgttcactatcctcggctcctctccagtgagactttgctcaccatcatgggctgtcgagagagctgccctcaagctaatgggccacttccctggggcgcctcgcccgctgtaagtgaggaccagaacctctcggttcttcacagcagccactggaggcagctcagggctgattttcagagccataaaaagcagccccagttagaggaactccagccccagctgtggatattttcattctgtcctggtggtagggtaggaaccaagcctccaggcccagtcaaaactgaaggagaggccaggacactacgtgaaagaagccagacacaaaaggccacatctgggccacacgagtccattcccacgatatcctggataaacgcaaaaccaggacaacaatcagatccgtggttgccaggggctagaggtcaggggaagggacaaacggcaagagggaactttagccttatgctctattttgataatggtggtggctacatgactgtatagattggccaaaa

SEQ ID NO: 463080 - DNA, 1433 bp, Homo sapiens
tctacccttggtctttgatgatggcgacctacagatggggttttggggtggatgtcttttttgttgatgttgatgctattcctttctgtgtgttagttttccttctaacaatcaggtccctcagcttcaggaatctgcaggagtctgaagaggaggaagtcccccaggagtcctgggatgaaggttattcgactctctcaattcctcctgaaatgttggcctcgtaccagtcttacagcggcacatttcactcattagaggaacagcaagtctgcatggctgttgacataggcggtgagtactccattgtgaaggtgataaagctccagttcatggcccaggccatgcccgtgccaacctggactgactgtcacgacattgaactcaaggcaggacatcggtgggatcaagtgaaaaaggaggaccaagaggcaacaggtcccaggctcagcagggagctgctggatgagaaagggcctgaagtcttgcaggactcactggatagatgttattcaactccttcaggttatcttgaactgactgactcatgccagccctacagaagtgccttttacatattggagcaacagcgtgttggctgggctcttgacatggatgaaattgaaaagtaccaagaagtggaagaagaccaagacccatcatgccccaggctcagcggcatgctgatggaagtggaagagcctgaagtcttgcaggactcactggatagatgttattcgactccgtcaatgtactttgaactacctgactcattccagcactacagaagtgtgttttactcatttgaggaacagcacatcagcttcgcccttgacgtggacaataggtttcttactttgatgggaacaagtctccacctggtcttccagatgggagtcatattcccacagactctgccggtgcagaatatgaacaacgccatgttcttgcagaaaacgcttagcctgagtttcataggagaatcacatttggccgaatgtcccggcaccctggtgctcagtcacagtgacacgtgcaagtaactatcacacttgtcctttgtcacatttgtcatttcccctgtttttctcccaatctgcagcttatatttgttctcttaatactgtctcgtgttgagcaaaaacttttactttttataaagttgaatttatcaatgttttctttaatggtttgtgtttcttgataacaaagaacactttgcctaactgtgtcgtgaagattttgtcttatatttcctgctatactttttctacttttatagtttatatttagttgcataatccattttgagttagtttttgagtcagtattgaggttcaggtgaatctttttcctttggggatatgcatgtccagttgtttctacacaatttgttgacaagagaatgccttctccactgaatcatatttgga

SEQ ID NO: 463081 - DNA, 686 bp, Homo sapiens
cggttttggatgataccagaatatcacacaaaaatttctgtaaacaatgccaaatatttttcagtccactggtcactgagtgcttcccatgaggccatgggtggacagttcatctctgataaactcatgcagataagaaatgtcttctgggaaggcttgactggggctggagaacgtacttccaagatagcttgctcaaatgactggcaagtgcttcttatagttgacttggaactcatccagggttatccactggataccttggatcctctccacatggacctcttcatagggatgcttgggcttcctgaaaacatggcagctagtttccaagaacaaggattccaaaaggcatggatgaaagttgtggagaccaaagctgccaatccaaggaccacactttgagtagcaggccccagaggatgcattttgcaaaaaaaaatgttaaaagtgcccaaagcatctatgaacccccaggacttttgtcaacatggatttcaaaggcaatagccctgtttcaaaaagaagtttttttttcaagccggagcagccttgtggattttgtgcaggggatgaattaaagtaaaaagccccagccatgtttcctggagcaattaaagccccctgtcctcaaatggacttacatttattggcaaaaggtggagttaataaaaccctcccaaaga

SEQ ID NO: 463082 - DNA, 1368 bp, Homo sapiens
agctccaagaaggccccctttgcactatgagcaaccaggtgctctgctgtgtggtcctttgtctcctgggagcaaacaccgtggatggtggaatcactcagtccccaaagtacctgttcagaaaggaaggacagaatgtgaccctgagttgtgaacagaatttgaaccacgatgccatgtactggtcttgcagtacgctggaagaaatatctagaacggcagatgatgtgattttggcaagcgtgtcacatgttgatttctgttttgccggtgaatgcatcaggcctgaggtgggagaagcaccacagccaaggacagcagctcctggagatgcttttacttatcaagagcaatgtagatgtatgcaaaaatacagacacccactcacagttacatttgtggataatcagaaatatctttctgctttcccagcagagcccaaactctcctcctatcatccaggtgggaagacaggtaaaggaaactgttcggtccgactttgttcctttcatgcctgccagggcttctggtttcacggagacctcaggctaggagcaaccctgagcagggagactgagttacagagaatccccaccaagttgcaggcagagggacagccgaggccctcaggaagtacacgagagcagaaccactatggcaagttcactgagaaatctggaaagttagaatcccagcccgagtccatcaaatcgagcatcataaaattaagttttccttactgtgaaatggcaatttgtaatgatttctgagaagtgggacccatggtggtgtcgatgtctgagccaggtgagggtgagatccctggcgccatgggctggcccccaggatgccctggaaaacgcattctgttcacagctgtgtgattcttttctttctgtgttggtgaagcagccagacccggtccgtttggaatgcctgggatggtgccgccgcatgttcctcctcagatgctcaacattccgcagacctctctgcaagcaaagcccgtggccccacaggtgcccagcccagggggcgccccgggccagggtccatacccgtacagcctctctgagccagcacctctcactttggacacgagcgggaagaatctgacggagcagaacagctacagcaacattcctcacgaagggaagcacacgccgctgtatgagcggtccttgcccatcaacccggcccagagcagcagccccaaccacgtggattccgcctacttccctggctcttctacatcgtcatcttccgacaacgacgagggcagcggaggggcgacaaagtgagtggtgcgtgggtcgctgggtgcttcctggcgggtagtgacctggggaagctgccttctgacctgcc

SEQ ID NO: 463083 - DNA, 801 bp, Homo sapiens
agcggagggttcggagctcagaggcccgggccgccggccgcctcccctccgtggctctagggcggaggcggaggcggggaccggggtatctcgctcgcgcagcctggagcccatgctgggctcagcccgaccctgctttggccgctgcccgccgggtctccagcgccgccggaccctcacgccgccaccttctctccagcccagcgccgctgcggccgcagcctcctgccgagcatcttccagatcccaatccctgagaatcagttctgggatgtaacagagcaagcggacattattctgggaccagcaagcctcggtcactgcagccaccacactacgtggcagccagacccggtccgtttggaatgcctgggatggtgccgccgcatgttcctcctcagatgctcaacattccgcagacctctctgcaagcaaagcccgtggccccacaggtgcccagcccagggggcgccccgggccagggtccatacccgtacagcctctctgagccagcacctctcactttggacacgagcgggaagaatctgacggagcagaacagctacagcaacattcctcacgaagggaagcacacgccgctgtatgagcggtccttgcccatcaacccggcccagagcagcagccccaaccacgtggattccgcctacttccctggctcttctacatcgtcatcttccgacaacgacgagggcagcggaggggcgacaaatatacaatctattggggattccgtgccactgaacaccatgtacaacgaaggattcccaggcaacggggacg

SEQ ID NO: 463084 - DNA, 1520 bp, Homo sapiens
gaggcctgtgggggacatcttgatgttgactgggggcacacgttggcagggctacccccatgtggaaaatcttggctggggtggcgggcttttggttttaacaacaagtgactcaattgttgtcccttcttcctgcagcctccccaagtcactgcccacagatggccctgggcagaaagtggtcaaagagagtgaagcccgggggaggaaagctcgggtgcccatggcgcccactggatggctggcctggttgggacccactctggcggggccagctcctggtggttccctgcacatccatccactgtttcccatctacactctgccagaaagtccttcctctcctgaccccgccatccaaaccctatgtgtttcaggaaatcatttttcagatgctacctggggactcctgcagctgctgtgcattttcttggaatctctcatggaaccatgcatgatgactgtttctacatctctgcatgggaaggaactcagggatagagggcaccccgttccatccccatcccagcccctagtgcaggggaagagagccgtggatgttaactattcaccttcagatgccctttcatggggtaggaactgggaagggcagaggtagtaacatctgaacaaagctgggtgaattcccacggaagacggagcatcgagtcgtcaatgccttttggtaaacaagtcgcagctcttccgtcttggctcatcctcatgggcacatcccagtggtgttccctgcccacctctgcacccacattttaagtgcctggaatgtgtgagacggatcctgccctttccttcaccaagccacctagcagaacccatgccatccagggcatctgcgagagaaacacctctcccagcctcccctgagcagcccactagcgctgtggattccagatcctgaaactgcatcttgcactcggtgtcctgagcccagctgaagtggcaggagcaccactgactccagaacagacttgtaaagaaagaaggtatctcccaagtcagccacagaggctcatggtttcctgctccatctagtcctgggtgtttgcttaaatgggcactggctgacatgactgaaacctcatgcatccatcacacattcaccctcaacaaagacacagcccctcctttaaggcctgtgctccctgtacatacacagtgccctgcagcacagagaaaccacatgaatggccttcttggctcaaggagtcagggagtaggggcctgctgagcatgaccatgtccagagagtggggaccccaagaactgtaacagcccattggacagatgtgggcaggaatggggacaaaatcacccacagtctcagaccccaaatgaggtgtgaatatgaaatccatgaaaacctcatgtggaggccaaaagactaactagattcccatctcatctctccaggccagaagcctattatccaatccttcctctcattgcaagccccagaagtaacagcaattacaaaataaagaaaaataagaacttgtcag

SEQ ID NO: 463085 - DNA, 3900 bp, Homo sapiens
ggcaccttgggaggccaaggcaggcggctgggaggtggaggttttcttcctgaggtctgagcaccctccaaactgagtccagatctgagtttttcctcggagatttgtcagaatgagcctccaggccccatccagactgctggagctggcagggcagagcctgctgaggaaccagttcttgaccatcttcaccctggatgagctgcccagggaggtcttccctctgatgttcatggaggccttcagcatgagacgttttgaggccctgaagctgatggtgcaggcctggcccttcctcagcctccctctgggatccctgatgaagacacttcatctggagaccttgcaagctgtcctgaggggacttgatacactggtggcccagaaggttcgccccaggaggtggaaacttcaagtgctggatttgcgggatgttgatgagaatttctggaccatatggtctggagccagggtcctctcctgctccccagaggccatgagtaagaggcagacagtggaggactgtccaaggatgggagagcaccagcccttgaaggtgttcatagacctctgcctaaaggaaagtacactggatgaatgcctgagctacctttttgggtggatccactacagaagaggcctagtgcacctgtgttgtagtaaggtgcagaattactcaatgcccacttcaagtttcagaaatctattggaaaggatatacccagacagtatccaggagttggaagtctggaaaaagtgctctctcaataaaacgggaaagtttgccccttacctgagccagatgagcaatcttcgtgaactctttttagccttcggttatgagcgtgagttgtacgtgagcgtccagtggccgtgcattcctgacttggactctccattcctctgcctgtactacccccagatgctttatataaaaaagatcagtaatatcaaagagcacctggagcacctgctcaggtacctcaagaaccccttgggggcctttatattcagtgatgcttacctaactgatcgggacatggagtgtctgtctcagtacccaagcctcagtcagctaaaggagctgcgtctgattcatatcctaatgtggaccacccatcttgagccccttggagttctgctggagaaagttgctgctactctcaagaccctcgtcttaaaggactgtcggatccaggacccccaactcagggtcctcctgcctgccctgagccactgttcccagctcaccaccttcaactttcatggaaatgagacctccatgaatgctctgaaagacctgctgcgtcacacaggcgggctgagcaagttaggcctggagttgtatcctgcccctctggagagtcttgactacaagggtcatgtcaattgggagatcctcaccccaattcgggctgagctgatgcgtacactcagggaagtcaggcagcccaagaggatcttctttggtcccgacccacaggagagacccaaagtcttcaagcctggagttcctgcttggttcttcctgagatctgagcaccttctagactacatccagatctgttttccctgcagattcatgaagatgagcatctggactccacccagactcctggagcttgcagggcggagcctgctaagggaccaagctttggccatgtccaccctggaggagctgcccacagaacttttccccccactgttcatggaggccttcagcaggagacgctgtgaggccctgaagctgatggtgcagtcctggcccttccgccgcctccctctgaggcctctgataaagatgccttgtctggaggccttccaagctgtgctcgatgggctggatgcactgcttaacctaggggttcgtcccaggaggtggaaacttcaagtgctggatttacaggatgtctgtgagaacttctggatggtttggtctgaagctatggcccatgggtgcttcctcaatgccaagaggaacaaaaaaccagtggaggactgtccaaggatgagaggacggcagcccttgactgtgttcgtagaactttggctcaagaacaggactctggatgaatacctcacctgcctccttctatgggtcaagcagaggaaagatttactacacctgtgctgtaagaagctgaaaattttgggaatgcccttccgcaatatcagaagcatcctgaaaatggtgaacctagactgtatccaggaggtggaagtgaattgcaagtgggtactgcccatcctgacacagtttaccccatacctgggccacatgaggaatcttcagaaactcattctctcccacatggatgtctctcgctacgtttccccagagcagaagaaggagattgttacccagttcaccactcagttcctcaagctgcgctgcctccaaaagctttatatgaactctgtttctttcctcgaaggccacctggaccagctgctcagctgtctgaagacctcgttaaagttcctcacaataactaactgtgtgcttttggaatcagacttgaagcatctatcccagtgcccgagtatcagtcaactaaagaccctggacctgagtggcatcagactgaccaattacagtcttgtgcctctccaaattctcctagaaaaagttgcagccacccttgagtacctggatttagatgactgtggcatcatagactcccaagtcaacgccatcttgcctgccctgagccgctgctttgagctcaacaccttcagcttctgtggaaatcccatctgcatggccaccctggagaacctgctgagccacacaatcatactcaaaaacttatgcgtggagctgtatcctgccccccgggagagttatggtgctgatggtactctctgctggagcagatttgctcaaattagggctgagctgatgaacagagtgagggacttaaggcaccccaagaggatcttgttctgtactgactactgccctgactgtggcaacaggtcattttatgacctggaggcagatcaatactgctgttgaatgcctgcctatttggatgggtatgtcaaacgctttcttctggacacttggaaactaaaacctaggtcttaggtacatcctaaagggagcacagaacccatcatttcacacataggctctgaaagtgggaaaggaaagctgatcaagcaggggccggacttgggggaaatgttgccatggattcgatgggactttggggacctgtgtcctgtagagtcgaaaatgggaatctgaatgtctagagtggaattcaggcttgagaatacatgagggagttactcttgcatggatggttgtaaagaaacaatcagaaataaaggaaaactgagcagaatctgtctggatcagcacccacaccagcacagagcattcatcacaaccaatgagccacagggacacatcattatcacccaatgtccatagttcacatgagggatcattgctggttttgtacattctatggattttaacaaagggataatgacatgtatccaccattagagcatcatggagagtagttttctttccctaaaattcctctgtcctcttcccattcatcccattgtgctcccaaccccttgcatccactgggctttctactgtctccttagaaaaatgcaaaagctttttctggaatgtctaacaggatgagtcttttcagattgccttctttcacttgtacaataacgtgcatttaggaatttttcatgtctttttacagctttataatagttcactgactggatggatcagtttgcttatccagtcactgaccgaagggcaacttgctagcttccaagttttggcgattatgagtaagttgctgtaaacatccaggtgtgggtttactcacttcattaaatatccaggagcatgattac

SEQ ID NO: 463086 - DNA, 2063 bp, Homo sapiens
acgaccccgcggaacgttccgtggggaagcttctctaggccaccagagggcgccaggcgggccgcagcgactccagagtcgcgttatggccgaggtgcgggtgcagctgctcctgtcccggcgtccggagtcggtgagcttcgcacggagtgtgtgtggcctcctgggagccggaccagggctcgggacgtggcccattcactgcagcttgaagcgaggacggcttgtcctctcgagcaggcccttcccaggcgcctccgctaggcttccgctccaggtcggcagaagggggccccagagcgggggcagtgaagggccaaagatggggactgaaatcgggtgggaactggcggcgaggaccccgcccccaacgcgcggtgtagccccatttttggaagtcacgcccacccagtgccgcccttctgaagccttaacccagctggcttccttctgccagcgaccccctttctgcccttttgcggccctggaggagcggcccagggtccctggggctgagctgcccacagatcgaggtgtggacctgggtgtggccgtcattctgcagtccagcgacaagactgtcttgctaacccgaagggcacgcaccctgagcgtttcccccaacctctgggtacccccgggaatcacagcagcagttgcaggtagggctggcagtgagggaaggaaacagggctcaggggagcccaagcaacctggttctgactgtgattaggagctgggcgggggtggcgggggtagtcagagataacgaagaatatgcaatgccctttccccttgctcctgcctttctccatgaaacctgcgggtaggttttgatcacgaacaggcagcccagggagaggcaatgactgaggggtcaccatgtctgaccccaggcccggatccaaccaaacccaaatgaggtgagcgcccttatgtggctgacaccagatgtagctgctgcagtggctgccgcagaggatgggacagagacacccggacttctcccccaggacctaccaccctctgtccttgcagtggaactagaggaggatggaagagcccgacctctggtcctgcacatgtccaccctcctgcggatgatcccaaccatggcagaggacaaagagagagtcagcactggaaccaagtttgccctcaagctctggctgcaacatctgggcagaacacccccaccgtgtaaaagtgcagcttacctggacccagggccagcaaaggaagaatggaacatggaccctcttcccccaaaccaggggtctggaaagtgaagtgtaaaatcccctccctagcccatctccatgacactcacagaacattcacaacctttattatgggtgagagcttcactacaactttagaaataaaaagtaaaattacaacataggtcctaggccttggcgagcctgaaaaagaagattgggaaggagggcacagggtccttccacctccctggaaaggtgcagaatgagccaggcctaactacagggccatgagcctctagaagcttaggggggaataagaaacactgtgaacttagatatataaatagagagagacccaagcaataggccgggcctgactcccagacccctgcagatcatggctaaggccttacatcctcctctgtcatactggagtaggaggcaggggaagtcatctttggagtattttggtttttcttatttatgtacaaaaaagtccacatccacaatccaaaataaagttctctgtccatctctgaaactgcctgtctcagtttttccacctgtctgtttggccgaagggaatggaatagacatgaagagacaatggatgtgaagaagaaatagagccatgggtttgggtaataagaagagagagcatttggggttcaagagaggtgccccttccccaagaggctctagacatagtcaaggctgagggttcagcccttctcctagctcacataccatcccatttgcctcccactgcctaggttaacatacccaaaggaatgtgccaccatctaaagaacatttccagaaacagaccccagtgtcctt

SEQ ID NO: 463087 - DNA, 1864 bp, Homo sapiens
acgaccccgcggaacgttccgtggggaagcttctctaggccaccagagggcgccaggcgggccgcagcgactccagagtcgcgttatggccgaggtgcgggtgcagctgctcctgtcccggcgtccggagtcggtgagcttcgcacggagtgtgtgtggcctcctgggagccggaccagggctcgggacgtggcccattcactgcagcttgaagcgaggacggcttgtcctctcgagcaggcccttcccaggcgcctccgctaggcttccgctccaggtcggcagaagggggccccagagcgggggcagtgaagggccaaagatggggactgaaatcgggtgggaactggcggcgaggaccccgcccccaacgcgcggtgtagccccatttttggaagtcacgcccacccagtgccgcccttctgaagccttaacccagctggcttccttctgccagcgaccccctttctgcccttttgcggccctggaggagcggcccagggtccctggggctgagctgcccacagatcgaggtgtggacctgggtgtggccgtcattctgcagtccagcgacaagactgtcttgctaacccgaagggcacgcaccctgagcgtttcccccaacctctgggtacccccgggtgggcacgtggaacttgaggaggaggtaaccagtcagctgatccaacctgagccaagagacccatgcctgggaccatcttgggtgtgggctgagggagaggcaagcaaaaggacttggaagagtcaggcactggcccctctgatgtgtcttctctgactcccagctgctggacggagggcttcgagaactttgggaggagagtggactacacctgccccagggccagttctcttgggtccctctgggtttatgggagtctgcctaccctcctaggctgagctggggtttacccaaataccatcacattgttctgtatctactcgtgatctcccaggaatcacagcagcagttgcaggcccggatccaaccaaacccaaatgaggtgagcgcccttatgtggctgacaccagatgtagctgctgcagtggctgccgcagaggatgggacagagacacccggacttctcccccaggacctaccaccctctgtccttgcagtggaactagaggaggatggaagagcccgacctctggtcctgcacatgtccaccctcctgcggatgatcccaaccatggcagaggacaaagagagagtcagcactggaaccaagtttgccctcaagctctggctgcaacatctgggcagaacacccccaccgtgtaaaagtgcagcttacctggacccagggccagcaaaggaagaatggaacatggaccctcttcccccaaaccaggggtctggaaagtgaagtgtaaaatcccctccctagcccatctccatgacactcacagaacattcacaacctttattatgggtgagagcttcactacaactttagaaataaaaagtaaaattacaacataggtcctaggccttggcgagcctgaaaaagaagattgggaaggagggcacagggtccttccacctccctggaaaggtgcagaatgagccaggcctaactacagggccatgagcctctagaagcttaggggggaataagaaacactgtgaacttagatatataaatagagagagacccaagcaataggccgggcctgactcccagacccctgcagatcatggctaaggccttacatcctcctctgtcatactggagtaggaggcaggggaagtcatctttggagtattttggtttttcttatttatgtacaaaaaagtccacatccacaatccaaaataaagttctctgtccatctctga

SEQ ID NO: 463088 - DNA, 1693 bp, Homo sapiens
acgaccccgcggaacgttccgtggggaagcttctctaggccaccagagggcgccaggcgggccgcagcgactccagagtcgcgttatggccgaggtgcgggtgcagctgctcctgtcccggcgtccggagtcggtgagcttcgcacggagtgtgtgtggcctcctgggagccggaccagggctcgggacgtggcccattcactgcagcttgaagcgaggacggcttgtcctctcgagcaggcccttcccaggcgcctccgctaggcttccgctccaggtcggcagaagggggccccagagcgggggcagtgaagggccaaagatggggactgaaatcgggtgggaactggcggcgaggaccccgcccccaacgcgcggtgtagccccatttttggaagtcacgcccacccagtgccgcccttctgaagccttaacccagctggcttccttctgccagcgaccccctttctgcccttttgcggccctggaggagcggcccagggtccctggggctgagctgcccacagatcgaggtgtggacctgggtgtggccgtcattctgcagtccagcgacaagactgtcttgctaacccgaagggcacgcaccctgagcgtttcccccaacctctgggtacccccgggacggagggcttcgagaactttgggaggagagtggactacacctgccccagggccagttctcttgggtccctctgggtttatgggagtctgcctaccctcctaggctgagctggggtttacccaaataccatcacattgttctgtatctactcgtgatctcccaggaatcacagcagcagttgcaggcccggatccaaccaaacccaaatgaggtgagcgcccttatgtggctgacaccagatgtagctgctgcagtggctgccgcagaggatgggacagagacacccggacttctcccccaggacctaccaccctctgtccttgcagtggaactagaggaggatggaagagcccgacctctggtcctgcacatgtccaccctcctgcggatgatcccaaccatggcagaggacaaagagagagtcagcactggaaccaagtttgccctcaagctctggctgcaacatctgggcagaacacccccaccgtgtaaaagtgcagcttacctggacccagggccagcaaaggaagaatggaacatggaccctcttcccccaaaccaggggtctggaaagtgaagtgtaaaatcccctccctagcccatctccatgacactcacagaacattcacaacctttattatgggtgagagcttcactacaactttagaaataaaaagtaaaattacaacataggtcctaggccttggcgagcctgaaaaagaagattgggaaggagggcacagggtccttccacctccctggaaaggtgcagaatgagccaggcctaactacagggccatgagcctctagaagcttaggggggaataagaaacactgtgaacttagatatataaatagagagagacccaagcaataggccgggcctgactcccagacccctgcagatcatggctaaggccttacatcctcctctgtcatactggagtaggaggcaggggaagtcatctttggagtattttggtttttcttatttatgtacaaaaaagtccacatccacaatccaaaataaagttctctgtccatctctga

SEQ ID NO: 463089 - DNA, 1500 bp, Homo sapiens
acgaccccgcggaacgttccgtggggaagcttctctaggccaccagagggcgccaggcgggccgcagcgactccagagtcgcgttatggccgaggtgcgggtgcagctgctcctgtcccggcgtccggagtcggtgagcttcgcacggagtgtgtgtggcctcctgggagccggaccagggctcgggacgtggcccattcactgcagcttgaagcgaggacggcttgtcctctcgagcaggcccttcccaggcgcctccgctaggcttccgctccaggtgggcacgtggaacttgaggaggaggtaaccagtcagctgatccaacctgagccaagagacccatgcctgggaccatcttgggtgtgggctgagggagaggcaagcaaaaggacttggaagagtcaggcactggcccctctgatgtgtcttctctgactcccagctgctggacggagggcttcgagaactttgggaggagagtggactacacctgccccagggccagttctcttgggtccctctgggtttatgggagtctgcctaccctcctaggctgagctggggtttacccaaataccatcacattgttctgtatctactcgtgatctcccaggaatcacagcagcagttgcaggcccggatccaaccaaacccaaatgaggtgagcgcccttatgtggctgacaccagatgtagctgctgcagtggctgccgcagaggatgggacagagacacccggacttctcccccaggacctaccaccctctgtccttgcagtggaactagaggaggatggaagagcccgacctctggtcctgcacatgtccaccctcctgcggatgatcccaaccatggcagaggacaaagagagagtcagcactggaaccaagtttgccctcaagctctggctgcaacatctgggcagaacacccccaccgtgtaaaagtgcagcttacctggacccagggccagcaaaggaagaatggaacatggaccctcttcccccaaaccaggggtctggaaagtgaagtgtaaaatcccctccctagcccatctccatgacactcacagaacattcacaacctttattatgggtgagagcttcactacaactttagaaataaaaagtaaaattacaacataggtcctaggccttggcgagcctgaaaaagaagattgggaaggagggcacagggtccttccacctccctggaaaggtgcagaatgagccaggcctaactacagggccatgagcctctagaagcttaggggggaataagaaacactgtgaacttagatatataaatagagagagacccaagcaataggccgggcctgactcccagacccctgcagatcatggctaaggccttacatcctcctctgtcatactggagtaggaggcaggggaagtcatctttggagtattttggtttttcttatttatgtacaaaaaagtccacatccacaatccaaaataaagttctctgtccatctctga

SEQ ID NO: 463090 - DNA, 360 bp, Homo sapiens
tgccctttccccttgctcctgcctttctccatgaaacctgcgggtaggttttgatcacgaacaggcagcccagggagaggcaatgactgaggggtcaccatgtctgaccccaggcccggatccaaccaaacccaaatgaggtgagcgcccttatgtggctgacaccagatgtagctgctgcagtggctgccgcagaggatgggacagagacacccggacttctcccccaggacctaccaccctctgtcctgtcctgtaagtaagagcttctccctcagcctctaatacaccaacatattcatgttgagaagttcagcgtctatcctgtcctcaggatggaattttgtgttgtgggggaga

SEQ ID NO: 463091 - DNA, 1762 bp, Homo sapiens
acgaccccgcggaacgttccgtggggaagcttctctaggccaccagagggcgccaggcgggccgcagcgactccagagtcgcgttatggccgaggtgcgggtgcagctgctcctgtcccggcgtccggagtcggtgagcttcgcacggagtgtgtgtggcctcctgggagccggaccagggctcgggacgtggcccattcactgcagcttgaagcgaggacggcttgtcctctcgagcaggcccttcccaggcgcctccgctaggcttccgctccaggtcggcagaagggggccccagagcgggggcagtgaagggccaaagatggggactgaaatcgggtgggaactggcggcgaggaccccgcccccaacgcgcggtgtagccccatttttggaagtcacgcccacccagtgccgcccttctgaagccttaacccagctggcttccttctgccagcgaccccctttctgcccttttgcggccctggaggagcggcccagggtccctggggctgagctgcccacagatcgaggtgtggacctgggtgtggccgtcattctgcagtccagcgacaagactgtcttgctaacccgaagggcacgcaccctgagcgtttcccccaacctctgggtacccccgggaatcacagcagcagttgcaggtagggctggcagtgagggaaggaaacagggctcaggggagcccaagcaacctggttctgactgtgattaggagctgggcgggggtggcgggggtagtcagagataacgaagaatatgcaatgccctttccccttgctcctgcctttctccatgaaacctgcgggtaggttttgatcacgaacaggcagcccagggagaggcaatgactgaggggtcaccatgtctgaccccaggcccggatccaaccaaacccaaatgaggtgagcgcccttatgtggctgacaccagatgtagctgctgcagtggctgccgcagaggatgggacagagacacccggacttctcccccaggacctaccaccctctgtccttgcagtggaactagaggaggatggaagagcccgacctctggtcctgcacatgtccaccctcctgcggatgatcccaaccatggcagaggacaaagagagagtcagcactggaaccaagtttgccctcaagctctggctgcaacatctgggcagaacacccccaccgtgtaaaagtgcagcttacctggacccagggccagcaaaggaagaatggaacatggaccctcttcccccaaaccaggggtctggaaagtgaagtgtaaaatcccctccctagcccatctccatgacactcacagaacattcacaacctttattatgggtgagagcttcactacaactttagaaataaaaagtaaaattacaacataggtcctaggccttggcgagcctgaaaaagaagattgggaaggagggcacagggtccttccacctccctggaaaggtgcagaatgagccaggcctaactacagggccatgagcctctagaagcttaggggggaataagaaacactgtgaacttagatatataaatagagagagacccaagcaataggccgggcctgactcccagacccctgcagatcatggctaaggccttacatcctcctctgtcatactggagtaggaggcaggggaagtcatctttggagtattttggtttttcttatttatgtacaaaaaagtccacatccacaatccaaaataaagttctctgtccatctctga

SEQ ID NO: 463092 - DNA, 1684 bp, Homo sapiens
acgaccccgcggaacgttccgtggggaagcttctctaggccaccagagggcgccaggcgggccgcagcgactccagagtcgcgttatggccgaggtgcgggtgcagctgctcctgtcccggcgtccggagtcggtgagcttcgcacggagtgtgtgtggcctcctgggagccggaccagggctcgggacgtggcccattcactgcagcttgaagcgaggacggcttgtcctctcgagcaggcccttcccaggcgcctccgctaggcttccgctccagcgaccccctttctgcccttttgcggccctggaggagcggcccagggtccctggggctgagctgcccacagatcgaggtgtggacctgggtgtggccgtcattctgcagtccagcgacaagactgtcttgctaacccgaagggcacgcaccctgagcgtttcccccaacctctgggtacccccgggtgggcacgtggaacttgaggaggaggtaaccagtcagctgatccaacctgagccaagagacccatgcctgggaccatcttgggtgtgggctgagggagaggcaagcaaaaggacttggaagagtcaggcactggcccctctgatgtgtcttctctgactcccagctgctggacggagggcttcgagaactttgggaggagagtggactacacctgccccagggccagttctcttgggtccctctgggtttatgggagtctgcctaccctcctaggctgagctggggtttacccaaataccatcacattgttctgtatctactcgtgatctcccaggaatcacagcagcagttgcaggcccggatccaaccaaacccaaatgaggtgagcgcccttatgtggctgacaccagatgtagctgctgcagtggctgccgcagaggatgggacagagacacccggacttctcccccaggacctaccaccctctgtccttgcagtggaactagaggaggatggaagagcccgacctctggtcctgcacatgtccaccctcctgcggatgatcccaaccatggcagaggacaaagagagagtcagcactggaaccaagtttgccctcaagctctggctgcaacatctgggcagaacacccccaccgtgtaaaagtgcagcttacctggacccagggccagcaaaggaagaatggaacatggaccctcttcccccaaaccaggggtctggaaagtgaagtgtaaaatcccctccctagcccatctccatgacactcacagaacattcacaacctttattatgggtgagagcttcactacaactttagaaataaaaagtaaaattacaacataggtcctaggccttggcgagcctgaaaaagaagattgggaaggagggcacagggtccttccacctccctggaaaggtgcagaatgagccaggcctaactacagggccatgagcctctagaagcttaggggggaataagaaacactgtgaacttagatatataaatagagagagacccaagcaataggccgggcctgactcccagacccctgcagatcatggctaaggccttacatcctcctctgtcatactggagtaggaggcaggggaagtcatctttggagtattttggtttttcttatttatgtacaaaaaagtccacatccacaatccaaaataaagttctctgtccatctctga

SEQ ID NO: 463093 - DNA, 1539 bp, Homo sapiens
acgaccccgcggaacgttccgtggggaagcttctctaggccaccagagggcgccaggcgggccgcagcgactccagagtcgcgttatggccgaggtgcgggtgcagctgctcctgtcccggcgtccggagtcggtgagcttcgcacggagtgtgtgtggcctcctgggagccggaccagggctcgggacgtggcccattcactgcagcttgaagcgaggacggcttgtcctctcgagcaggcccttcccaggcgcctccgctaggcttccgctccagcgaccccctttctgcccttttgcggccctggaggagcggcccagggtccctggggctgagctgcccacagatcgaggtgtggacctgggtgtggccgtcattctgcagtccagcgacaagactgtcttgctaacccgaagggcacgcaccctgagcgtttcccccaacctctgggtacccccgggtgggcacgtggaacttgaggaggaggacggagggcttcgagaactttgggaggagagtggactacacctgccccagggccagttctcttgggtccctctgggtttatgggagtctgcctaccctcctaggctgagctggggtttacccaaataccatcacattgttctgtatctactcgtgatctcccaggaatcacagcagcagttgcaggcccggatccaaccaaacccaaatgaggtgagcgcccttatgtggctgacaccagatgtagctgctgcagtggctgccgcagaggatgggacagagacacccggacttctcccccaggacctaccaccctctgtccttgcagtggaactagaggaggatggaagagcccgacctctggtcctgcacatgtccaccctcctgcggatgatcccaaccatggcagaggacaaagagagagtcagcactggaaccaagtttgccctcaagctctggctgcaacatctgggcagaacacccccaccgtgtaaaagtgcagcttacctggacccagggccagcaaaggaagaatggaacatggaccctcttcccccaaaccaggggtctggaaagtgaagtgtaaaatcccctccctagcccatctccatgacactcacagaacattcacaacctttattatgggtgagagcttcactacaactttagaaataaaaagtaaaattacaacataggtcctaggccttggcgagcctgaaaaagaagattgggaaggagggcacagggtccttccacctccctggaaaggtgcagaatgagccaggcctaactacagggccatgagcctctagaagcttaggggggaataagaaacactgtgaacttagatatataaatagagagagacccaagcaataggccgggcctgactcccagacccctgcagatcatggctaaggccttacatcctcctctgtcatactggagtaggaggcaggggaagtcatctttggagtattttggtttttcttatttatgtacaaaaaagtccacatccacaatccaaaataaagttctctgtccatctctga

SEQ ID NO: 463094 - DNA, 1718 bp, Homo sapiens
acgaccccgcggaacgttccgtggggaagcttctctaggccaccagagggcgccaggcgggccgcagcgactccagagtcgcgttatggccgaggtgcgggtgcagctgctcctgtcccggcgtccggagtcggtgagcttcgcacggagtgtgtgtggcctcctgggagccggaccagggctcgggacgtggcccattcactgcagcttgaagcgaggacggcttgtcctctcgagcaggcccttcccaggcgcctccgctaggcttccgctccaggtcggcagaagggggccccagagcgggggcagtgaagggccaaagatggggactgaaatcgggtgggaactggcggcgaggaccccgcccccaacgcgcggtgtagccccatttttggaagtcacgcccacccagtgccgcccttctgaagccttaacccagctggcttccttctgccagcgaccccctttctgcccttttgcggccctggaggagcggcccagggtccctggggctgagctgcccacagatcgaggtgtggacctgggtgtggccgtcattctgcagtccagcgacaagactgtcttgctaacccgaagggcacgcaccctgagcgtttcccccaacctctgggtacccccgggaatcacagcagcagttgcaggtagggctggcagtgagggaaggaaacagggctcaggggagcccaagcaacctggttctgactgtgattaggagctgggcgggggtggcgggggtagtcagagataacgaagaatatgcaatgccctttccccttgctcctgcctttctccatgaaacctgcgggtaggttttgatcacgaacaggcagcccagggagaggcaatgactgaggggtcaccatgtctgaccccaggcccggatccaaccaaacccaaatgaggtgagcgcccttatgtggctgacaccagatgtagctgctgcagtggctgccgcagaggatgggacagagacacccggacttctcccccaggacctaccaccctctgtccttgcagtggaactagaggaggatggaagagcccgacctctggtcctgcacatgtccaccctcctgcggatgatcccaaccatggcagaggacaaagagagagtcagcactggaaccaagtttgccctcaagctctggctgcaacatctgggcagaacacccccaccgtgtaaaagtgcagcttacctggacccagggccagcaaaggaagaatggaacatggaccctcttccccctgcagatcatggctaaggccttacatcctcctctgtcatactggagtaggaggcaggggaagtcatctttggagtattttggtttttcttatttatgtacaaaaaagtccacatccacaatccaaaataaagttctctgtccatctctgaaactgcctgtctcagtttttccacctgtctgtttggccgaagggaatggaatagacatgaagagacaatggatgtgaagaagaaatagagccatgggtttgggtaataagaagagagagcatttggggttcaagagaggtgccccttccccaagaggctctagacatagtcaaggctgagggttcagcccttctcctagctcacataccatcccatttgcctcccactgcctaggttaacatacccaaaggaatgtgccaccatctaaagaacatttccagaaacagaccccagtgtcctt

SEQ ID NO: 463095 - DNA, 4300 bp, Homo sapiens
ctccccttggctgagtgctgtgctccaatggaggcaaccatggctttgatcatggcatccccttctgggtccccaagccctgctctgtaccccacagctggcagaagtggacttcctctccatgctaacaggaataccaccaaagccaaagaggctcttctgaagcctcccttccccgcagcatctaggcaacatctgccccagtgggcccccagtttattgcccttgcttgtagctgggaaggtgatggtgtcacaggaggaaaaaggaaacagaagcctggtgggcaccttaggaggagccctcagatggcggctgtatcctggacaaatccaacaagatctgggattttcagcctacacagcccagcggtacctgcctcctggaatctctgggcctcatacagatatattcatgttggaagctgaccctgagaaacagatctccatctccataaaaatctacggtaaaagtagaagaccgagctgaaagtagacaccagattagtaagagttttgttgacccaaccaagagccttgggcctcatcttaaattcaatagtaaaattaagcttttgttttataaaattcacttcggcaatgctgtgggggttgaattagtgggtcctcttctaaccctaatctaggcaagccgggctttgacatttatctcttcttccagcctctcgtggaggcccagcagcctaagaagcctgttctgtgtttcgtctcagtagtagttccttccagccagcgaaggaagtcacttagccaccaaaccctaagtgaaaggttcatttgaggtttaattgaatatggcattatttatccttgtgaataaaccccatatgaggtttctccatcttcaactcatgatcttctattcaataaacacttgttaaactgaaatgaactgaaggcctcaggtctccccagtggcccaagggccaaagccatatttccaataaccacccaagagggttgactctaactaaactcttctcagacttaaacccatattcttttagcacaaatctgttcccctgtttcctcagctctcattaaaagtaatactaacaccccaaaacctggtgaaacattgtcccaaagagttaaacaaacgagtgactaatacaaattcttgagtttacatgatagtagattttaaaaaaagaacaacttgctgaaatgctgaaactctctccatttgtaagataacaaaattggctgaagtcattggagccaatctggcagactggagtctgcacagaaaaagcgtgctgatgtcacagccaaatttccactgcatgtttcatactgaccctccccgaaactgcacatgtgacccatgaggtagcatgaagagataacttcccatgcccgaggactttttccagccctcccttttccttccaccagtcacctactaataccagaatctaatccctaacctttcccaataaaatgactgccttaaagccagcacagggagacagattcaagctaaactcttgtctctttgatggtctagttgcagtaaaaagcttttcttttctcaaaaacctggtgtcatcatctgggcagaggaaccaaagggaaaagccaccttcccaggcacagccataacatccacctcactcaactgcttgtcaagttcaccaccaacacagagggggctcagataatcaagaaacaatgtcgagtgatgataaaagtaaatcaaatgaccccaagactgagcccaagaactgcgatcccaagtgtgaacaaaagtgtgagtccaaatgccagcccagctgtttaaagaagctgctgcaacgctgtttcgaaaagtgcccatgggaaaagtgtccagcaccacccaagtgcctgccctgcccctcgcagtctccttcatcctgccctccccagccctgcaccaagccctgtcctcctaaatgcccttcatcctgcccacatgcttgcccacctccctgccctcccccagagtgaggcactgtgggcactacccaaccccaccaccactgccacctccaccatgtacaacgctgtggggctggagactgaaaccatgaactgacaagtaaacgtgttcctctgctgtgcaagacttctcctggtgtttctggtgggttttgatttgttttgtttgttgttttacagcactaaaccaccaacaagcaatccctgagaagtgaggctagaaccctgcactctcaacaacctttgagaactgactttccctctgaccccacctgctgcttagaggcaggtgcccacttctgaagggtgtacccaggtaatgccaggctgtgttagagcaaagcctgagagatccataaatatggttgcagctgtgaaagcgtctaacgccaggaagcaggaaagagatggtatgagggagaaagaggagtagaatattggtgaaaggtccaggaaggctcaggaaaaggcattgtactacttttctgttagtcctgttgcataatgcttatgcagaagggctctcagtacaggctgcatgggtttaatgcaactctatctctgctccctaacaccttgtaaccttaggcaagttgcttaacttctttgtgtctcagttttcctctctttgcaaaaggaatgatgatgctaacagtactgctgttatgaagttgttgtgtgacatgaggagaccttgaggtctcagggtcttctgaggcactgaggttcccatactctagatccctgcagagaggcactcactggatgccaggagcctctgaaagtctagtttagagcattggggactgtggtaacaggtggaaaccccttcagctgtgggcaacaggtggaaaacccttctacctcacaggaagtcaaaaaggaggaaggacagaagaaagggagagagagagagagataatagaacaataacatggcgtcttcatccatggtcaacagaccatcctctattaaatggtcacttttaaataataaatcctgaacccagtgctaaagagtgtactacagttggtgggaatataaatagacaaaaatccttttagaaaacaattcaaggaatgtgggaatatgtatcatcagaagcattagatgcttcaactctttggcccaatgggtccacttcatagaacctattcaaaaaaaaaattgcaaaatggtgggtaggggagctatataaataaaggtgattatcacagcataacttagaaacaatttaaatatctaacaaggtttgattaagtaaacttgaacctattatatgatgaaacattgttttaagacattaaatttaataatacattaataaattcattacattaaatttaataattttaaaacattaaaataaattttaatttatttaattttaatgtattaacctattcaatgtattaaattaatttaatacattaaaatgaattaaagaaagtaaggcctcaattgaaaatataacgtaaagccattatctttaaccaaaaccttccttgataataatggtaataataataacaaaaggaaatgtgtagatattctcattattttaagacaatggggatataggtaactagtagtttatttctattttaatctggattttcacatgtttttgtttcatgatgggttaaaaaagaagtaatcatgaaataatcaacaatttatgaaataatcatgactacttcagagacccccaaagtcctttattttactcaatgtacaaacacagggaaggaagaatgtcttaggaagaccaagattgcagctcagcacacgagcacaggcaaattctagaaggctttattagtgataagtcataactgcttccatgtcacagcggttgatgctcagcaaagagatcagtaaaaacactcagccgtttgccaaacacataaagattttaaaatacaaactgatggtaaaatgcataccaggatattttcagctgtacctgtcttccaagtgcaggaaatctcatatgtctcatctccagagctatatgctccctcccaggctcaaaggaaactcttctcagactaaggagtcatggctttttcccagaaatgtgctcatcatctctcacctacaccattcaaccctcctaactggctttcgaagttcaccttcctccagttcttactccagtggaagccagccaaggcagtcttgctaaaattcaaatttatacatgatgtccttgcttaaaatccttgagtctcccctttgcctagagggcagctcaaataacattctgtcatgcaaaagccttcagaatcaagcccctgactccttctctagccata

SEQ ID NO: 463096 - DNA, 1577 bp, Homo sapiens
tttcaaagaaaaggttaggaagatgatgagcttcagaaaaatatggtctttgttcattgttaacaatagtaatgaggaaggcagaaatcagtggaagcacagacatgcatggaggaatggaactgagttcaatgacgatctgttcaggaaagagggcataaactgggcagagaatgcagtggaagtggtggggagtaatactgggcacgtaagatgtccagaaggcttcttgggggaatattgtcaacatcgagacccctgtgagaagaaccgctgccagaatggtgggacttgtgtggcccaggccatgctggggaaagccacgtgccgatgtgcctcagggtttacaggagaggactgccagtactcgacatctcatccatgctttgtgtctcgaccttgcctgaatggcggcacatgccatatgctcagccgggatacctatgagtgcacctgtcaagtcgggtttacagcctgtttacttaaaggtaggaacccaaagtgtcctggtggcaatcttaactaccagtttaatggaattgttgttgtgtcttctgatggcagcgttcctccctctggaactaagacctctaggccagcagaacttaatgttgcgggaacaggaagcaaacattttgctagtggatcactaggggtgatggtaaggagtgccaatggaccgatgcctgcctgtctcatccctgtgcaaatggaagtacctgtaccactgtggccaaccagttctcctgcaaatgcctcacaggcttcacagggcagaagtgtgagactgatgtcaatgagtgtgacattccaggacactgccagcatggtggcacctgctcaacctgcctggttcctaccagtgccagtgccttcagggcttcacaggccagtactgtgacagcctgtatgtgccctgtgcaccctcgccttgtgtcaatggaggcacctgtcggcagactggtgacttcacttttgagtgcaactgccttccagaaacagtgagaagaggaacagagctctgggaaagagacagggaagtctggaatggaaaagaacacgatgagaattagacactggaaaatatcaacatggccaatctttcctaagctgctcagcttacaagaaaaggaatcatactgctaagaattcaaacttcagcagtcatagggagccttgggaggaccccgaatcactgatggaattgcgcagtgcatggagatggctcagcaggatgagggtaaatgcaggggcaagtccaggccatactgagagacaatgagtggcgctgatgaggacaaagataaaatcaaaagtttgtgcttcatcttcaaaaactcaagctgataacaaacttggcctgatgagaaataataagtatttttctatttacatgagaatttaatctcaaaacagaaatcagaaaaatatgaagtccagggcataaaacctaaaactattgctcatatttattctttctaaatagagcaaagtgtaaaatcttctccataagacatacattgtggttataaaaaggcaaaagtcttagtgagaatcattggtattccatagaagag

SEQ ID NO: 463097 - DNA, 880 bp, Homo sapiens
agagatttccccttatgtagctattctcagtgcactctggtcaaattttacttggcaataaatccttgcaaacgtcagtcatgtaagtgactaacaagactgaaataccacattgagtcacataccaaatacagtttcagaaaatgtaaacctttcccctgaaactctccaatcatgaatagtttatgctgtacagcataaactattcctgtatgtgccctgtgcaccctcgccttgtgtcaatggaggcacctgtcggcagactggtgacttcacttttgagtgcaactgccttccagaaacagtgagaagaggaacagagctctgggaaagagacagggaagtctggaatggaaaagaacacgatgagaattagacactggaaaatatcaacatggccaatctttcctaagctgctcagcttacaagaaaaggaatcatactgctaagaattcaaacttcagcagtcatagggagccttgggaggaccccgaatcactgatggaattgcgcagtgcatggagatggctcagcaggatgagggtaaatgcaggggcaagtccaggccatactgagagacaatgagtggcgctgatgaggacaaagataaaatcaaaagtttgtgcttcatcttcaaaaactcaagctgataacaaacttggcctgatgagaaataataagtatttttctatttacatgagaatttaatctcaaaacagaaatcagaaaaatatgaagtccagggcataaaacctaaaactattgctcatatttattctttctaaatagagcaaagtgtaaaatcttctccataagacatacattgtggttataaaaaggcaaaagtcttagtgagaatcattggtattccatagaagag

SEQ ID NO: 463098 - DNA, 1324 bp, Homo sapiens
gtggccccctctcccctctttctcccacctctgctctctcctcctctccctcctcccgtctcttctcccactcgcccgccccccccggtcgtcgtttctctccccttcctctgtctgctcctctgctcgtcctcgttggtgctgtgggtgctttgctgtcctgtcgctcttggctcttccgtcgtctccccccctcgctttttttttttttttttttttttttttttcttttttttttttttttttttttttttttttttttctctttttttttttttttctttttgttttcttttggcttctattcctttttaatggactttggcgccttggcccactttccttctttgacagcactggtcctactccagagcattcctctagctagcaaagcagtgtgtggatgtgtgggtgtaggtggcgatacagacctcactggatgaggaccgcctctccctgcaagttcacgatcccggcaaactccagtgcttgaagttcagagtcctaccccacccccctcacccccacgccccttctgcactggtcaagccagcgagccgctgcagccctgatcgagttaaggcgcggcggcccccggggccgctggagaaggatgcggacggggccagtgactcgtagtagatcccctccgcgcggagctcgggccggcgcttcttcctgcgggaaacccctgggtgcccaaggcggcggggccgaggccgcggcgacagtggggcggggcttgcggtgggaggaggcggctgaggcggaaggacacacgaggctgcttcgctgcacacccgagaaagtttcagccaaacttcgggcggcggctgaggcggcggccgaggagcggcggactcggggcgcggggagtcgaggcatttgcgctgggcttcggagcgtagcgccagggcctgagcctttgaagcaggaggaggggaggagagagtggggctcctctatcgggaccccctccccatgtggatctgcccaggcggcggcggcggcggcggcggaggaggcgaccgagaagatacccgccctgcgccccgctctgctgtgggcgctgctggcgctctggctgtgctgcgcgacccccgcgcatggtgagtatcgggctgaggggcgctgtccgcggcgcccggggctgccacctggggcgacccttctccccctcggtccttctctgtgtgggaaggccaggctcggccgccggcgcggagcgaggccactcgctgggttcccgagagtttggacatcgccgggggcccctcccgtggtgccccgccaaccgccggggttccccgccaaccgccggggt

SEQ ID NO: 463099 - DNA, 1913 bp, Homo sapiens
gtggccccctctcccctctttctcccacctctgctctctcctcctctccctcctcccgtctcttctcccactcgcccgccccccccggtcgtcgtttctctccccttcctctgtctgctcctctgctcgtcctcgttggtgctgtgggtgctttgctgtcctgtcgctcttggctcttccgtcgtctccccccctcgctttttttttttttttttttttttttttttcttttttttttttttttttttttttttttttttttctctttttttttttttttctttttgttttcttttggcttctattcctttttaatggactttggcgccttggcccactttccttctttgacagcactggtcctactccagagcattcctctagctagcaaagcagtgtgtggatgtgtgggtgtaggtggcgatacagacctcactggatgaggaccgcctctccctgcaagttcacgatcccggcaaactccagtgcttgaagttcagagtcctaccccacccccctcacccccacgccccttctgcactggtcaagccagcgagccgctgcagccctgatcgagttaaggcgcggcggcccccggggccgctggagaaggatgcggacggggccagtgactcgtagtagatcccctccgcgcggagctcgggccggcgcttcttcctgcgggaaacccctgggtgcccaaggcggcggggccgaggccgcggcgacagtggggcggggcttgcggtgggaggaggcggctgaggcggaaggacacacgaggctgcttcgctgcacacccgagaaagtttcagccaaacttcgggcggcggctgaggcggcggccgaggagcggcggactcggggcgcggggagtcgaggcatttgcgctgggcttcggagcgtagcgccagggcctgagcctttgaagcaggaggaggggaggagagagtggggctcctctatcgggaccccctccccatgtggatctgcccaggcggcggcggcggcggcggcggaggaggcgaccgagaagatacccgccctgcgccccgctctgctgtgggcgctgctggcgctctggctgtgctgcgcgacccccgcgcatgcattgcagtgtcgagatggctatgaaccctgtgtaaatgaaggaatgtgtgttacctaccacaatggcacaggatactgcaaatgtccagaaggcttcttgggggaatattgtcaacatcgagacccctgtgagaagaaccgctgccagaatggtgggacttgtgtggcccaggccatgctggggaaagccacgtgccgatgtgcctcagggtttacaggagaggactgccagtactcgacatctcatccatgctttgtgtctcgaccttgcctgaatggcggcacatgccatatgctcagccgggatacctatgagtgcacctgtcaagtcgggtttacaggtaaggagtgccaatggaccgatgcctgcctgtctcatccctgtgcaaatggaagtacctgtaccactgtggccaaccagttctcctgcaaatgcctcacaggcttcacagggcagaagtgtgagactgatgtcaatgagtgtgacattccaggacactgccagcatggtggcacctgctcaacctgcctggttcctaccagtgccagtgccttcagggcttcacaggccagtactgtgacagcctgtatgtgccctgtgcaccctcgccttgtgtcaatggaggcacctgtcggcagactggtgacttcacttttgagtgcaactgccttccagaaacagtgagaagaggaacagagctctgggaaagagacagggaagtctggaatggaaaagaacacgatgagaattagacactggaaaatatgtatgtgtggttaataaagtgctttaaactgaattg

SEQ ID NO: 463100 - DNA, 930 bp, Homo sapiens
  misc_feature (897)..(897): n is a, c, g, or t
  misc_feature (909)..(909): n is a, c, g, or t
ccagccccagccccggccccggccccggctcgcgggcgctgcgtctccgcgtacaggaggcggcggcggctcccagtcaccggcccccgccggcgagcgcacgatgcactgcctgggcgccgagtacctggtgtttatcatgggctactcggtggtggctggagccgcgggaagactcctctttggctatgacagctttggcaacatgtgtggcaagaagaactcccccgtggaaggggcccctctttcagggcaggacatgaccctaaaaaaacacgtgttctttatgaattcctgcaacctggaagtcaaaggtacgcagctcaaccgcatggccctctgtgtatccaactgccctgaagagcagcttgactccctggaagaggtccagttctttgcaaacaccagtgggtccttcctgtgtgtttatagtttgaattccttcaactatacccacagtccaaaagcagactcactgtgtcccaggctaccagttcctccaagcaagtcatttcccttatttaaccgatgtgtccctcaaacacctgagtgctactccctatttgcatctgttttgataaatgatgttgacaccctccaccgaattctaagtggaatcatgtcgggaagagatacaatccttggcctgtgtatcctcgcattagccttgtctttggccatgatgtttaccttcagattcatcaccacccttctggttcacattttcatttcattggttattttgggattgttgtttgtctgcggtgttttatggtggctgtattatgactataccaacgacctcagcatagaattggacacagaaagggaaaatatgaagtgcgtgctggggtttgctatcgtatccacaggcatcacgggcatgcttgttcgtcntgatttttgttncccaggaagggggattaaaat

SEQ ID NO: 463101 - DNA, 2394 bp, Homo sapiens
ccagccccagccccggccccggccccggctcgcgggcgctgcgtctccgcgtacaggaggcggcggcggctcccagtcaccggcccccgccggcgagcgcacgatgcactgcctgggcgccgagtacctggtttctgcagaaggagcccctaggcaaagggagtggcgaccccagatttataggaaatgcacagatacggcatggttattcctgttctttctcttttggactggtttggtgtttatcatgggctactcggtggtggctggagccgcgggaagactcctctttggctatgacagctttggcaacatgtgtggcaagaagaactcccccgtggaaggggcccctctttcagggcaggacatgaccctaaaaaaacacgtgttctttatgaattcctgcaacctggaagtcaaaggtacgcagctcaaccgcatggccctctgtgtatccaactgccctgaagagcagcttgactccctggaagaggtccagttctttgcaaacaccagtgggtccttcctgtgtgtttatagtttgaattccttcaactatacccacagtccaaaagcagactcactgtgtcccaggctaccagttcctccaagcaagtcatttcccttatttaaccgatgtgtccctcaaacacctgagtgctactccctatttgcatctgttttgataaatgatgttgacaccctccaccgaattctaagtggaatcatgtcgggaagagatacaatccttggcctgtgtatcctcgcattagccttgtctttggccatgatgtttaccttcagattcatcaccacccttctggttcacattttcatttcattggttattttgggattgttgtttgtctgcggtgttttatggtggctgtattatgactataccaacgacctcagcatagaattggacacagaaagggaaaatatgaagtgcgtgctggggtttgctatcgtatccacaggcatcacggcagtagcagctcgtcttgatttttgttctcagaaagagaataaaattgacagttgagcttttccaaatcacaaataaagccatcagcagtgctcccttcctgctgttccagccactgtggacatttgccatcctcattttcttctgggtcctctgggtggctgtgctgctgagcctgggaactgcaggagctgcccaggttatggaaggcggccaagtggaatataagcccctttcgggcattcggtacatgtggtcgtaccatttaattggcctcatctggactagtgaattcatccttgcgtgccagcaaatgactatagctggggcagtggttacttgttatttcaacagaagtaaaaatgatcctcctgatcatcccatcctttcgtctctctccattctcttcttctaccatcaaggaaccattgtgaaagggtcatttttaatctctgtggtgaggattccgagaatcattgtcatgtacatgcaaaacgcactgaaagaacagcagcatggtgcattgtccaggtacctgttccgatgctgctactgctgtttctggtgtcttgacaaatacctgctccatctcaaccagaatgcatatactacaactgctattaatgggacagatttctgtacatcagcaaaagatgcattcaaaatcttgtccaagaactcaagtcactttacatctattaactgctttggagacttcataatttttctaggaaaggtgttagtggtgtgtttcactgtttttggaggactcatggcttttaactacaatcgggcattccaggtgtgggcagtccctctgttattggtagctttttttgcctacttagtagcccatagttttttatctgtgtttgaaactgtgctggatgcacttttcctgtgttttgctgttgatctggaaacaaatgatggatcgtcagaaaagccctactttatggatcaagaatttctgagtttcgtaaaaaggagcaacaaattaaacaatgcaagggcacagcaggacaagcactcattaaggaatgaggagggaacagaactccaggccattgtgagatagatacccatttaggtatctgtacctggaaaacatttccttctaagagccatttacagaatagaagatgagaccactagagaaaagttagtgaatttttttttaaaagacctaataaaccctattcttcctcattgtctttgtcattattgtttgaccaggtaacaatactggaactatattagtttacctttttttgtacaaattaggacagaaaaactcttctaaaaccatgtttatatgcatcaacttacaaagtacactatgtaagaactgaggtaagtttgtaagtgcacaactaataaataaacctttttaagataaggatttt

SEQ ID NO: 463102 - DNA, 1504 bp, Homo sapiens
ccagccccagccccggccccggccccggctcgcgggcgctgcgtctccgcgtacaggaggcggcggcggctcccagtcaccggcccccgccggcgagcgcacgatgcactgcctgggcgccgagtacctggtttctgcagaaggagcccctaggcaaagggagtggcgaccccagatttataggaaatgcacagatacggcatggttattcctgttctttctcttttggactggtttggtgtttatcatgggctactcggtggtggctggagccgcgggaagactcctctttggctatgacagctttggcaacatgtgtggcaagaagaactcccccgtggaaggggcccctctttcagggcaggacatgaccctaaaaaaacacgtgttctttatgaattcctgcaacctggaagtcaaaggtacgcagctcaaccgcatggccctctgtgtatccaactgccctgaagagcagcttgactccctggaagaggtccagttctttgcaaacaccagtgggtccttcctgtgtgtttatagtttgaattccttcaactatacccacagtccaaaagcagactcactgtgtcccaggctaccagttcctccaagcaagtcatttcccttatttaaccgatgtgtccctcaaacacctgagtgctactccctatttgcatctgttttgataaatgatgttgacaccctccaccgaattctaagtggaatcatgtcgggaagagatacaatccttggcctgtgtatcctcgcattagccttgtctttggccatgatgtttaccttcagattcatcaccacccttctggttcacattttcatttcattggttattttgggattgttgtttgtctgcggtgttttatggtggctgtattatgactataccaacgacctcagcatagaattggacacagaaagggaaaatatgaagtgcgtgctggggtttgctatcgtatccacaggcatcacggcagtagcagctcgtcttgatttttgttctcagaaagagaataaaattgacagttgagcttttccaaatcacaaataaagccatcagcagtgctcccttcctgctgttccagccactgtggacatttgccatcctcattttcttctgggtcctctgggtggctgtgctgctgagcctgggaactgcaggagctgcccaggttatggaaggcggccaagtggaatataagcccctttcgggcattcggtacatgtggtcgtaccatttaattggcctcatctggactagtgaattcatccttgcgtgccagcaaatgactatagctggggcagtggttacttgttatttcaacagaagtaaaaatgatcctcctgatcatcccatcctttcgtctctctccattctcttcttctaccatcaaggaaccattgtgaaagggtcatttttaatctctgtggtgaggacggccgtgtaatcgtcattcaacattactagacgcttcctgagtgtagacgc

SEQ ID NO: 463103 - DNA, 119 bp, Homo sapiens
acctgtttatcttctttttctcaactctccctttttctggaaggtttctgcagaaggagcccctaggcaaagggagtggcgaccccagatttataggaaatgcacagatacggcatggt

SEQ ID NO: 463104 - DNA, 455 bp, Homo sapiens
tctccctttcccaaaaacagaattatctgtaccccatttagacactcactgtgattctcccctgtgctactttatatgccatttctcctgttaatctgccttttgtaagttaattcttcagcaaaccgtcagagggcaaaggagaagttttccctcggcccctacgttatcaacagtacagacacataatactattctaacttgttcttttgtttttcagagtttcgtaaaaaggagcaacaaattaaacaatgcaagggcacagcaggacaagcactcattaaggaatgaggagggaacagaactccaggccattgtgagatagatacccatttaggtatctgtacctggaaaacatttccttctaagagccatttacagaatagaagatgagaccactagagaaaagttagtgaatttttttttaaaagacctaataaaccctattcttcctc

SEQ ID NO: 463105 - DNA, 1889 bp, Homo sapiens
ccagccccagccccggccccggccccggctcgcgggcgctgcgtctccgcgtacaggaggcggcggcggctcccagtcaccggcccccgccggcgagcgcacgatgcactgcctgggcgccgagtacctggtttctgcagaaggagcccctaggcaaagggagtggcgaccccagatttataggaaatgcacagatacggcatggttattcctgttctttctcttttggactggtttggtgtttatcatgggctactcggtggtggctggagccgcgggaagactcctctttggctatgacagctttggcaacatgtgtggcaagaagaactcccccgtggaaggggcccctctttcagggcaggacatgaccctaaaaaaacacgtgttctttatgaattcctgcaacctggaagtcaaaggtacgcagctcaaccgcatggccctctgtgtatccaactgccctgaagagcagcttgactccctggaagaggtccagttctttgcaaacaccagtgggtccttcctgtgtgtttatagtttgaattccttcaactatacccacagtccaaaagcagactcactgtgtcccaggctaccagttcctccaagcaagtcatttcccttatttaaccgatgtgtccctcaaacacctgagtgctactccctatttgcatctgttttgataaatgatgttgacaccctccaccgaattctaagtggaatcatgtcgggaagagatacaatccttggcctgtgtatcctcgcattagccttgtctttggccatgatgtttaccttcagattcatcaccacccttctggttcacattttcatttcattggttattttgggattgttgtttgtctgcggtgttttatggtggctgtattatgactataccaacgacctcagcatagaattggacacagaaagggaaaatatgaagtgcgtgctggggtttgctatcgtatccacaggcatcacggcagtagcagctcgtcttgatttttgttctcagaaagagaataaaattgacagttgagcttttccaaatcacaaataaagccatcagcagtgctcccttcctgctgttccagccactgtggacatttgccatcctcattttcttctgggtcctctgggtggctgtgctgctgagcctgggaactgcaggagctgcccaggttatggaaggcggccaagtggaatataagcccctttcgggcattcggtacatgtggtcgtaccatttaattggcctcatctggactagtgaattcatccttgcgtgccagcaaatgactatagctggggcagtggttacttgttatttcaacagaagtaaaaatgatcctcctgatcatcccatcctttcgtctctctccattctcttcttctaccatcaaggaaccattgtgaaagggtcatttttaatctctgtggtgaggattccgagaatcattgtcatgtacatgcaaaacgcactgaaagaacagtttttatttccatgcacatttggttatgaatgccagtggaaaccagaacaccaggaaaacagctgttctcatggtatttctggcctgccaaacaagagaagattggacttttcccaagtcttctgttctcacacaatgttaatctcttcccccgtcaccaccttagagttggtgacttgcagcatggtgcattgtccaggtacctgttccgatgctgctactgctgtttctggtgtcttgacaaatacctgctccatctcaaccaggggtatttagaatacttttcattattcagggaaaaatgtagccttcttatagtaaggtctatttttaggctcttaaacttggagaacattttagagtatatttagttttcatttggattgctat

SEQ ID NO: 463106 - DNA, 2424 bp, Homo sapiens
ccagccccagccccggccccggccccggctcgcgggcgctgcgtctccgcgtacaggaggcggcggcggctcccagtcaccggcccccgccggcgagcgcacgatgcactgcctgggcgccgagtacctggtttctgcagaaggagcccctaggcaaagggagtggcgaccccagatttataggaaatgcacagatacggcatggttattcctgttctttctcttttggactggtttggtgtttatcatgggctactcggtggtggctggagccgcgggaagactcctctttggctatgacagctttggcaacatgtgtggcaagaagaactcccccgtggaaggggcccctctttcagggcaggacatgaccctaaaaaaacacgtgttctttatgaattcctgcaacctggaagtcaaaggtacgcagctcaaccgcatggccctctgtgtatccaactgccctgaagagcagcttgactccctggaagaggtccagttctttgcaaacaccagtgggtccttcctgtgtgtttatagtttgaattccttcaactatacccacagtccaaaagcagactcactgtgtcccaggctaccagttcctccaagcaagtcatttcccttatttaaccgatgtgtccctcaaacacctgagtgctactccctatttgcatctgttttgataaatgatgttgacaccctccaccgaattctaagtggaatcatgtcgggaagagatacaatccttggcctgtgtatcctcgcattagccttgtctttggccatgatgtttaccttcagattcatcaccacccttctggttcacattttcatttcattggttattttgggattgttgtttgtctgcggtgttttatggtggctgtattatgactataccaacgacctcagcatagaattggacacagaaagggaaaatatgaagtgcgtgctggggtttgctatcgtatccacaggcatcacggcagtagcagctcgtcttgatttttgttctcagaaagagaataaaattgacagttgagcttttccaaatcacaaataaagccatcagcagtgctcccttcctgctgttccagccactgtggacatttgccatcctcattttcttctgggtcctctgggtggctgtgctgctgagcctgggaactgcaggagctgcccaggttatggaaggcggccaagtggaatataagcccctttcgggcattcggtacatgtggtcgtaccatttaattggcctcatctggactagtgaattcatccttgcgtgccagcaaatgactatagctggggcagtggttacttgttatttcaacagaagtaaaaatgatcctcctgatcatcccatcctttcgtctctctccattctcttcttctaccatcaaggaaccattgtgaaagggtcatttttaatctctgtggtgaggattccgagaatcattgtcatgtacatgcaaaacgcactgaaagaacagcagcatggtgcattgtccaggtacctgttccgatgctgctactgctgtttctggtgtcttgacaaatacctgctccatctcaaccagaatgcatatactacaactgctattaatgggacagatttctgtacatcagcaaaagatgcattcaaaatcttgtccaagaactcaagtcactttacatctattaactgctttggagacttcataatttttctaggaaaggtgttagtggtgtgtttcactgtttttggaggactcatggcttttaactacaatcgggcattccaggtgtgggcagtccctctgttattggtagctttttttgcctacttagtagcccatagttttttatctgtgtttgaaactgtgctggatgcacttttcctgtgttttgctgttgatctggaaacaaatgatggatcgtcagaaaagccctactttatggatcaagaatttctgagtttcgtaaaaaggagcaacaaattaaacaatgcaagggcacagcaggacaagcactcattaaggaatgaggagggaacagaactccaggccattgtgagatagatacccatttaggtatctgtacctggaaaacatttccttctaagagccatttacagaatagaagatgagaccactagagaaaagttagtgaatttttttttaaaagacctaataaaccctattgtttctacacaaataaaccaaaatggcctgactgacctcaacggcggcacactattgcccataacctctaccgaggggccgttactcattcctcactatctttcctcaacacacatcgacactaccccctccccccacccgattacttctttcctcatccccccccccactatccccctcgccacctcgccaacccctccacaccccctccttatttcccgccctctacctcgcc

SEQ ID NO: 463107 - DNA, 1038 bp, Homo sapiens
  misc_feature (1005)..(1005): n is a, c, g, or t
  misc_feature (1017)..(1017): n is a, c, g, or t
ccagccccagccccggccccggccccggctcgcgggcgctgcgtctccgcgtacaggaggcggcggcggctcccagtcaccggcccccgccggcgagcgcacgatgcactgcctgggcgccgagtacctggtttctgcagaaggagcccctaggcaaagggagtggcgaccccagatttataggaaatgcacagatacggcatggttattcctgttctttctcttttggactggtttggtgtttatcatgggctactcggtggtggctggagccgcgggaagactcctctttggctatgacagctttggcaacatgtgtggcaagaagaactcccccgtggaaggggcccctctttcagggcaggacatgaccctaaaaaaacacgtgttctttatgaattcctgcaacctggaagtcaaaggtacgcagctcaaccgcatggccctctgtgtatccaactgccctgaagagcagcttgactccctggaagaggtccagttctttgcaaacaccagtgggtccttcctgtgtgtttatagtttgaattccttcaactatacccacagtccaaaagcagactcactgtgtcccaggctaccagttcctccaagcaagtcatttcccttatttaaccgatgtgtccctcaaacacctgagtgctactccctatttgcatctgttttgataaatgatgttgacaccctccaccgaattctaagtggaatcatgtcgggaagagatacaatccttggcctgtgtatcctcgcattagccttgtctttggccatgatgtttaccttcagattcatcaccacccttctggttcacattttcatttcattggttattttgggattgttgtttgtctgcggtgttttatggtggctgtattatgactataccaacgacctcagcatagaattggacacagaaagggaaaatatgaagtgcgtgctggggtttgctatcgtatccacaggcatcacgggcatgcttgttcgtcntgatttttgttncccaggaagggggattaaaat

SEQ ID NO: 463108 - DNA, 956 bp, Homo sapiens
cattctggaatgcttgcatacctgcctttccagtgggtccttcctatgctctcatcctgcggaaggctctgtgagctcttgtctccactggttggcatgaaggtcatgttcctgagaagtaccctggctggggtggggcgtatcaaaatctccaacgggtggctggtgagggacaaggaaatattctctttaaagtcctcctaccccaagtctgatctggtgctggagaaagttgcagtgaagaccaggagtggagaggcagcgaaggtcatcatcaggaggggcatccccttcctgaaccaagtcagcagcagctgccagagccacagcgagggcggagatgaggagccccccgcaggcctggctgcagatccttgcagcctctgtgtcaggaacatggccaaccttacgaattcccaggagcctcgattctggaccaaatccccaagatcgtcaccagatgcggaccgccggccctttctaggccccatccccagccacggccctctgcctctcccttttgctgagaatgccttgcactggtttatgctgtatgtctttatcagcagcatgaaaacggactaatataaggggcaactctgggacctgggaagaaaccagaaggcttggcatttcctttctcgtggcattgtcaaagggaacattctgttgacatcagaggatgaattctgcttcaaggagtgagaaagtacagagggtttagtcatcacccctctcagacgcttgcccgtgctgtgaaccactgtcggaggaaggaggaaaatctgtgggttcagcccacagggagctcagctggtacccacagcagtctgtagagctcttctcagctcgttatcaagcctaatattccaatggcccacattttattctttatattctcagatataatttcctattaaaaatacaaatccccacaaaatctcactttttaaaaa

SEQ ID NO: 463109 - DNA, 1209 bp, Homo sapiens
  misc_feature (1)..(1): n is a, c, g, or t
  misc_feature (8)..(8): n is a, c, g, or t
  misc_feature (11)..(11): n is a, c, g, or t
ncttctgnccnagaaaggtccataaatgccatctaaaatgcaaggcttggaatcatggactccaggagcccagttggtgcactacctcactgtggctgcactggcgcccaagctgcaagacaaagtcccctttactcttccctctccttttctcaagcagaaggagtctctccctatggccaccacagtgatggttgagaagatttgtagtggaaagaaaaaggctttcaggatttgcagttccagcactgaaactctttccccacatttagatgtcttcgatatttcttttgtcagcaaaacaaatggcctgggctctgaaggagggggagctgctcagggtccacactggagccagaagccagtcacctgcttaaagggtgcagtggctactctcatattcagagtaaaaggtgttatacaatcctacaccaatatgactgtggagctgctgaaggttaagaagctgtctccaccgtatgttcttaagtggagtctcgcactgtcatcctggctggaatgcagtggtgcaagccgactcactgcaacctctgcctcttgggttcaagtgattctcctgcttcagcctcctgatttgctgggattgcagagcaaaccagtgaaaaaatggccttcgcactcctgagagacctttcaccgggctttctacttttgaattctctccatagctggtttcctcttaggcctcgatagagcagtccctgaatcacacaggtatgctgactacgtcttttcctggtacaaaccatcatgggggaaacacacagcaagaagcatcttcaggtcacaagataggccttctaagactgaattacatcaccagctttcctgggtctccagcttgcagatggcacactgtgggacttcttagcctgcagaatcattgaagcacccattgattgccccttactctagggatttacagctttgtgcttgtcgtggccactgctcccaaagtgactataatccggaggatccccacgacccttcagagcaggcaagacaccagcaccagaaactctgaaaacctaaaagtcaagaacaatgcttttgcattttcctgtcccttctaaaatttcatttttaagtggtgagatctctttaagaagaggtttcaaaaataatgtaaaaagtattgcttgcaagatttgaaaataagccaattcaacaaatccaaaataaaaagct

SEQ ID NO: 463110 - DNA, 948 bp, Homo sapiens
  misc_feature (1)..(1): n is a, c, g, or t
  misc_feature (8)..(8): n is a, c, g, or t
  misc_feature (11)..(11): n is a, c, g, or t
ncttctgnccnagaaaggtccataaatgccatctaaaatgcaaggcttggaatcatggactccaggagcccagttggtgcactacctcactgtggctgcactggcgcccaagctgcaagacaaagtcccctttactcttccctctccttttctcaagcagaaggagtctctccctatggccaccacagtgatggttgagaagatttgtagtggaaagaaaaaggctttcaggatttgcagttccagcactgaaactctttccccacatttagatgtcttcgatatttcttttgtcagcaaaacaaatggcctgggctctgaaggagggggagctgctcagggtccacactggagccagaagccagtcacctgcttaaagggtgcagtggctactctcatattcagagtaaaaggtgttatacaatcctacaccaatatgactgtggagctgctgaaggttaagaagctgtctccaccgtatgttcttaagtggagtctcgcactgtcatcctggctggaatgcagtggtgcaagccgactcactgcaacctctgcctcttgggttcaagtgattctcctgcttcagcctcctgatttgctgggattgcagagcaaaccagtgaaaaaatggccttcgcactcctgagagacctttcaccgggctttctacttttgaattctctccatagctggtttcctcttaggcctcgatagagcagtccctgaatcacacaggtatgctgactacgtcttttcctggtacaaaccatcatgggggaaacacacagcaagaagcatcttcaggtcacaagataggtaataccatctacctgaattttttcaaaagcagcagaatatttagttttctatttcagtggcttctaacagagatcattgtttgcacaagattaaatgtctgcagtggtcgtcttatctcagtgtgtgata

SEQ ID NO: 463111 - DNA, 1164 bp, Homo sapiens
tcggcacgaggctgagctacaactacaaccagaggtctaaactacaaccagatctgaattcttgttgggagccattttgtgaagagacgaagactgagctggtttggctgcatttctggcctcgagccgcagtcagtttctccccgtagaacccggcagtaggagacttagaatcgaatctcttctccctcccgcctcctgtttttggctttttgagaaaccttatcatccaacacaatggccagcaacgttaccaacaagatggatcctcactccatgaactcccgtgtgttcattgggaatctcaacactcttgttgtcaagaaatcggatgtggaggcgatcttttccaagtatggcaaaattgcgggctgctctgttcataagggctttgccttcgttcaatatgataaggagaaaaatgcccgggctgctgtagcaggagaggatggcagaatgattgctagccaggttgtagatattaacctggctgcagagccaaaagtgaaccgaggaaacgcaggtgtgaaacgatcagcagcggagatgtacggctcctcttttgacttggactatggctttcaacgggattattatgatggaatgtacagtttcccagcacgtgtacctcctcctcctcccattgctctggctgtagtgccctcgaaacgtcaacgtctatcaggaaacacctcacgaaggggcaaaagtggcttcaattctaagagtggaaagcggggatcttccaagtctggaaagttgaaaggtgatgaccttcaggccattaagcaggagttgacccagataaaacagaaagtggattctctcctggaaaacctggaaaaaattgaaaaggaacagagcaaacaagaggtagaggtgaaaaatgctaagtcagaagaggagcagagcagtagctccatgaagaaagatgagactcatgtgaagatggagtctgaggggggtgcagaagactctgctgaggagggggacccactggatgatgatgttaatgaagatcagggggatgaccagctggagttgatcaaggatgatgaaaaagaggctgaggaaggagaggatgacagagacagcaccaatggccaggatgactcttaagcacatagtggggttgagaaatcttatcccattgtttctttacct

SEQ ID NO: 463112 - DNA, 1172 bp, Homo sapiens
ggctgggcctcctgtctttctgcaggtttgtgacttacctttgcttccatgggaagaaaggaggcgggaaatgaggtacaaagagaaaattggattactgactggagctggcagagaggtgtggccaagttcctggagaaatgcttcctgctcctcccgccctccccaccaccatcctgctgtatttaaagctgctttggtgatgctttgctcatctcagtgaattttcagttcagaccttttcactaaggatcattatggaagaaagaggggtaagaagtgtggctgagtagcctaggattaattcatcagtccccaaataagcaaacacgatgtctcaggatggacggtgaaattctggacctcacaggaccctgctttctcggctgtgattcacgacaaactccaggtccccaacaccatccggaaggcatggaacgaccgggacaaccgctgtgacatttgcgccactcacctgaaccagttgaagcaggaggccatccagatggtgctgacgttggagcaggcagccggcagtgagcactacgacgcctcgccctgctccccgccaccgctctccaacatccccaccctggtggggtcccggcacgtgggtgggctccagcagcccagagactgggcctttgtgcccgccccctgtgccacctccaactacacaggcttcgccaacaagcacggcagcaaacccagcagccttggggtcagcaatggggcggaaaagaagagcgggtccccaacccaccaggccaaggtcagcctccagatggccaccagtccaagcaatgggaacatcctcaattcggtggccatccaggctcaccagtacctggatggcacctggtccctgtcgagaaccaacggggtcaccctgtacccataccaggtccttgctggtccaggtgatgccagcgacttcccagccagcagatttaccacatggcagagccatgaagaggtaggccacacagatacttggactggggtccaagccccgacttgtccacttattagcagcgtgacttggcacaaggggtttgccctgtcttaggctcaagtccctcatttataaatggatttatttaaattagaacatgcccccaagtttctccatagaaataaaacacaggtcttaaatctcccagggaatcttt

SEQ ID NO: 463113 - DNA, 844 bp, Homo sapiens
gggtctggttccttggtttcagcgcctaacacagcaccatggacttagtgaacgtgaagtatgttagccaccatcattatcaagggcttactgaagaaatttgaaaatctggcttcaaaacgatggtcctgctgcaaggtacaggctgtgatacatgaggtgatcaatcttcttagatatgcggtatcttctgagcagccagcacagaatcctcattctcctcatccacgtgaccttctctggcatccgggcattggttgtaccctttcgcttacctatgcccatgtgcctgcccttccggtaggccaaggtgttttcctggcatcgagcctgggaatggacagtcattggcttgcggatcatcagcccatctttgatcagcttccagatctgctgacaggagttggcattggagatttcattggtttcattggggtccaaccagaccttcttcttgccacaggggaggaccctagaggcaagcctcttctgaagcctgagcatactcatggctgtgaccatagcagtgaaaggtgagtgatctaatattgacttgattcctcccattaagtggcctctgagtgggcaaagccagtgaatggggacacctgagcactgcctgctgtcgggactgggcactgcctaagacaatgattacttttgagcttttctgaagtgaaaataagtcaatgtgaacatggcaaagagggacagaggaagagacttatggtatctagaaggaagttggcaggtaacagggtgccaggaaattaagacctaaagaaatagagtggaggagaaggagggtgggggcacaacagtggattgtggttttgcatttgaa

SEQ ID NO: 463114 - DNA, 2405 bp, Homo sapiens
caccttgaatgaagaaccatcgggctttcctgttggtatatgcctttccagacttttaaaaattactgctatttttatcccttccaggtctcccggcccctgcccctgtggagggacaatagacagactccatggctgctgtcccttcgaggggagctggtggcttctcttgaagacgccagcctgatgggactgtatgtggacatgaatgccaccactgtcaccgtccaaagcccgagacaaggccttcttcagaggtgggaggtgctgaacacctctgctgagctcctgccactatggctgccagagtcggaggtcttagttcacatccccaagcagagactgggtctagtcaaaagaggttcctacattgaggaaaccctgagcctcagattcctccgagtccaccagtccaacatctttatggtgactgagaacaaggactttgtggtggtcagcattccggcggccggggtgctccaggtccagcgatgccaagaagtcggaggaaccccgggaacacaagctttctatagggtagacctgagcctggaatttgccgagatggctgccccggtcctctggacagtggagagcttcttccagtgtgtgggaccatctgtcaccctgactgaaggtctaggaactgtgaggcctgaacaggaccccgccaagtctccaggaagtcccctcctgctgagaggcttgtcaagcggggatgtggctgcacctgagcccatcatgggggagcccggccaagccagtgaggagttccagccattggcgaggccctggcgggccacactggctgcagaggagctggtttctcaccgttctcccggagagccccaggaaacgtgctctggaacggaggtggagaggccacgccagacagggcctggtctccccagggagggggccagggggcacatggacctttcatcctcagaaccaagccaggacatagaggggccgggactctccatcctgccagcgagggatgccacattctccaccccaagtgtgaggcagccagaccccagtgcctggctgagttcaggacctgaactcaccgggatgcccagggtgaggctggcagcgcccctggcagttcttcctatggaacctctgccaccagaacctgttcgcccagcagctcttctgacacccgaagcctcatctgtgggagggccagaccaggcccgatacctggagtcagcccctggctggcctgtgggccaggaggagtggggggttgcacacacgtccagccctccatccacgcaaaccctgagcctgtgggctcccacaggagtgttgctacccagcctggtggagcttgaataccccttccaggctggccggggggcctcactccagcaggagctgacagagcccaccttggccctcagtgctgaaagccacaggcctcctgagcttcaagacagtgtggaggggctttctgagaggccctcacgctgagcctccatggagactccaggcagccggtaccccgctggcttggacagccccagtgaccctcagtgacccagctgtccccaggctccctggcttagatgcccagctgtggctgggtacagtgttctgggccggaagagcactcactcagtgcttccctggaaaggtggacccccagacgcccacctccaggcagacccatcactggaagtgggatttgaaatgcagccaagaagaggagaccgtcggcaacgcccgcccggaacaagaaataaataaataaataatcagggttgtcttggctgataaacggtccccacctcgaagaagacttctcccccctctgcgctccctcctcctccctctccgggcagatccgtcccgggcaaaagcttaatagccccatttaaggcttttccttttcaccacgagactgagctgctcctgccattacgaggttttcagcttctctctgaaatcaaattactgactccatttaattttttaaaagctcagatgatttcccttctcgaatccgagccatgactccaagaccagcccccaccagccctaccaggcggttcccctgcgggcagccgctgccctgggacggcggcccccacgcctggggaagcctgacacctagagggaaagccagcaggaggaggcctgagtctctggctgccaccctggacactgggctgggtggcctgagctggaggaggcccacaggagcccatggctagaggccggatgatcttcaaaggctggtgggcccttccaaccccttgtcccttcatggcaaggagagtttgtcaaccttaccctggtggcagcctctgcccggatccagatgaccatgggggtgggagcctcagtcctggttccaggagcaccccagaggggcccgactcctggctgtgtgc

SEQ ID NO: 463115 - DNA, 1184 bp, Homo sapiens
tggagggtcaatttggagatagtcatggacatgatgggctgatgaaccacagaaggatcatttggactccatttggcagagacgtcagaaactcactgctcttgggaacatccttttccaataacatttatagttctagatggaagcgaaaagcaccatatgttaagagtttcctgcaaagcttcctggtaagagaggaaataaattcaacttgtcacatctgctcgtgggccagtcaagtaggattttatcacagccttaagtggtttacaaaactgtcctatgtgtccagagtttcttccttctgcgggttcgtggtcttgctgacttcaggagtgaagctgcagaccttcccagtgagtgttacagctcataaagaccttagagatcgtctactcaaccactcttgctttgcatttgagaatttaagtcacttgaccaaagtcagacaacagtgattatattactacagtgattctggagtgttctcaacaaataataacctcagaaacaagtaggcacttggagacattgggctgtggattcaggttgcctaggtttgaatcctagtcccaacatttactaaggctctctgatagtgggcacattatttaacttcctcagacctgtttccccatctacaaaattggattacctatgctccaaggtttgtgatctagaattcaactaataaattcaggcaaattattccaattatattaagcactagtactcaaagctgacatttgaggctcaaatggagtgtcttcttagcttttgtctcctgtcatttcagccctaagccgaaatccaaaaataatgggaaaattctatgccctgatataacacagaattataaaggaagctacaatatcccatactccttgcttcatactctagaatccatttaaatgaggtttaaaattgttccggttgagtcattccttccagtcaaggcatattctatctgaaggactcaaattaattagctacagttaacagattattaagtcaactggcttctacggagatggtgagagaggccatgtgggtacaccatgagaagtctgtcatctacaggaaaggaagagagccctcccaggaaactgactttgccagactttgacctggaacgtctattctccagaactggctccttcttcataggctgggggtgtatacaa

SEQ ID NO: 463116 - DNA, 2040 bp, Homo sapiens
tggagggtcaatttggagatagtcatggacatgatgggctgatgaaccacagaaggatcatttggactccatttggcagagacgtcagaaactcactgctcttgggaacatccttttccaataacatttatagttctagatggaagcgaaaagcaccatatgttaagagtttcctgcaaagcttcctggtaagagaggaaataaattcaacttgtcacatctgctcgtgggccagtcaagtaggattttatcacagccttaagtggtttacaaaactgtcctatgtgtccagagtttcttccttctgcgggttcgtggtcttgctgacttcaggagtgaagctgcagaccttcccagtgagtgttacagctcataaagaccttagagatcgtctactcaaccactcttgctttgcatttgagaatttaagtcacttgaccaaagtcagacaacagtgattatattactacagtgattctggagtgttctcaacaaataataacctcagaaacaagtaggcacttggagacattgggctgtggattcaggttgcctaggtttgaatcctagtcccaacatttactaaggctctctgatagtgggcacattatttaacttcctcagacctgtttccccatctacaaaattggattacctatgctccaaggtttgtgatctagaattcaactaataaattcaggcaaattattccaattatattaagcactagtactcaaagctgacatttgaggctcaaatggagtgtcttcttagcttttgtctcctgtcatttcagccctaagccgaaatccaaaaataatgggaaaattctatgccctgatataacacagaattataaaggaagctacaatatcccatactccttgcttcatactctagaatccatttaaatgaggtttaaaattgttccggttgagtcattccttccagtcaaggcatattctatctgaaggactcaaattaattagctacagttaacagattattaagtcaactggcttctacggagatggtgagagaggccatgtgggtacaccatgagaagtctgtcatctacaggaaaggaagagagccctcccaggaaactgactttgccagactttgacctggaacgtctattctccagaactgtgagaaaatacatttctattgtttaagacaaccagtctatgacattttgttatgacaatggtgcagattaagaatcttatcttctactatacccgcttgctcactctaatcagaagcattggcctctttcacattccttaaggatagtatgttttaggggctttgcactgtttctactgcctagacttcttttccaccatgtattctacatgatcaatttatttgatcaccatcttcaaatctctgatcatgtcactttcacaatgaggtcttataagaacaccctgcttattactataacctgccacctctccagcctgggtcctcctgaacccctttatactgtctcatgtttaatatttctatttcttttctctctttctttctcctccctcactttttccttatttttaaaattgacatataataattgtacacatttatggggtacagtgtcatttcaatatatgcatgcaaggtgtaatgatcaatttatggtaattagcatattcatgacctcaaacatttcatttctttgtcttgagaacattcaaaaacctctcttctagatgtttgtgaataaaataaattaatattaactatggtcaccctacagtgctatagaacactagaatttattcctcctgtctagctgtaataagtataattgacttcaaaatcagcagaaaaagcaatggttgaatgcctttttcttcctttttttctttttccccttttctttctaaagaagtcaacataagcttataaagtgaatgatcctattctcagaatattttactttcaggatttttattaattttgatacttatagccagtggaagaaagcacactagtctttgaactccagagctgtcagttgtcttccat

SEQ ID NO: 463117 - DNA, 1263 bp, Homo sapiens
cgctggctctggggtctgggggcattgctcagcggtgctaggctggcgcggcttgagccgccgccggactgacagctcggtctgcggaccatggagacctgcgccggtccacacccgctgcgcctcttcctctgccggatgcagctctgtctcgcgctgcttttgggaccctggcggcctgggaccgccgaggaagttatcctcctggattccaaagcctcccaggccgagctgggctggactgcactgccaagtaatgggtgggaggagatcagcggcgtggatgaacacgaccgtcccatccgcacgtaccaagtgtgcaatgtgctggagcccaaccaggacaactggctgcagactggctggataagccgtggccgcgggcagcgcatcttcgtggaactgcagttcacactccgtgactgcagcagcatccctggcgccgcgggtacctgcaaggagaccttcaacgtctactacctggaaactgaggccgacctgggccgtgggcgtccccgcctaggcggcagccggccccgcaaaatcgacacgatcgcggcggacgagagcttcacgcagggcgacctgggtgagcgcaagatgaagctgaacacagaggtgcgcgagatcggaccgctcagccggcggggtttccacctggcctttcaggacgtgggcgcatgcgtggcgcttgtctcggtgcgcgtctactacaagcagtgccgcgccaccgtgcggggcctggccacgttcccagccaccgcagccgagagcgccttctccacactggtggaagtggccggaacgtgcgtggcgcactcggaaggggagcctggcagccccccacgcatgcactgcggcgccgacggcgagtggctggtgcctgtgggccgctgcagctgcagcgcgggattccaggagcgtggtgacttctgcgaaggtatccagttggctgggggccgtggggtgggagtgtagagcgtaggtggcaattgagagagagtgtgccctagaggaaagaggcgggtgtggggtcggggggcggtggagaagccttggactctggagcccaaggagagccctgaagtcttgtggagtttccaatgaagaaacagagcctcagagagattagtacctcacttgcaaatttaggaaatggggagctaggatttgaattcaggcttgcccaactcacattctatgacatcatgaggtctcctcagtgcataaggaagaactctacagcagcccaatcttcaggct

SEQ ID NO: 463118 - DNA, 3576 bp, Homo sapiens
gggaacctgtggcccggctctctgcgcgtccccatcccccgtggccccgaccccggccatgaagcgtatcttctcctgctccagcacacaggtggcggtggagagatggaaccgccatgatcagaagctgctggaggcagtgcacaggggggatgtgggacgcgtggctgccctggcctccaggaaatctgcccgacccaccaagcttgactcgaatggccagtccccgtttcatctggcagcctccaaaggcctgacagaatgtctgactatcctgcttgcaaatggggctgacatcaacagcaagaatgaggatggaagcactgccctacacttggccaccatctcctgccagccacagtgtgttaaggttctgcttcaggatgttaacaccaagctccatgctgcttccctttgtggccatttgcagcatggtgctaatgaagatgctgtggatgcagaaaaccgtagtccattgcactgggcagcctcctctggctgtgcctcaagtgtgctcctgctgtgtgaccacgaagccttcctggacgtgttggataatgatggacgtacacccctgatgatcgcatcgctgggtgggcacgcagctatctgctcacagctgctgcagcgaggcgcccgagttaatgttacagacaagaatgacaaatcggctttgatcctggcctgtgagaaaggcagtgccgaggtggctgaactgctcctgagccacggagctgacgcgggggctgtggacagcacagggcatgatgctctgcactatgctctgcacacacaagacaaggcactgtggaggcacctacagcaggccctgagccggcggcggcggggcggtcagaggctagtccagcacccagatctcgcatcccaggcctctccatctgagccccaggcaggttctcctcctaagagctcatggagagcagagcctgaagaggagcaagaggagaaggaggatgaagacccgtgctcggaggagtggaggtggaagtatgaagaggagcggaggaaagttgttcggctggagcaggagctggtgcaaaagacagaagagtgtaagactcaagctgcagcctatctggaccttgagaaccagattcgagagcaggcgcaggagctaggggtcctcctatcctgggagcccagagcttcaggaaagcaaggctctagtctccggcctggaggggatggcatggagcagggttgtcctaaggacctgctggctgagagtacacaagagctaaagaagcagcagcaggcagcagccacagtaaatccagtattagctccaaagaaggctgaggactcagccccaggaaagatccagtatgaagtccatggaaggtcccaaccagaagaacaggggccaccccagagcccagcgtctgagaccatcaggaaagccacaggacagcaactgactaccaatggggcacagacctttggccctgatcatgctgaccagctgcctgctggtcagaaggagagttcccaggttctaggagttgaaccaggaggcacagtggctgaaccagtgggcccagcagccatgaaccagcttctgcttcaactaagggaggagcttgctgcagtgtggcgagaaaaggatgctgcccggggggctttgtcaagaccggtcatggagggagccctggggactccccgtgctgaggcagcagcagctgcctgggagaagatggaagcccgactggagcgggtgctggcaaggctggaatgggcaaaggcaggactacaggtgaaacctgaggttccttcccaggagtccagagagggagccctaaaggcagccccagggagcatcaaacaggatgaagagaaggagaaaagggttcctggggctcgaggagagcctctaggggcccttggaggggaaaaggccctaggaggcctggcaaagggacagctggagaaggagatgtcagtactgagactgagcaacagtaacttgctggaggagttaggggagttggggcgggagcggcagaggttgcagagggagctacagtccctgagccagcggctgcagcgggagtttgtgcccaagccagaggcgcaggtccagctacagcagttgcgacagagtgtggggctgctgacaaatgaactggccatggagaaggaggccacagagaagctgcggaagctcctggcctcccagagcagcggtctccgagggctgtgggactgcctgcccgcagacctagtgggcgagaggagtgcacaaagcaaagcagcggagtccctggaggagctgcgggcctgcatcagcaccctggtggatcggcaccgggaggcccagcaggtgctggctcggctgcaagaagaaaaccagcagttgcgggggtccttgtccccgtgtagggagccaggcacctccttaaaggccccagcatccccccaagtggccgctctggagcaagacctggggaagctggaggaagagctgcgggcagttcaggccacgatgagcgggaagagccaggagatcggaaagctgaagcagctgctctaccaagccacagaggaagtggctgagctaagggcccgggaggcagccagcctacggcaacacgagaaaactcggggttcgctggtggcccaggctcaggcttggggccaggagctaaaggctctgttggaaaagtataatacggcctgccgggaagtgggtcggctgcgggaggcggtggccgaggagcgccgccggagcggggacctggccgctcaggcagccgaacaagagcgccaggccagcgagatgcgggggcgctccgagcagtttgagaaaacggcagagctgctgaaagagaagatggagcatctcattggggcttgccgagacaaggaagccaagatcaaggagttgttgaagaagctggagcagctttcagaagaggttctagcaattcggggagaaaatgctcgccttgccctgcagctgcaggattcccagaagaaccatgaagagatcatctccacctacaggaatcatctactgaatgctgctcggggttacatggaacatgaagtgtacaatatcctgctgcaaatccttagcatggaagaggagtgaggcagcctcactgtgtgccctcagggatacgagattctctgttggaataagaaaccctggttgacagaggcttcatcaggctgtggtgggcgggggtgttggccactaggcaatggtatgggcagggcttcacctgacattatggacctcagacctgagaacctggaccctggaatcagcatggatgagaccagaggaggtatggatggaaacaagctctatggaaaataaagcatgaggcaggacggggctgagtgtaattttttttttttctaaaggggagtggggaaaggaatatctttcatccctttattcttttctttttttctggaaacaaatattaacattcaactggcaccttcaatctttggcctgggtagggtcttatgaggaggattatactgaaggcttaagctaaataaaaggatttttcctatttattaaagcccttttttggtgtgctg

SEQ ID NO: 463119 - DNA, 3916 bp, Homo sapiens
  misc_feature (3)..(3): n is a, c, g, or t
  misc_feature (6)..(7): n is a, c, g, or t
  misc_feature (9)..(14): n is a, c, g, or t
gcncanngnnnnnnagctgcaggacaagttcgagcatcttaaaatgattcaacaggaggagataaggaagctcgaggaagagaaaaaaaaactggaaggagaaatcatagatttttataaaatgaaagctgcctctgaagcactgcagactcagctgagcaccgatacaaagaaagacaaacatcgacctcctgaagctgcgtcacaggcactaatcaaagaacacaaccaaggaaccagatgggaagcaggtttgcataagccagttcccagcttggcttttccctttggcttatctcgctctctctcccagtctggagtgcagtggcgtgatcttggctcactgccagctccacctcccaggttcacgccattctcctgcttcagcctcccaagtagctggggctacaggcacctgccaccaaacccggctaatttttttgtatttttagtagagacggggtttcaccgtgttagccaggatcgtcttgatctcctgaccttgtgatccacccgcctcggcctcccaaattgctgggattacagatgtgagccaccgcacctggtccaagaacccaagttttagatctagagtgatgtcagcatgacattgatttcctgaggcccaggggcgaaggagctgaggacagcagaggggtgaaggaactcagctacagacagcagcagctgatgcacaggcctcccagcgcctgaagtcacccggaattgggaagtgctcagaagcttacaaagctgcctcgaggtgggaacatgacataaatccaagagcagatccctgatcctataaaaatgtactagatgcagtgggggcattttaaatgagcagagaaggacagacagataaacagaaggacaaacagtattgggattgggataaatgctcagcttttgcccaaatcttagtgacttaagcatcacttatttgctcacgattctgtggctggaccatttggtttggctcacagggcagggactgtgctggtcttacctgagcagacctgcatgtctgcggtcaactgggttggcagagacagagtgactgtcttcctccaggaagcagcaggttaactggttggcagagacagagggacagagggactgtcttcctccaggaagcagcaggttaactggttggcagagacagagggacagagggactgtcttcctccaggaagcagcaggttggctctgtttccttcgtggggcagctggtctccagggcagcaagagagaccaagccccagtgcacattctacagcctctgtgcacatcagacttgttaatatcccattggccagtgtaagtcacttggccaagcccagattaaggagtggaaagatggaggctatctcctcctgggagaggaggcaaaggaggtgggagtattatgtggccacttatgtttgcaatctaccatacttagcactttgagaaaagaattaactgagaaacttgcttcaaatagggccagtaaaatgaagccccaattgaagtaaaatgcatatataaaaaatgaaactgtgaccgattttaaggacagtattggcaaatatttctgtgctcttggaggagaagacccttattggcatgacatgtcagaaaccacaatgaaagaattattttaacttgcattcataaaaattaaaattattcattaaaaacatcgtgaatgaaattaaaagtcaaaatgtaagccagaaaattatttacaacgtatgtgtcaggaaaagacaatacccttcaaactttgagagtttacatcagaaagaaaacagcaaatgacatgatccaaacttgataaaggacatgaaaaagagccagcacttagtatgttttctgaatgaataagtagccaacagcacatgaaaatgcgtgtaatccatttgtaagcagagaaatgcaaactaaaacagtaaagtgtcattttcacttcctggattggcaaagggttttatgtattttactgatagtgctcaatattagcagtaaacaacaaatggtgagtaaatatgagcttcggaacctcagggaaatgatctccttatttcaacctgtagattccttcctacaaccagtgtctactgagcacctactatgtgccaggcacagcctaagtcctgaaggtgtagtctccactgagaaggtgatatttgcacaaagacctgaaagacaggagtgaactgtgtggataactgtgggtacccctacaggcagaggagtagcaatgtgggtcccaaggtgggaccacatcagacatgttcgaggactagctgagggagagaggtgggaggtcagaggagatgggggccggctctgctggccgtcacgagcactctgggtgcagagggcgagaggtgggaggtcagaggagatgggggccggctttgctggccaacacgagcactctgggtgctgagggcgagaggtgggaggtcagaggagatggaggctggctctgctggccgtcacgagcactctgggtgctgagggcaagaggtggggaggaggtcagaggagatgggggccggctctgccggccaacacgagcactctgggttttcctccaaatgctatgagagcagaggagtaacctggtctgacttgggtgtgagcagatctctctggttgttgttctggaaaaaactgaggtgcccacgtgaaagcagagatcggttaggaggctgctgcagcaattcaggcaaaaatgggtggcgggcctcgggtgtagtggaggagaagcgatcggattttggatatttgtagctccctcaatacgatttcctggagaaggagatgacttcaatcttctggcctgagtagctgaaaggatgaagctgtccttcgcggaggtggggaatccacagagaagcgggtagggagagagtatcaggagctcagttttagccatggatgttcgaggggaggtattgagcagcagatagagacacaggcctgtggtcccaggagaaggtctgggggtcactagcccatggatggagtcacaggctgcatagattgcaggaaagcgaaggtggagagagaagagcagagtaccaggacgggccattgagcaccctggtgttgagagcaagtggcctctagtcagagttgggtcagggccactgtgagtgggctgcccccaacatgagtcggctgtctaggactagtttatctctgcttctcactttactggtattatggggcagctcctgctgtcttccaatttggtgtttgtaaaatgagacataaaaagcaggtgacaaggataccagaaagtgcacaggtctgagtggagtatggggctgtctccaggggagaggtggctgtttggagggaagggtgacaatggataatcagggtccatgggcatccctgcttgttttggagccatgggcactcaaataatgtgattttatgaggctattgaagaaaaaattggccacagggccaagagggctgggaggaccccagctctccgactggtgtttgcttctctgccatcagggtcgggaggccatgccaagcattgcgatttgcagagtccatgaaacaggaacactcccaccacagtgacctgcctctgcacacagccagaatgtagctgactcctttcttctcccacttgcatgcttccaagccttcaaaacatactcatctccatgttctgtaaattagcaattttttaaaaaataaaaaaataaacaaactcatctctgaaggtccaggtgatttttatgttttacagaaagttttgtgaagagatgacagaaagggttatatcacatccacacagcaataactcctcaaaagcaacttttggccgggcgggaggatcgcttgtgcttaggagtttgagactagcctgggcaacatagcaagtccccgtctctactta

SEQ ID NO: 463120 - DNA, 2500 bp, Homo sapiens
ttcctgtttcgtgtccgctgcgtttgggttccggtctccgcttctccagtggccccggtggctccaccgcagcgtctggcgcgctgggacctgcacaggccggagagagccgtaggcaggaccccgggacaccctggaagccaggaaatgggtagagattttgtcgtaatggataactgttctgtatcctttcatctggactttggtgattaatgctaaatcctatcagatgggactttgaaatattaaatattagtgaattaaatattagtaaagaagttgtcatggaagtaacaataataaatcatatggaagagggactcagtgaaagtaaagaatatgatcaatgtggagaagccttcagtcagattctcaatcttaatctgaacaagaaaattcctactatagtaagaccatgtgaatgtagtttgtgtgggaaagtcttcatgcatcattcatcccttagtaggcacatcagatctcaccttggacacaaaccatatgactatcaggaatatggagagaaaccatataaatgtaagcagtgtgggaaagccttcagttcttgtcaatcctttcgaagacatgaaagaactcacactggtgagaaaccctatgcatgtccggaatgtgggaaagccttcatttctctcccaagtgttcgaagacacatgattaagcacactggagatggaccatataaatgtcaggaatgtgggaaagcctttgatcgcccaagtttatttcagatacatgaaagaactcacactggagagaaaccctatgaatgtcaggaatgtgcaaaagctttcatttctcttccaagttttcaaagacacatgattaggcacactggagatggaccttataaatgtcaggaatgtggaaaagcctttgaccgccccagtttatttcgaatacatgaaagaactcatactggagagaaaccccatgaatgtaaacagtgtgggaaggccttcatttctttcacaaattttcaaagtcatatgattaggcacactggggatggaccttataaatgtaaagtatgtgggagagcctttatttttcccagttatgttcgaaagcatgaaagaactcatactggggagaaaccctatgaatgtaataaatgtggtaaaaccttcagttcttccagtaatgttcgaacacatgaaaggactcacactggagagaagccctatgaatgtaaggaatgcgggaaagccttcatttctctcccaagtgtccgaagacacatgataaagcacactggagatggaccttataaatgtcaggtatgtggtagagcctttgactgtcccagttcatttcaaatacacgaaagaactcacactggagagaaaccctatgaatgtcaggtatgtgggaaagccttcatttctcttaaaaggattagaaaacatatgatactgcacactggagatggaccttataaatgtcaggtatgtggtaaagcctttgactgtcctagttctgtccgaacacatgaaagaactcatactggagaaaaaccctatgaatgtaaagaatgtgggaaagcattcaattatgccagttccattagaatacatgaaagaactcataccggagaaaaaccctatgaatgtaagcaatgtggaaaaacgttcagttattccagttcctttcaaagacatgaaagagctcataatggagataaaccttacgtaaagaatgtgggaaagctttcatttatcacacaaccttcgaatacctgtgaaaatgaatagtggaggacaggtctacaagtatctacatatctaaagaatatggaaagtcttcagtttgctttctgggtttcagacttgtttgggagctcacccctttctcctgtttctcacttttggaataggaatctctatcctgtgcctgtctcatattttggaaatacatgactagtttggttttcaccggttcggagctgaagaagaattttgcctcagcatgaattgagtctcatccatatctgagtgatgtgatattgagatgacactttggagtttgagtttaaacattaggcttcatgctggaattaactgagacttttgaggcctttgggatgagatgaatatattttacatgtgatgacatggattttgggggccagaggtgtaatgttttggctgagtgtatgccacctcagattcatatgttgaaaccttacccccgtgccccccctctcccccacaatgtgatggtatttggaggccctgtctctggtggtttttaggattggaggacatcatgaagatggaggccttgtaattgggattagtttcctgataggaatccctagagagctagctttgcccttcaccatgagagggtgcagtgagaagatagctatctttgaaccgggaagcaggcccttaccagacatggactatgccagtgccttgatattggacttcccagcctcccaaaccatgagaaataaatgtttgttgattaattaaac

SEQ ID NO: 463121 - DNA, 2537 bp, Homo sapiens
ttcctgtttcgtgtccgctgcgtttgggttccggtctccgcttctccagtggccccggtggctccaccgcagcgtctggcgcgctgggacctgcacaggccggagagagccgtaggcaggaccccgggacaccctggaagccaggaaatggactcagtggcctctgaggatgtggctgtgaacttcacacttgaggagtgggctttgctggatccttcccagaagaaactctacagagatgtgatgcgggaaacctttagaaacctggcctgtgtaggaaaaaaatgggaagaccagagcattgaagattggtacaaaaatcaggggagaattttaagaaatcatatggaagagggactcagtgaaagtaaagaatatgatcaatgtggagaagccttcagtcagattctcaatcttaatctgaacaagaaaattcctactatagtaagaccatgtgaatgtagtttgtgtgggaaagtcttcatgcatcattcatcccttagtaggcacatcagatctcaccttggacacaaaccatatgactatcaggaatatggagagaaaccatataaatgtaagcagtgtgggaaagccttcagttcttgtcaatcctttcgaagacatgaaagaactcacactggtgagaaaccctatgcatgtccggaatgtgggaaagccttcatttctctcccaagtgttcgaagacacatgattaagcacactggagatggaccatataaatgtcaggaatgtgggaaagcctttgatcgcccaagtttatttcagatacatgaaagaactcacactggagagaaaccctatgaatgtcaggaatgtgcaaaagctttcatttctcttccaagttttcaaagacacatgattaggcacactggagatggaccttataaatgtcaggaatgtggaaaagcctttgaccgccccagtttatttcgaatacatgaaagaactcatactggagagaaaccccatgaatgtaaacagtgtgggaaggccttcatttctttcacaaattttcaaagtcatatgattaggcacactggggatggaccttataaatgtaaagtatgtgggagagcctttatttttcccagttatgttcgaaagcatgaaagaactcatactggggagaaaccctatgaatgtaataaatgtggtaaaaccttcagttcttccagtaatgttcgaacacatgaaaggactcacactggagagaagccctatgaatgtaaggaatgcgggaaagccttcatttctctcccaagtgtccgaagacacatgataaagcacactggagatggaccttataaatgtcaggtatgtggtagagcctttgactgtcccagttcatttcaaatacacgaaagaactcacactggagagaaaccctatgaatgtcaggtatgtgggaaagccttcatttctcttaaaaggattagaaaacatatgatactgcacactggagatggaccttataaatgtcaggtatgtggtaaagcctttgactgtcctagttctgtccgaacacatgaaagaactcatactggagaaaaaccctatgaatgtaaagaatgtgggaaagcattcaattatgccagttccattagaatacatgaaagaactcataccggagaaaaaccctatgaatgtaagcaatgtggaaaaacgttcagttattccagttcctttcaaagacatgaaagagctcataatggagataaaccttacgtaaagaatgtgggaaagctttcatttatcacacaaccttcgaatacctgtgaaaatgaatagtggaggacaggtctacaagtatctacatatctaaagaatatggaaagtcttcagtttgctttctgggtttcagacttgtttgggagctcacccctttctcctgtttctcacttttggaataggaatctctatcctgtgcctgtctcatattttggaaatacatgactagtttggttttcaccggttcggagctgaagaagaattttgcctcagcatgaattgagtctcatccatatctgagtgatgtgatattgagatgacactttggagtttgagtttaaacattaggcttcatgctggaattaactgagacttttgaggcctttgggatgagatgaatatattttacatgtgatgacatggattttgggggccagaggtgtaatgttttggctgagtgtatgccacctcagattcatatgttgaaaccttacccccgtgccccccctctcccccacaatgtgatggtatttggaggccctgtctctggtggtttttaggattggaggacatcatgaagatggaggccttgtaattgggattagtttcctgataggaatccctagagagctagctttgcccttcaccatgagagggtgcagtgagaagatagctatctttgaaccgggaagcaggcccttaccagacatggactatgccagtgccttgatattggacttcccagcctcccaaaccatgagaaataaatgtttgttgattaattaaac

SEQ ID NO: 463122 - DNA, 2580 bp, Homo sapiens
cagacagagtttcgctctgtcgcccaggctggagtgcagtgggaagatctcagctcactgcaaccttcgccttccgggttcaagcaattctcctgcctcagcctcctgagtaactgggattacaggcatgcgccgccacgaccggctactttttgtatttttggtagaaactgggtttctccatgttggccaggactcagtggcctctgaggatgtggctgtgaacttcacacttgaggagtgggctttgctggatccttcccagaagaaactctacagagatgtgatgcgggaaacctttagaaacctggcctgtgtaggaaaaaaatgggaagaccagagcattgaagattggtacaaaaatcaggggagaattttaagaaatcatatggaagagggactcagtgaaagtaaagaatatgatcaatgtggagaagccttcagtcagattctcaatcttaatctgaacaagaaaattcctactatagtaagaccatgtgaatgtagtttgtgtgggaaagtcttcatgcatcattcatcccttagtaggcacatcagatctcaccttggacacaaaccatatgactatcaggaatatggagagaaaccatataaatgtaagcagtgtgggaaagccttcagttcttgtcaatcctttcgaagacatgaaagaactcacactggtgagaaaccctatgcatgtccggaatgtgggaaagccttcatttctctcccaagtgttcgaagacacatgattaagcacactggagatggaccatataaatgtcaggaatgtgggaaagcctttgatcgcccaagtttatttcagatacatgaaagaactcacactggagagaaaccctatgaatgtcaggaatgtgcaaaagctttcatttctcttccaagttttcaaagacacatgattaggcacactggagatggaccttataaatgtcaggaatgtggaaaagcctttgaccgccccagtttatttcgaatacatgaaagaactcatactggagagaaaccccatgaatgtaaacagtgtgggaaggccttcatttctttcacaaattttcaaagtcatatgattaggcacactggggatggaccttataaatgtaaagtatgtgggagagcctttatttttcccagttatgttcgaaagcatgaaagaactcatactggggagaaaccctatgaatgtaataaatgtggtaaaaccttcagttcttccagtaatgttcgaacacatgaaaggactcacactggagagaagccctatgaatgtaaggaatgcgggaaagccttcatttctctcccaagtgtccgaagacacatgataaagcacactggagatggaccttataaatgtcaggtatgtggtagagcctttgactgtcccagttcatttcaaatacacgaaagaactcacactggagagaaaccctatgaatgtcaggtatgtgggaaagccttcatttctcttaaaaggattagaaaacatatgatactgcacactggagatggaccttataaatgtcaggtatgtggtaaagcctttgactgtcctagttctgtccgaacacatgaaagaactcatactggagaaaaaccctatgaatgtaaagaatgtgggaaagcattcaattatgccagttccattagaatacatgaaagaactcataccggagaaaaaccctatgaatgtaagcaatgtggaaaaacgttcagttattccagttcctttcaaagacatgaaagagctcataatggagataaaccttacgtaaagaatgtgggaaagctttcatttatcacacaaccttcgaatacctgtgaaaatgaatagtggaggacaggtctacaagtatctacatatctaaagaatatggaaagtcttcagtttgctttctgggtttcagacttgtttgggagctcacccctttctcctgtttctcacttttggaataggaatctctatcctgtgcctgtctcatattttggaaatacatgactagtttggttttcaccggttcggagctgaagaagaattttgcctcagcatgaattgagtctcatccatatctgagtgatgtgatattgagatgacactttggagtttgagtttaaacattaggcttcatgctggaattaactgagacttttgaggcctttgggatgagatgaatatattttacatgtgatgacatggattttgggggccagaggtgtaatgttttggctgagtgtatgccacctcagattcatatgttgaaaccttacccccgtgccccccctctcccccacaatgtgatggtatttggaggccctgtctctggtggtttttaggattggaggacatcatgaagatggaggccttgtaattgggattagtttcctgataggaatccctagagagctagctttgcccttcaccatgagagggtgcagtgagaagatagctatctttgaaccgggaagcaggcccttaccagacatggactatgccagtgccttgatattggacttcccagcctcccaaaccatgagaaataaatgtttgttgattaattaaac

SEQ ID NO: 463123 - DNA, 596 bp, Homo sapiens
ttcctgtttcgtgtccgctgcgtttgggttccggtctccgcttctccagtggccccggtggctccaccgcagcgtctggcgcgctgggacctgcacaggccggagagagccgtaggcaggaccccgggacaccctggaagccaggaaatggtgcgtgtgcggggccgggcgcctggagactgggggaggggcttgtgggaaccggccggaaccggctgtggaagcaccctggcctccctgcagcgactccagggtctgggacccgagttccctggcgcagctcggccctctgtcccctcggccgcagggtgggttgggccgtagccagtaccccaggcgtcctgtcccgtccctgcgcggcgactgcggcctcggcctcggagccctgtctgggcagctccgcgcccgcagccccgcctctctccagattgtttgtactgggacacgggagggtcataaggcggaatcccgtctcgggtgtgcggttcgtgcatgggaagagctgtgggctgtggccttcccagtacatcgtctttttttccgggggactggtcttcctccgagtcttccaaacgtactggaaaaagaatctcaaa

SEQ ID NO: 463124 - DNA, 2483 bp, Homo sapiens
ttcctgtttcgtgtccgctgcgtttgggttccggtctccgcttctccagtggccccggtggctccaccgcagcgtctggcgcgctgggacctgcacaggccggagagagccgtaggcaggaccccgggacaccctggaagccaggaaatggactcagtggcctctgaggatgtggctgtgaacttcacacttgaggagtgggctttgctggatccttcccagaagaaactctacagagatgtgatgcgggaaacctttagaaacctggcctgtgtaggaaaaaaatgggaagaccagagcattgaagattggtacaaaaatcaggggagaattttaagaaatcatatggaagagggactcagtgaaagtaaagaatatgatcaatgtggagaagccttcagtcagattctcaatcttaatctgaacaagaaaattcctactatagtaagaccatgtgaatgtagtttgtgtgggaaagtcttcatgcatcattcatcccttagtaggcacatcagatctcaccttggacacaaaccatatgactatcaggaatatggagagaaaccatataaatgtaagcagtgtgggaaagccttcagttcttgtcaatcctttcgaagacatgaaagaactcacactggtgagaaaccctatgcatgtccggaatgtgggaaagccttcatttctctcccaagtgttcgaagacacatgattaagcacactggagatggaccatataaatgtcaggaatgtgggaaagcctttgatcgcccaagtttatttcagatacatgaaagaactcacactggagagaaaccctatgaatgtcaggaatgtgcaaaagctttcatttctcttccaagttttcaaagacacatgattaggcacactggagatggaccttataaatgtcaggaatgtggaaaagcctttgaccgccccagtttatttcgaatacatgaaagaactcatactggagagaaaccccatgaatgtaaacagtgtgggaaggccttcatttctttcacaaattttcaaagtcatatgattaggcacactggggatggaccttataaatgtaaagtatgtgggagagcctttatttttcccagttatgttcgaaagcatgaaagaactcatactggggagaaaccctatgaatgtaataaatgtggtaaaaccttcagttcttccagtaatgttcgaacacatgaaaggactcacactggagagaagccctatgaatgtaaggaatgcgggaaagccttcatttctctcccaagtgtccgaagacacatgataaagcacactggagatggaccttataaatgtcaggtatgtggtagagcctttgactgtcccagttcatttcaaatacacgaaagaactcacactggagagaaaccctatgaatgtcaggtatgtgggaaagccttcatttctcttaaaaggattagaaaacatatgatactgcacactggagatggaccttataaatgtcaggtatgtggtaaagcctttgactgtcctagttctgtccgaacacatgaaagaactcatactggagaaaaaccctatgaatgtaaagaatgtgggaaagcattcaattatgccagttccattagaatacatgaaagaactcataccggagaaaaaccctatgaatgtaagcaatgtggaaaaacgttcagttattccagttcctttcaaagacatgaaagagctcataatggagataaaccttacgtaaagaatgtgggaaagctttcatttatcacacaaccttcgaatacctgtgaaaatcttcagtttgctttctgggtttcagacttgtttgggagctcacccctttctcctgtttctcacttttggaataggaatctctatcctgtgcctgtctcatattttggaaatacatgactagtttggttttcaccggttcggagctgaagaagaattttgcctcagcatgaattgagtctcatccatatctgagtgatgtgatattgagatgacactttggagtttgagtttaaacattaggcttcatgctggaattaactgagacttttgaggcctttgggatgagatgaatatattttacatgtgatgacatggattttgggggccagaggtgtaatgttttggctgagtgtatgccacctcagattcatatgttgaaaccttacccccgtgccccccctctcccccacaatgtgatggtatttggaggccctgtctctggtggtttttaggattggaggacatcatgaagatggaggccttgtaattgggattagtttcctgataggaatccctagagagctagctttgcccttcaccatgagagggtgcagtgagaagatagctatctttgaaccgggaagcaggcccttaccagacatggactatgccagtgccttgatattggacttcccagcctcccaaaccatgagaaataaatgtttgttgattaattaaac

SEQ ID NO: 463125 - DNA, 782 bp, Homo sapiens
tcctgtaatctgtatgattgaaggattgagaggagtattctgcatctttttaaatggcaaaataaactgttcaggtatccactgttaaggtagaggggaatgtggtgttgcaagaagaaaattgccctgctagcacagatatgagaagacaacaactcccagagcatgcagtcagcaccattactttcccttaactccccaaggtgccctccttgcatttatctttctctcctacattgatcttcactggagaataaaaattagagacagtgaggaattgcatgtgatttgtactgggttcctggatccacgccctccttcctagccctgttcctccaggctggctccactgtggccttaataaacagagggtggggggctgatgaagacatgcagagaagacttgactgcagtctgtggtgtgggctggcctgggtacaagtcagcagaggcacattccatcagttggcaatgttatgagcataataacttccttaagtgatacaggttgtagtcttgtagcctaagttctacagagcttctttaaaatgttttctaagcatgttcagcaatggcagtttactattagtaatataaatcatagaccagtcacaatgttgtttctttttaatattcccaattttcttacactaagtctctgaccaatatcaaaaaaaaagattcttcaattcatatcatcctaatctaaatgaataagtctatgaaaaatggctgtttccatattagcttctttggactactttggagcagttttggttttc

SEQ ID NO: 463126 - DNA, 1781 bp, Homo sapiens
cagaaagacaaataagatatggttttgactattgtaaagtctggattttctgattcaaaattcagtatcccagccaggcatggcgtctcatgactgctcctcattaggccacagatgcaccgcggacctgttcttccttttgggttggcaggcgcaaagccccattagcagtaatgtgcaccagtgggactccagggagaggaagaaagctgaaagggctggagttcctgctcctcaactccagccctgtgtgcaccagcaaggttcacccccaagccaccagtgccaaatggaaaaactttattgtcatgtctttgaacacttggcaggaagtaccacgggtgttccaattattaaactaataagcactcgaccttggtcagcccactttctggtgcacgtactcctaagagttggatgcagggaaaattcccgatcatgcatgaggtgcccctttgattgctatattcacgatatggggcagaatgaggatagcagtaatgactttggcagtggctctccaagattcttccgaagggctgtgcgtgcagtgacagacgtagagagagtagtactgcctttgttgcatcattccgcttgttacttaacctgtgaggacacctgccctgagcagagcattacagatgacgcacagaaaaatgccaaccctggttccactggcacaagcttcaccttcattcactggagcctcagcccatagccacccagggaggcaggcagggtggtgttaaccttcccatctcacaaatgagaaaactgaattggcatataaatgatttgtacatggttaagagttaagacttgaacccaggacttctgaccaactccagtacttttttttgcaagaatttatgttctgaaaagatctcaagctaacccacatggcctggacagcagccttttccacttgcctcctccgacctgcagtctgaattccattaccaggacagggcttgccccagggaggggacctccttctagagcattcaatgaagctgcaagattgagaggagtattctgcatctttttaaatggcaaaataaactgttcaggtatccactgttaaggtagaggggaatgtggtgttgcaagaagaaaattgccctgctagcacagatatgagaagacaacaactcccagagcatgcagtcagcaccattactttcccttaactccccaaggtgccctccttgcatttatctttctctcctacattgatcttcactggagaataaaaattagagacagtgaggaattgcatgtgatttgtactgggttcctggatccacgccctccttcctagccctgttcctccaggctggctccactgtggccttaataaacagagggtggggggctgatgaagacatgcagagaagacttgactgcagtctgtggtgtgggctggcctgggtacaagtcagcagaggcacattccatcagttggcaatgttatgagcataataacttccttaagtgatacaggttgtagtcttgtagcctaagttctacagagcttctttaaaatgttttctaagcatgttcagcaatggcagtttactattagtaatataaatcatagaccagtcacaatgttgtttctttttaatattcccaattttcttacactaagtctctgaccaatatcaaaaaaaaagattcttcaattcatatcatcctaatctaaatgaataagtctatgaaaaatggctgtttccatattagcttctttggactactttggagcagttttggttttc

SEQ ID NO: 463127 - DNA, 505 bp, Homo sapiens
atgacgcacagaaaaatgccaaccctggttccactggcacaagcttcaccttcattcactggagcctcagcccatagccacccagggaggcaggcagggtggtgttaaccttcccatctcacaaatgagaaaactgaattggcatataaatgatttgtacatggttaagagttaagacttgaacccaggacttctgaccaactccagtacttttttttgcaagaatttatgttctgaaaagatctcaagctaacccacatggtgaggattgggaagggacatcaaatttgagactacgattaactctcagtttgaagacagctttcatgacatctgggattcccaaagaaccaccagttaccaggctttctgtaagaggcctaagctgagactctcatctccagggataggctaatactaacatcatcaaaacagatatgctgtgtccttcagtttagaaaactgacttcccctgcacagtttcacattgtgctctctacctgga

SEQ ID NO: 463128 - DNA, 455 bp, Homo sapiens
cctcttagatctgtcaaataggaatggtactgtggagctgcaccagctggcgtgtagcctcaacagcctagggtgctgcctagggaatagaggggcttagaaaaagaggtgattcctctacagtgacacaccagaggcaaaaccgaggctcatttctacttgtattaatctctttttttttttcctgtaatctgtatgattgaaggattgagaggagtattctgcatctttttaaatggcaaaataaactgttcaggtatccactgttaaggtagaggggaatgtggtgttgcaagaagaaaattgccctgctagcacagatatgagaagacaacaactcccagagcatgcagtcagcaccattactttcccttaactccccaaggtgccctccttgcatttatctttctctcctacattgatcttcactggagaataaaaattagagacagtga

SEQ ID NO: 463129 - DNA, 4055 bp, Homo sapiens
cgggggcctggacaaaaagacaaatctagggctaggaaaagagggtgagggtgtcagggctgcctagaggagagtgcggtgagcgcaggctctggaggaaagcgtggacttgggagagatcatgttctccctttgctacctgcccactgcaggcaggctcaccctcacagtgattaagtgtcggaacctcaaggcgatggacatcacaggctattcagatccctatgtgaaagtgtccttgctctgtgatgggcggaggctgaagaagaagaaaacaaccataaagaaaaacactctcaatcctgtctacaatgaggccatcatctttgacattcccccggaaaacatggatcaagtcagcctgctcatctcagtcatggactatgatcgagtgggccacaatgagatcataggagtctgtcgtgtggggatcactgctgaaggcctgggcagggaccactggaacgagatgctggcatacccccggaagcccatcgcacactggcactccttggtggaggtaaagaaatccttcaaagagggaaaccctcggttgtgatttcattcacgtggatgctgcaagcagagagactgccacctggagttaggatggcagggccgagctgctagcttcgacagtgagagctcgtgcccatctccgaaaccacctccaacaccatgagatgtgcagccaaataacacaaatgggactcagcaatgttctctttgcacttgttcaaccgtctaaacagtgttgtgcagtcgcagtggcggcagcagcggcagccgtccgtcactccagagtcttacctgctcctgtgtaggtcaaagctgagacacttgtcatgtggtcagatctgtcttagtcttttgtgtctcccaaggtgatgtttttgtggtttttcactttttatgggtctgctggtaagaaaagggaaaaaaaaaaagagtaggaaaagacaaagggtggaaagcccagaagttggttctagaaaatacaaggtacagttttttggaaagaggtggattgagtttctgaaatgctgcgtctccagcaagctccacaaccctggaaaaggaggaggcgtggtgggactgcggctgcattttcagtgccctgcaggaatggggtgaatccatggaagagcctttgtgaggtgaattactagtctttgaagctcttcgctggcaggacataaaccacgctgggaccctcagtcccgtgttgaaatcacaagacctctgaggcgcttgtgagccttcagctgatgtgcagggttcctcgctccccttcctcgctggctttccccatgaattgaaaacgtcttgattcctcatgggaacttagtcactttctttaggaatgattcagttcagccgaaactaaacacgccatatgttttctgatgcgccacagttaatgatcacatttgtttgaaaacaggatctttgtcctcagaaataatcttgattgtaaagtaagagagaaacatatgttctggaatgatttctgcattatacatagctttataattccatgaagtatcaagctgctgtttaaaatgcctaaacagattaaagaaaaacctagattaaatgttcttttccaaatggggagttttgaaatccaaatagcagtttgagtccatctttctatgaagagtatgtttttgattgaaaccgagtcagcgtaagcctatttcagcccctttggctctttgacaatattcatcttaaactttagttctataaattactaagtacttcagtgttgtttgtttcagtggttgtgagggtttcttgtttcctttagatctttaccttaggccaaactcagtttaggaaaaaaaaaattgtttgaactattctgtgttgtaatagcacatttctgttgagttaatagtggtcttcccaccaacccctaaaaccaggttgatttgctcaatctcagtttgtataaccccagtaagcgcatggaggtgagtttctacttcgacttgtggcgacacagtgccagtttcctgagctgtgtgtactacttgcaagaggcaagtctgctgaagaaccccttcttttaacagtggaaaatcaagaacagaaaatctgttcacacacctgtgtcttattctttatatatgctacatggtagaggagcagcgaccaataaagtatccctcattttaaaccaagttgtcagatttctctgctgatagaacgctgcatagtatcttctagccctaaaaatgaccaggttgggcatgagttaacaggatattgtggcaaaaggaattttctgcttagaaaagtaaatgtagataaacctaaactccaccctgtactgagccttaggctagggactcatgtgtaaagatgacttttctccccagatatcttgtcattgacaggccttcctagtctggtagtcctacatttgggtgttctcctgagagtgagaaaaaacccaaggtcatgacaagattcctggcaggtgacagacttcattatgattctgactctagactgaccccatcaagatagtcgtttccgtcagtgaacagatgctgaaggccttgccattacaaaggagacaactgagttccctgggtcataaggagtccagaaattagtgtgagaaggtccttctggaagtgaactcaaaattcatgtccagctgtcatcgttaaacccttaggcaggtgagtataacccattctaacctcttggagaagggagtgtgatcaatgtgaatcacaatagtattgctcatctgagacattcctcttatatccaagcagctatctcccatgagtgaacatcccagtggtttcagaaaatcatgtcctgaacagattctagccagccccacaccaccctggccaactgcaaccgctgctgctctagcagtctgggtcaattcctacaggcttgggagcccaccccagggaggcttttatctcctgcagcctcatccccagcaccctcaaggtagactactcctcagcctgaatcatgaatgaaacctgaacatctgccaacttcattatctagcccagtatctcttccctcacagagaagaagaaaatgaaatacaaagttgatccatttgttggctttctctggccggagaaacctctcgggttgttgctgtgagctttgatgaagttgtgataaccagggccatttgcacataggtttttttaaaaaacatgaaaagttcccttctcctttatttagcagtgtttccgggctgaaagacgccctcctccccctctgcgcttacccaggacgttaattaattgcactgtcatttaaaatattatgttgttaattactcgtttgtgtcttcccacccgtgtcacagcctggagtttttattcaattaaatctctgtctcttgcccatttctcttgtcattttatgttcctggggtttagcagtcaacacacgcacaggacatctcaaagcttttcttctcaatctttgcttcacatggataaccacttcccttctatcagaggtagagcagaacggcttgtttgttttttgttctgtccaaggaatacctgtgtacctcatcaggctggaatccacctgtgttttgtcaggcttgtggctcggagatcatttggcgcacagggctccgctgttccctcagctgttcagctcaacaagcaacccctgcagatgctgaagctcccctagggaagtgggccacacacatctgggaagtacgatgctgtcacccaccagtagagaatcctgctaaccatcgtaaaacacaatttggcaaagccatgggaaaatactattgcagcctcaacatttttttttaaaaaaagaacattctaatgtaatagaatatctctctgctcgcctgcagcttttaattaatttagagagcagtccgtagagaggggagtggaagggaccgtccattcctgcacatctgcatctgaatgaggggtgctccaccgtgagaggcccagtgagctgaactgctgagagcagcactctactgcctgaagaggcagcctccccttgccagtggcttccca

SEQ ID NO: 463130 - DNA, 4034 bp, Homo sapiens
cgggggcctggacaaaaagacaaatctagggctaggaaaagagggtgagggtgtcagggctgcctagaggagagtgcggtgagcgcaggctctggaggaaagcgtggacttgggagagatcatgttctccctttgctacctgcccactgcaggcaggctcaccctcacagtgattaagtgtcggaacctcaaggcgatggacatcacaggctattcagatccctatgtgaaagtgtccttgctctgtgatgggcggaggctgaagaagaagaaaacaaccataaagaaaaacactctcaatcctgtctacaatgaggccatcatctttgacattcccccggaaaacatggatcaagtcagcctgctcatctcagtcatggactatgatcgagtgggccacaatgagatcataggagtctgtcgtgtggggatcactgctgaaggcctgggcagggaccactggaacgagatgctggcatacccccggaagcccatcgcacactggcactccttggtggagggaaaccctcggttgtgatttcattcacgtggatgctgcaagcagagagactgccacctggagttaggatggcagggccgagctgctagcttcgacagtgagagctcgtgcccatctccgaaaccacctccaacaccatgagatgtgcagccaaataacacaaatgggactcagcaatgttctctttgcacttgttcaaccgtctaaacagtgttgtgcagtcgcagtggcggcagcagcggcagccgtccgtcactccagagtcttacctgctcctgtgtaggtcaaagctgagacacttgtcatgtggtcagatctgtcttagtcttttgtgtctcccaaggtgatgtttttgtggtttttcactttttatgggtctgctggtaagaaaagggaaaaaaaaaaagagtaggaaaagacaaagggtggaaagcccagaagttggttctagaaaatacaaggtacagttttttggaaagaggtggattgagtttctgaaatgctgcgtctccagcaagctccacaaccctggaaaaggaggaggcgtggtgggactgcggctgcattttcagtgccctgcaggaatggggtgaatccatggaagagcctttgtgaggtgaattactagtctttgaagctcttcgctggcaggacataaaccacgctgggaccctcagtcccgtgttgaaatcacaagacctctgaggcgcttgtgagccttcagctgatgtgcagggttcctcgctccccttcctcgctggctttccccatgaattgaaaacgtcttgattcctcatgggaacttagtcactttctttaggaatgattcagttcagccgaaactaaacacgccatatgttttctgatgcgccacagttaatgatcacatttgtttgaaaacaggatctttgtcctcagaaataatcttgattgtaaagtaagagagaaacatatgttctggaatgatttctgcattatacatagctttataattccatgaagtatcaagctgctgtttaaaatgcctaaacagattaaagaaaaacctagattaaatgttcttttccaaatggggagttttgaaatccaaatagcagtttgagtccatctttctatgaagagtatgtttttgattgaaaccgagtcagcgtaagcctatttcagcccctttggctctttgacaatattcatcttaaactttagttctataaattactaagtacttcagtgttgtttgtttcagtggttgtgagggtttcttgtttcctttagatctttaccttaggccaaactcagtttaggaaaaaaaaaattgtttgaactattctgtgttgtaatagcacatttctgttgagttaatagtggtcttcccaccaacccctaaaaccaggttgatttgctcaatctcagtttgtataaccccagtaagcgcatggaggtgagtttctacttcgacttgtggcgacacagtgccagtttcctgagctgtgtgtactacttgcaagaggcaagtctgctgaagaaccccttcttttaacagtggaaaatcaagaacagaaaatctgttcacacacctgtgtcttattctttatatatgctacatggtagaggagcagcgaccaataaagtatccctcattttaaaccaagttgtcagatttctctgctgatagaacgctgcatagtatcttctagccctaaaaatgaccaggttgggcatgagttaacaggatattgtggcaaaaggaattttctgcttagaaaagtaaatgtagataaacctaaactccaccctgtactgagccttaggctagggactcatgtgtaaagatgacttttctccccagatatcttgtcattgacaggccttcctagtctggtagtcctacatttgggtgttctcctgagagtgagaaaaaacccaaggtcatgacaagattcctggcaggtgacagacttcattatgattctgactctagactgaccccatcaagatagtcgtttccgtcagtgaacagatgctgaaggccttgccattacaaaggagacaactgagttccctgggtcataaggagtccagaaattagtgtgagaaggtccttctggaagtgaactcaaaattcatgtccagctgtcatcgttaaacccttaggcaggtgagtataacccattctaacctcttggagaagggagtgtgatcaatgtgaatcacaatagtattgctcatctgagacattcctcttatatccaagcagctatctcccatgagtgaacatcccagtggtttcagaaaatcatgtcctgaacagattctagccagccccacaccaccctggccaactgcaaccgctgctgctctagcagtctgggtcaattcctacaggcttgggagcccaccccagggaggcttttatctcctgcagcctcatccccagcaccctcaaggtagactactcctcagcctgaatcatgaatgaaacctgaacatctgccaacttcattatctagcccagtatctcttccctcacagagaagaagaaaatgaaatacaaagttgatccatttgttggctttctctggccggagaaacctctcgggttgttgctgtgagctttgatgaagttgtgataaccagggccatttgcacataggtttttttaaaaaacatgaaaagttcccttctcctttatttagcagtgtttccgggctgaaagacgccctcctccccctctgcgcttacccaggacgttaattaattgcactgtcatttaaaatattatgttgttaattactcgtttgtgtcttcccacccgtgtcacagcctggagtttttattcaattaaatctctgtctcttgcccatttctcttgtcattttatgttcctggggtttagcagtcaacacacgcacaggacatctcaaagcttttcttctcaatctttgcttcacatggataaccacttcccttctatcagaggtagagcagaacggcttgtttgttttttgttctgtccaaggaatacctgtgtacctcatcaggctggaatccacctgtgttttgtcaggcttgtggctcggagatcatttggcgcacagggctccgctgttccctcagctgttcagctcaacaagcaacccctgcagatgctgaagctcccctagggaagtgggccacacacatctgggaagtacgatgctgtcacccaccagtagagaatcctgctaaccatcgtaaaacacaatttggcaaagccatgggaaaatactattgcagcctcaacatttttttttaaaaaaagaacattctaatgtaatagaatatctctctgctcgcctgcagcttttaattaatttagagagcagtccgtagagaggggagtggaagggaccgtccattcctgcacatctgcatctgaatgaggggtgctccaccgtgagaggcccagtgagctgaactgctgagagcagcactctactgcctgaagaggcagcctccccttgccagtggcttccca

SEQ ID NO: 463131 - DNA, 4004 bp, Homo sapiens
cgggggcctggacaaaaagacaaatctagggctaggaaaagagggtgagggtgtcagggctgcctagaggagagtgcggtgagcgcaggctctggaggaaagcgtggacttgggagagatcatgttctccctttgctacctgcccactgcaggcaggctcaccctcacagtgattaagtgtcggaacctcaaggcgatggacatcacaggctattcagatccctatgtgaaagtgtccttgctctgtgatgggcggaggctgaagaagaagaaaacaaccataaagaaaaacactctcaatcctgtctacaatgaggccatcatctttgacattcccccagtgggccacaatgagatcataggagtctgtcgtgtggggatcactgctgaaggcctgggcagggaccactggaacgagatgctggcatacccccggaagcccatcgcacactggcactccttggtggaggtaaagaaatccttcaaagagggaaaccctcggttgtgatttcattcacgtggatgctgcaagcagagagactgccacctggagttaggatggcagggccgagctgctagcttcgacagtgagagctcgtgcccatctccgaaaccacctccaacaccatgagatgtgcagccaaataacacaaatgggactcagcaatgttctctttgcacttgttcaaccgtctaaacagtgttgtgcagtcgcagtggcggcagcagcggcagccgtccgtcactccagagtcttacctgctcctgtgtaggtcaaagctgagacacttgtcatgtggtcagatctgtcttagtcttttgtgtctcccaaggtgatgtttttgtggtttttcactttttatgggtctgctggtaagaaaagggaaaaaaaaaaagagtaggaaaagacaaagggtggaaagcccagaagttggttctagaaaatacaaggtacagttttttggaaagaggtggattgagtttctgaaatgctgcgtctccagcaagctccacaaccctggaaaaggaggaggcgtggtgggactgcggctgcattttcagtgccctgcaggaatggggtgaatccatggaagagcctttgtgaggtgaattactagtctttgaagctcttcgctggcaggacataaaccacgctgggaccctcagtcccgtgttgaaatcacaagacctctgaggcgcttgtgagccttcagctgatgtgcagggttcctcgctccccttcctcgctggctttccccatgaattgaaaacgtcttgattcctcatgggaacttagtcactttctttaggaatgattcagttcagccgaaactaaacacgccatatgttttctgatgcgccacagttaatgatcacatttgtttgaaaacaggatctttgtcctcagaaataatcttgattgtaaagtaagagagaaacatatgttctggaatgatttctgcattatacatagctttataattccatgaagtatcaagctgctgtttaaaatgcctaaacagattaaagaaaaacctagattaaatgttcttttccaaatggggagttttgaaatccaaatagcagtttgagtccatctttctatgaagagtatgtttttgattgaaaccgagtcagcgtaagcctatttcagcccctttggctctttgacaatattcatcttaaactttagttctataaattactaagtacttcagtgttgtttgtttcagtggttgtgagggtttcttgtttcctttagatctttaccttaggccaaactcagtttaggaaaaaaaaaattgtttgaactattctgtgttgtaatagcacatttctgttgagttaatagtggtcttcccaccaacccctaaaaccaggttgatttgctcaatctcagtttgtataaccccagtaagcgcatggaggtgagtttctacttcgacttgtggcgacacagtgccagtttcctgagctgtgtgtactacttgcaagaggcaagtctgctgaagaaccccttcttttaacagtggaaaatcaagaacagaaaatctgttcacacacctgtgtcttattctttatatatgctacatggtagaggagcagcgaccaataaagtatccctcattttaaaccaagttgtcagatttctctgctgatagaacgctgcatagtatcttctagccctaaaaatgaccaggttgggcatgagttaacaggatattgtggcaaaaggaattttctgcttagaaaagtaaatgtagataaacctaaactccaccctgtactgagccttaggctagggactcatgtgtaaagatgacttttctccccagatatcttgtcattgacaggccttcctagtctggtagtcctacatttgggtgttctcctgagagtgagaaaaaacccaaggtcatgacaagattcctggcaggtgacagacttcattatgattctgactctagactgaccccatcaagatagtcgtttccgtcagtgaacagatgctgaaggccttgccattacaaaggagacaactgagttccctgggtcataaggagtccagaaattagtgtgagaaggtccttctggaagtgaactcaaaattcatgtccagctgtcatcgttaaacccttaggcaggtgagtataacccattctaacctcttggagaagggagtgtgatcaatgtgaatcacaatagtattgctcatctgagacattcctcttatatccaagcagctatctcccatgagtgaacatcccagtggtttcagaaaatcatgtcctgaacagattctagccagccccacaccaccctggccaactgcaaccgctgctgctctagcagtctgggtcaattcctacaggcttgggagcccaccccagggaggcttttatctcctgcagcctcatccccagcaccctcaaggtagactactcctcagcctgaatcatgaatgaaacctgaacatctgccaacttcattatctagcccagtatctcttccctcacagagaagaagaaaatgaaatacaaagttgatccatttgttggctttctctggccggagaaacctctcgggttgttgctgtgagctttgatgaagttgtgataaccagggccatttgcacataggtttttttaaaaaacatgaaaagttcccttctcctttatttagcagtgtttccgggctgaaagacgccctcctccccctctgcgcttacccaggacgttaattaattgcactgtcatttaaaatattatgttgttaattactcgtttgtgtcttcccacccgtgtcacagcctggagtttttattcaattaaatctctgtctcttgcccatttctcttgtcattttatgttcctggggtttagcagtcaacacacgcacaggacatctcaaagcttttcttctcaatctttgcttcacatggataaccacttcccttctatcagaggtagagcagaacggcttgtttgttttttgttctgtccaaggaatacctgtgtacctcatcaggctggaatccacctgtgttttgtcaggcttgtggctcggagatcatttggcgcacagggctccgctgttccctcagctgttcagctcaacaagcaacccctgcagatgctgaagctcccctagggaagtgggccacacacatctgggaagtacgatgctgtcacccaccagtagagaatcctgctaaccatcgtaaaacacaatttggcaaagccatgggaaaatactattgcagcctcaacatttttttttaaaaaaagaacattctaatgtaatagaatatctctctgctcgcctgcagcttttaattaatttagagagcagtccgtagagaggggagtggaagggaccgtccattcctgcacatctgcatctgaatgaggggtgctccaccgtgagaggcccagtgagctgaactgctgagagcagcactctactgcctgaagaggcagcctccccttgccagtggcttccca

SEQ ID NO: 463132 - DNA, 925 bp, Homo sapiens
ggagggcacaacagctgctacctgaacagtttctgacccaacagttacccagcgccggactcgctgcgccccggcggctctagggacccccggcgcctacacttagctccgcgcccgagagaatgttggaccgacgacacaagacctcagacttgtgttattctagcagctgaacacaccccaggctcttctgcccggcagtggctctggaagcagtctggtgtatagagttatggattcactaccagattctactgtatgctcttgacaactatgaccacaatggtccacccacaaatgaattatcaggagtgaacccagaggcacgtatgaatgaaaggcacataaacaaatatatccatccatccatccatgcatccatccgtacacacttctctcaaacacatccactaacaaatccatgcatacagtggaaacatacaacaaggagacagacggccggacatttgtggagtttattctgggaagcctgcgtggccatagagagtggtttttaacaggatttccaattcttctcctagtagcctttggagaaggagataggagtggacaaagatcagagaaatcccagccaaaacaaagaacagagctaataaccctggaattatttcaccccctccagagctctaccgttattcctgatccgactgacctggcgggagtcatcattgagctcggccccaatgacagtccacagacaagtgaatttaaaggagcaaccgaggaggcacctgcgaaagaaagcccacacacaagtgaatttaaaggagcagcccgggtgtcacctatcagtgaaagctattacctcattgaattaaaaagagtaatgtgtggtagagtcatcaatgatgggtgaaatttcaaaatacggagagaaagaagagaggcatatattaagattggt

SEQ ID NO: 463133 - DNA, 842 bp, Homo sapiens
atctggtacctggctttggggtgattagggagaatctggtgttgggaaaactgctgccattaatcaaatgcttgaaaagctagagggtccaggagcatttgacataaaacatggttcaattttaggagacaccctattatatagtgaaataaaaaaatcaagtagcctaaaacagaatatcaccatcttgattcctgaaactcataagacagcaactggaagttcagataatcccactaaaaagccagaagttagaactaataaaaagttacttaaaaataatgatcataaaggagttgtagtctctacaataaattttagcaccaatgtaacagctgccaaaaccaaggagatgattcttaagaagttaataagaagaactaaagatactcttggagcaccaaaaaacaaccggattctaatatttattgatgatatgaatatgccagtatcagatatgtatggagcacagccacccctggaattgataagacaattgttagatttgggaggagtttatgatactgaaaaaaatacatggaagaatattcaagatctgtctatagttgcagcttgtgttccagttgtgaatgatatcagcccacgtcttctcaaacacttttccatgctggtattacctcatccttcacaagacatcttatgtactattttccagaggagctcaacagcagatttaacatggcagaaaagagaatccacaaacttaaaaatagatctataaaatttatctacactgaacaagagaaagaaaaaaaatgaagaaaaagaacatcaaagacctaaaagacactatcaagtgtatcaaaatatgcttaatgggg

SEQ ID NO: 463134 - DNA, 1925 bp, Homo sapiens
gcatgttgctggggtttggtgtacaaatgatttcatcacccagctagtgagcatagtccccagcaggagaaaaatgaggttttatgaatcaatcataacatttttacctcaacaggtcagagattgtcgtctgactggtcttcttgatcttgcactggagaaggattacgtgcgttctaagattgccgaatatatgaaccatctcattgacattggtgttgcagggttcagacttgatgcttccaagcacatgtggcctggagacataaaggcaattttggacaaactgcataatctaaacagtaactggttccctgcaggaagtaaacctttcatttaccaggaggtaattgatctgggtggtgagccaattaaaagcagtgactactttggtaatggccgggtgacagaattcaagtatggtgcaaaactcggcacagttattcgcaagaactggggagaaggttggggtttcgtaccttctgacagagcgcttgtctttgtggataaccatgacaatcaacgaggacatggggctggaggagcctctattcttaccttctgggatgctaggctgtacaaaatggcagttggatttatgcttgctcatccttacggatttacacgagtaatgtcaagctaccgttggccaagacagtttcaaaatggaaacgatgttaatgattgggttgggccaccaaataataatggagtaattaaagaagttactattaatccagacactacttgtggcaatgactgcgtctgtgaacatcgatggcgccaaataaggaacatggttattttccgcaatgtagtggatggccagccttttacaaattggtatgataatgggagcaaccaagtggcttttgggagaggaaacagaggattcattgttttcaacaatgatgactggtcatttactttaactgtgcaaactggtcttcctgctggcacatactgtgatgtcatttctggagataaaattaatggcaattgcacaggcattaaaatttacgtttctgatgatggcaaagctcatttttctattagtaactctgctgaagatccatttattgcaattcatgctgaatctaaattgtaaaatttaaaattaaatgcatgtcctcaaaacaatagccaagtgtgtttcttttcttacatgtacagcagtacttatatttcattaatttttactaaaagctctaattagtaattagaggttcaaaaaagttgatagtgtgaaacacaattccaggttacacagaagttatttattttggcaaaaggatgtctcagaaattttaaaactaggcaacaacctttactcattaagagggaagacttagctttccaaacagtctgtctcctgtctactcttttctctccttggcagtctaccaacaaggcaaaccaaatatttcattattcttctctattacatgaaaaatctgtacaagggaaagaaaaccaaattttacccttacattggtttcaaaacattcctttttccataggcaacgtttacatttttatgcctttttataatcttttatgacaaacacattttactgtttttacacacattttacacactttgcatgtaaatttatttttagttgtcttatttacatgttttaatggtaaatcttaactttgccattttagttaaaatggtaactttaatgtaaaacctgaatccaaaacaataattaaaaacataatcatttggttttcaaaagctttttgcatctctagaaagttaatatagagtcttataaaacttttagctaattcaaaaacaaatcacacatatataattgaagcaaactttgtttggtagacttcttcgaaccacagaaatttcagttatggcatggtaggtcttttgaaatgtttcattttttatatttggagatgca

SEQ ID NO: 463135 - DNA, 1955 bp, Homo sapiens
gcatgttgctggggtttggtgtacaaatgatttcatcacccagctagtgagcatagtccccagcaggagaaaaatgaggttttatgaatcaatcataacatttttacctcaacaggtcagagattgtcgtctgactggtcttcttgatcttgcactggagaaggattacgtgcgttctaagattgccgaatatatgaaccatctcattgacattggtgttgcagggttcagacttgatgcttccaagcacatgtggcctggagacataaaggcaattttggacaaactgcataatctaaacagtaactggttccctgcaggaagtaaacctttcatttaccaggaggtaattgatctgggtggtgagccaattaaaagcagtgactactttggtaatggccgggtgacagaattcaagtatggtgcaaaactcggcacagttattcgcaagtggaatggagagaagatgtcttacttaaagaactggggagaaggttggggtttcgtaccttctgacagagcgcttgtctttgtggataaccatgacaatcaacgaggacatggggctggaggagcctctattcttaccttctgggatgctaggctgtacaaaatggcagttggatttatgcttgctcatccttacggatttacacgagtaatgtcaagctaccgttggccaagacagtttcaaaatggaaacgatgttaatgattgggttgggccaccaaataataatggagtaattaaagaagttactattaatccagacactacttgtggcaatgactgcgtctgtgaacatcgatggcgccaaataaggaacatggttattttccgcaatgtagtggatggccagccttttacaaattggtatgataatgggagcaaccaagtggcttttgggagaggaaacagaggattcattgttttcaacaatgatgactggtcatttactttaactgtgcaaactggtcttcctgctggcacatactgtgatgtcatttctggagataaaattaatggcaattgcacaggcattaaaatttacgtttctgatgatggcaaagctcatttttctattagtaactctgctgaagatccatttattgcaattcatgctgaatctaaattgtaaaatttaaaattaaatgcatgtcctcaaaacaatagccaagtgtgtttcttttcttacatgtacagcagtacttatatttcattaatttttactaaaagctctaattagtaattagaggttcaaaaaagttgatagtgtgaaacacaattccaggttacacagaagttatttattttggcaaaaggatgtctcagaaattttaaaactaggcaacaacctttactcattaagagggaagacttagctttccaaacagtctgtctcctgtctactcttttctctccttggcagtctaccaacaaggcaaaccaaatatttcattattcttctctattacatgaaaaatctgtacaagggaaagaaaaccaaattttacccttacattggtttcaaaacattcctttttccataggcaacgtttacatttttatgcctttttataatcttttatgacaaacacattttactgtttttacacacattttacacactttgcatgtaaatttatttttagttgtcttatttacatgttttaatggtaaatcttaactttgccattttagttaaaatggtaactttaatgtaaaacctgaatccaaaacaataattaaaaacataatcatttggttttcaaaagctttttgcatctctagaaagttaatatagagtcttataaaacttttagctaattcaaaaacaaatcacacatatataattgaagcaaactttgtttggtagacttcttcgaaccacagaaatttcagttatggcatggtaggtcttttgaaatgtttcattttttatatttggagatgca

SEQ ID NO: 463136 - DNA, 1780 bp, Homo sapiens
tggacaccaacaaggacgacccagagctgatgctgggccgcatgcgctgcctcgaggccttgggggaatgtgcattgacaaggccagggacctgctggatgctgaattaactgcaatggcaggagagagttacagtcgggcatatggggtaagtgtcaactattctgcacattgtcatttttgaggcttatttccatacttttttcagaatgggctattgagaacttacaggctgctggaaacatgcctgttttctctgatcggcagataccctgacaccagaaggaatgatttaaattaatcctgtcttttggattgttcgtgcagtaattagtttggaatgcgatttgcttccatcaggccatggtttcttgccacatgctgtccgagctggaggaggttatccagtacaaacttgtccccgagcgacgagagatcatccgccagatctggtgggagagactgcagggctgccagcgtatcgtagaggactggcagaaaatccttatggtgcggtcccttgtggtcagccctcatgaagacatgagaacctggctcaagtatgcaagcctgtgcggcaagagtggcaggctggctcttgctcataaaactttagtgttgctcctgggagttgatccgtctcggcaacttgaccatcctctgccaacagttcaccctcaggtgacctatgcctacatgaaaaacatgtggaagagtgcccgcaagatcgatgccttccagcacatgcagcattttgtccagaccatgcagcaacaggcccagcatgccatcgctactgaggaccagcagcataagcaggaactgcacaagctcatggcccgatgcttcctgaaacttggagagtggcagctgaatctacagggcatcaatgagagcacaatccccaaagtgctgcagtactacagcgccgccacagagcacgaccgcagctggtacaaggtgatcagaagcaggccacctgtgagacccagcaccctggctggctcgtgtcctcctgtgtgctcgtggttacagctgagcttctgcggagctaggctgatgctgtgaacttactccttgagtccctggagcctatctataagaggcccagggagcctgcatttccccctacaagtttaattaatacagaaagattattggagaaatacttgttacaccattattatgtgtatgtggtgttggggattgctgctgtcttacagactctgagctgcttgttttcctgggagcatctggacacatggttaatctctggagtgacatcttcccttaggtcatctgttcttgttcagcgtttttctgatttgcatccttgcctgctcctcagctaagaacttaactttctttgtttttattggaaagatccaagtaacatcctgttatgttacaggaaacttttgaaagagataaacagaattagaaaatatataaaagatgtgattgatggaggggtgatttttggaagtgtatatctttggtgagaatatactttcttatttctttttgagaggctttctggtaactacttggtgtggcagatgtcattgacatctttccagtatttccttggcttgccaatactttgtgaattaatctctctgaaatctaaacttgtatctgaggactgcagaagcacttataatacagatcttacctttgtttaggcatgcttcattctggtttgaaaaatgtccattttgtcataagagtaatactctctctaggacagcttgcatgtccaaagctggaaaatacatcc

SEQ ID NO: 463137 - DNA, 1198 bp, Homo sapiens
ctgtccgtcgctttatatcaggaaacggttttcactattatttcttattgactgatcgctcactctgactctgtatctaaattaaccaattgtcagtagtttaggctgtgcggtctaaccctaaccaataggggaacaacacagcagcagaggccacgtgcatcaggacctcttctccttggcacaacagtgcattgacaaggccagggacctgctggatgctgaattaactgcaatggcaggagagagttacagtcgggcatatggggtaagtgtcaactattctgcacattgtcatttttgaggcttatttccatacttttttcagaatgggctattgagaacttacaggctgctggaaacatgcctgttttctctgatcggcagataccctgacaccagaaggaatgatttaaattaatcctgtcttttggattgttcgtgcagtaattagtttggaatgcgatttgcttccatcaggccatggtttcttgccacatgctgtccgagctggaggaggttatccagtacaaacttgtccccgagcgacgagagatcatccgccagatctggtgggagagactgcagggctgccagcgtatcgtagaggactggcagaaaatccttatggtgcggtcccttgtggtcagccctcatgaagacatgagaacctggctcaagtatgcaagcctgtgcggcaagagtggcaggctggctcttgctcataaaactttagtgttgctcctgggagttgatccgtctcggcaacttgaccatcctctgccaacagttcaccctcaggtgacctatgcctacatgaaaaacatgtggaagagtgcccgcaaggtctgtatcccaatgcatccagaacagaccaccttctccagaatgctcgcctaatctgcttcgctctgcctctttaaggccagaaaagaaacagtgtttaaaccacctactcacaatgtcagggagtctcttcctgttacaaagctatttggcctgatttcatagagtgaatcatagttgaggagatggtgtgtataccattgatcaaaccaatgaatgtgatcacagttatatgtatttgtatctagaaagtgctgggacatagaaagggcacactttctacccctaagagaagatggactgtttggtacaaaaaagagcagatttgtaaatacacagactagaactttca

SEQ ID NO: 463138 - DNA, 986 bp, Homo sapiens
ctgtccgtcgctttatatcaggaaacggttttcactattatttcttattgactgatcgctcactctgactctgtatctaaattaaccaattgtcagtagtttaggctgtgcggtctaaccctaaccaataggggaacaacacagcagcagaggccacgtgcatcaggacctcttctccttggcacaacagtgcattgacaaggccagggacctgctggatgctgaattaactgcaatggcaggagagagttacagtcgggcatatggggccatggtttcttgccacatgctgtccgagctggaggaggttatccagtacaaacttgtccccgagcgacgagagatcatccgccagatctggtgggagagactgcagggctgccagcgtatcgtagaggactggcagaaaatccttatggtgcggtcccttgtggtcagccctcatgaagacatgagaacctggctcaagtatgcaagcctgtgcggcaagagtggcaggctggctcttgctcataaaactttagtgttgctcctgggagttgatccgtctcggcaacttgaccatcctctgccaacagttcaccctcaggtgacctatgcctacatgaaaaacatgtggaagagtgcccgcaaggtctgtatcccaatgcatccagaacagaccaccttctccagaatgctcgcctaatctgcttcgctctgcctctttaaggccagaaaagaaacagtgtttaaaccacctactcacaatgtcagggagtctcttcctgttacaaagctatttggcctgatttcatagagtgaatcatagttgaggagatggtgtgtataccattgatcaaaccaatgaatgtgatcacagttatatgtatttgtatctagaaagtgctgggacatagaaagggcacactttctacccctaagagaagatggactgtttggtacaaaaaagagcagatttgtaaatacacagactagaactttca

SEQ ID NO: 463139 - DNA, 1619 bp, Homo sapiens
gcaattagaaagcaatgaagatgatacatgctgtgctgtcggtcattctggcactgccgcccacctgagatgtccatcctgtgtctgagcacctttgtagttattgtgtgtggcgtggccctggtggcagtttttctctttctcttttggaagctgtgctggatgccctggaggaacaaggaggcctccagtccctcttctgctaatccccccttggaagccctccagagccccagcttcagaggcaacatggcggacaagctgaaggaccccagcaccctgggcttcctggaggcggccgtgaagatcagccacacgtccccagatatcccagctgaggtgcagatgtcggtcaaggagcacatcatgcgtcacacccggctgcagcggcaaactacagagccagcgtcatccaccaggcacacgtccttcaagcgccacctgccaaggcagatgcatgtctccagtgtagactatggcaatgagcttccaccagcagcagagcagcccaccagcattggccgcatcaagcctgagctctacaagcagaagtcggtggatggggaggatgccaagtctgaggccaccaagagctgcgggaagatcaacttcagcctacgctacgattacgagaccgagaccctgattgtgcgtatcctgaaggcttttgacctccctgccaaggacttttgtgggaagctcttgacccttatgtcaagatctacctcctgcctggaccgcaaatgcaagctgcagacccgggttgcaccgcaaggaccctggaaccccacctttgatgagaacttccacttccctgtgccctatgaggagctggctgaccgcaagctgcatctcagtgtcttcgactttgaccgcttctcccgccatgacatgattggcgaggtcatcctggacaacctctttgaggcctctgacctgtctcgggaaacctccatctggaaggatatccaatatgccacaagtgtgcaggagtttcccaagctgcagagccccacccatgctcagacagcctgtcttaccgtctgtctgagctggatgttccttctcaagtgagtcccctgccaccctccaacccacagccccaccagcaggtagagttctcaggagcaggctcatcaccctgccagtccaggtcatctgttctgactggttgttggacattattattcattttttatttcttgtcttggctatgccatgtgttttctgtgtgaccttgaaaaagtgactttccatctctgggctgcattttcctcagtattaaaccatctctagaatcctgtaattctcagcttctcccatggagaagttcttggctctcatgctttcacagaacagagctacccattctccgggagtgtggtctccacagcagaggccgaaaccccacagtgataagccactgggcagaatttccagacatccccactctttccttaaatatcaaagagtcaggcctctcttcaagcccgtggggaatgtcctctaggaggtttctgccacaggggaggccccatcaacaacccttcctcctctttttcccatgagccacattcctatgctggcactcagctccctcccttccatctcctttctga

SEQ ID NO: 463140 - DNA, 783 bp, Homo sapiens
aggcatttggaagatgaaaagcttgtcagacttttcgaagaaagtggtctttgagccgagacgggtgattctggacaaggattaagaatgtggatcaagcaggttttaaatcaagatttaacattccaacacataaaaattatttatccaacagctcctcccagatcatatactcctatgaaaggaggaatctccaatgtatggtttgacagatttaaaataaccaatgactgcccagaacaccttgaatcaattgatgtcatgtgtcaagtgcttactgatttgattgatgaagaagtaaaaagtggcatcaagaagaacaggatattaataggaggattctctatgggaggatgcatggcaatgcatttagcatatagaaatcatcaagatgtggcaggagtatttgctctttctagttttctgaataaagcatctgctgtttaccaggctcttcagaagagtaatggtgtacttcctgaattatttcagtgtcatggtactgcagatgagttagttcttcattcttgggcagaagagacaaactcaatgttaaaatctctaggagtgaccacgaagtttcatagttttccaaatgtttaccatgagctaagcaaaactgagttagacatattgaagttatggattcttacaaagctgccaggagaaatggaaaaacaaaaatgaatgaatcaagagtgatttgttaatgtaagtgtaatgtctttgtgaaaagtgatttttactgccaaattataatgataattaaaatattaagaaata

SEQ ID NO: 463141 - DNA, 676 bp, Homo sapiens
aggggcggaaccgcatgactggcagtggcatcagcgatggcggctgcgtcggggtcggttctgcagcgctgtatcgtgtcgccggcagggaggcatagcgcctctctgatcttcctgcatggctcaggtgattctggacaaggattaagaatgtggatcaagcaggttttaaatcaagatttaacattccaacacataaaaattatttatccaacagctcctcccaggaggattctctatgggaggatgcatggcaatgcatttagcatatagaaatcatcaagatgtggcaggagtatttgctctttctagttttctgaataaagcatctgctgtttaccaggctcttcagaagagtaatggtgtacttcctgaattatttcagtgtcatggtactgcagatgagttagttcttcattcttgggcagaagagacaaactcaatgttaaaatctctaggagtgaccacgaagtttcatagttttccaaatgtttaccatgagctaagcaaaactgagttagacatattgaagttatggattcttacaaagctgccaggagaaatggaaaaacaaaaatgaatgaatcaagagtgatttgttaatgtaagtgtaatgtctttgtgaaaagtgatttttactgccaaattataatgataattaaaatattaagaaata

SEQ ID NO: 463142 - DNA, 584 bp, Homo sapiens
catttttaagacgtcctctatagaataaatgtaagtgacacacagttacaaattgagtgatgccaggaaccagctaagtccccaggcctggcccaccaatgtatacctcagacagcactccctctgccttttttttcccattagttattgaagccttggtaaaattggaattttcctgttctctctgatttctaagaatgatcttaaatggaatttcttaaacttttctgtctttgtatcttcttctctaggctcttcagaagagtaatggtgtacttcctgaattatttcagtgtcatggtactgcagatgagttagttcttcattcttgggcagaagagacaaactcaatgttaaaatctctaggagtgaccacgaagtttcatagttttccaaatgtttaccatgagctaagcaaaactgagttagacatattgaagttatggattcttacaaagctgccaggagaaatggaaaaacaaaaatgaatgaatcaagagtgatttgttaatgtaagtgtaatgtctttgtgaaaagtgatttttactgccaaattataatgataattaaaatattaagaaata

SEQ ID NO: 463143 - DNA, 440 bp, Homo sapiens
agtaggtaaagaggatatgaactggcattagtagattttaatggattagatacaagtatgggatagttaatacaatatacatgagagtagttttaatatgcatttaacttataaaacttagaagaaattgaaatcatttattcaaaacactattattttggtaattaaagcatccattttcatattcccttttcctttctttttttttgggggggggcggttgttaaacagatcatatactcctatgaaaggaggaatctccaatgtatggtttgacagatttaaaataaccaatgactgcccagaacaccttgaatcaattgatgtcatgtgtcaagtgcttactgatttgattgatgaagaagtaaaaagtggcatcaagaagaacaggatattaatagataaggactccactggcactcatagtctctgggtgaaga

SEQ ID NO: 463144 - DNA, 2137 bp, Homo sapiens
aggggcggaaccgcatgactggcagtggcatcagcgatggcggctgcgtcggggtcggttctgcagcgctgtatcgtgtcgccggcagggaggcatagcgcctctctgatcttcctgcatggctcaggtgattctggacaaggattaagaatgtggatcaagcaggttttaaatcaagatttaacattccaacacataaaaattatttatccaacagctcctcccagatcatatactcctatgaaaggaggaatctccaatgtatggtttgacagatttaaaataaccaatgactgcccagaacaccttgaatcaattgatgtcatgtgtcaagtgcttactgatttgattgatgaagaagtaaaaagtggcatcaagaagaacaggatattaataggaggattctctatgggaggatgcatggcaatgcatttagcatatagaaatcatcaagatgtggcaggagtatttgctctttctagttttctgaataaagcatctgctgtttaccaggctcttcagaagagtaatggtgtacttcctgaattatttcagtgtcatggtactgcagatgagttagttcttcattcttgggcagaagagacaaactcaatgttaaaatctctaggagtgaccacgaagtttcatagttttccaaatgtttaccatgagctaagcaaaactgagttagacatattgaagttatggattcttacaaagctgccaggagaaatggaaaaacaaaaatgaatgaatcaagagtgatttgttaatgtaagtgtaatgtctttgtgaaaagtgatttttactgccaaattataatgataattaaaatattaagaaataacactttcctgacttttttattattaaaatgcttatcactgtagacagtagctaatcttattaatgaaaaacaatagacaaacatctgtgcataatttttcagacacaattctgtaaatatttggaaaccttttaagtatttaaacttttaaatttttgaaataaagtattctaaactaatataaataaggacaatgaaaaaacatgaaaggacttagcataatgttattttatcttttctacaactttgtttaaattacctttccaaagatatttgtgtttatgtaattttccacggaataacattaatactctaggtttataaaccggtttcacattatttcatttgatcatcacaagagctttgtgaagtaagccgagaagttgttactggtatttaataatagcaatagaggagttaaagactttcccacagcttgcaggtcaagacaagaaattcaggtctcctaattctcagtggagctctatttctgttaacccaaattgctgctctgttttaggtctcaatttcatctgtaaaatgatactaatagtacttatcccattggatttttgttgagatttaaataaatagccaaaagccaatacataataaacactcaataaagattaaccataaggagagtcatgatctggttccaggaatacattgttagatgactgaaaaattgtattacttcaatgaaaatactataaataataacattttcatatattagttggttctcatgcatacataatctaattttatttgatcctcacaactgtttaagttttattaaatatacattatccctatttgtataaatagaatcatacaatacctgcctgctttcattcaacaaaattatcatgagatttttccatgttgtgtacatcaatagttcatctattttattgctcagtaatattccattgtgtggatgtatcactatttgtttacacattcaccactgatatataagttgcttccagtgtgaggctgttttaaataaagctgctatgaatattcatgtaagagtctctgcatcgacctatgttatttttctttggtaaataagtaggagtagaatggctgggttatattttaggcatacttataaccttccaagaaatagccaactctttgagaaaatagttgtgccattttacattctagcagcagtgtatgagagtagtattgctccagatccttgccaacactcattatgactcctttatccattcagtcattagctattgttagtgttagtgtattttttgtgtggcc

SEQ ID NO: 463145 - DNA, 3904 bp, Homo sapiens
aggggcggaaccgcatgactggcagtggcatcagcgatggcggctgcgtcggggtcggttctgcagcgctgtatcgtgtcgccggcagggaggcatagcgcctctctgatcttcctgcatggctcaggtggatttcaattttacgtcctggttttctacagctcgggaaacatcctcccctcggttaccccagtattgcccaagtggaggtgtcgccgggcccaaatagggcccagtgggtggctcccccgtcgccagccccggctgtagatgcacgggcagcgccacctgcccccagcctcccccgttagtcttcctctttctatcgggcggtcactggtccaccaccctcgctttggggccttgtgtcccgccgctcagccagccctccatccccacaacacacctccccattcctcgccccaagtttaaacagagcaagttagtaaggtgattctggacaaggattaagaatgtggatcaagcaggttttaaatcaagatttaacattccaacacataaaaattatttatccaacagctcctcccagatcatatactcctatgaaaggaggaatctccaatgtatggtttgacagatttaaaataaccaatgactgcccagaacaccttgaatcaattgatgtcatgtgtcaagtgcttactgatttgattgatgaagaagtaaaaagtggcatcaagaagaacaggatattaatagatgtatctacatctggagttattgggggtattttgaaagagcctttcaggtggctcttgtccatggtgggctactgctacgataagaacttattatttcttgctggtatgttgaaaatcacagataacttttattcattatttacatagtgtgccttttttaaaaaatctaaactttgccagactggtaatcttctctcgggtatttgtgttctgagtccaaaataatattacctgcctattccagataaagtagtcctattttaataaatatcaagggatagtagaaagtatattaaactctattgcaaaagatccgaattccaaaattactattaatagttttatatttaaaataatatgtacctaatcttgggcctcagttccctccatgtataaaagattattgtagtaaattcaaatttatggtctcttaagagctcagctttacactttgttaagtgaaataaagcagcagacttgaaattaggagatttgaattctacttcaaagtatatttttgtatttctatgagtgtgtggctacatgatttacattctgtattttctcatggaatataatgagatgtcatttagctttctctcaagcttaggaatgtcacactgagtcactgacttgtcgtcaggcctggaatcaccattctctctgctgccgtcacctcataacagctatctccatattctgtgttggatgtgtttccttctcaaagttcccctgaacaggagggtctgtgtattttaatctgcatatatccagtgactggcatagaattggtacattaaagagacaataacagtttgactaatttttttttcaaactttggttttaaaaactacatataggcatacatgtttcatttttattatatcaccataaattagtttccaaaataatattgtaatccaaaaatgtgttaactagctcctcaaattttttttatcattcttaattcagaattcactaagcatctattatatagcaaacaccagatacataactccttatggagctcacagcttagcaagtaagacaaaaaggtgcaaattattaattgcgttgcagtgtgagggtttctgtacgtgtaaacaaaatataagtaaatattgagaatttaagtaatgcttgtaatatgactcattttgaattacgatagatattttacttggtgaacatgatatatttgtttaatcctggctccttgtagagcacagctctctttaccagtggtgacatagagggaacagggttatttatgttatcgcaggcctttgtctgtgaaacttagagtagacgaaatttctttttagcattctctttaaaggtctccagatattttaaaaatatggaaaattgttatatatcatatcctaaattattattttatgtattctactttttcttttaagtatgtttttgcttttaggaggattctctatgggaggatgcatggcaatgcatttagcatatagaaatcatcaagatgtggcaggagtatttgctctttctagttttctgaataaagcatctgctgtttaccaggctcttcagaagagtaatggtgtacttcctgaattatttcagtgtcatggtactgcagatgagttagttcttcattcttgggcagaagagacaaactcaatgttaaaatctctaggagtgaccacgaagtttcatagttttccaaatgtttaccatgagctaagcaaaactgagttagacatattgaagttatggattcttacaaagctgccaggagaaatggaaaaacaaaaatgaatgaatcaagagtgatttgttaatgtaagtgtaatgtctttgtgaaaagtgatttttactgccaaattataatgataattaaaatattaagaaataacactttcctgacttttttattattaaaatgcttatcactgtagacagtagctaatcttattaatgaaaaacaatagacaaacatctgtgcataatttttcagacacaattctgtaaatatttggaaaccttttaagtatttaaacttttaaatttttgaaataaagtattctaaactaatataaataaggacaatgaaaaaacatgaaaggacttagcataatgttattttatcttttctacaactttgtttaaattacctttccaaagatatttgtgtttatgtaattttccacggaataacattaatactctaggtttataaaccggtttcacattatttcatttgatcatcacaagagctttgtgaagtaagccgagaagttgttactggtatttaataatagcaatagaggagttaaagactttcccacagcttgcaggtcaagacaagaaattcaggtctcctaattctcagtggagctctatttctgttaacccaaattgctgctctgttttaggtctcaatttcatctgtaaaatgatactaatagtacttatcccattggatttttgttgagatttaaataaatagccaaaagccaatacataataaacactcaataaagattaaccataaggagagtcatgatctggttccaggaatacattgttagatgactgaaaaattgtattacttcaatgaaaatactataaataataacattttcatatattagttggttctcatgcatacataatctaattttatttgatcctcacaactgtttaagttttattaaatatacattatccctatttgtataaatagaatcatacaatacctgcctgctttcattcaacaaaattatcatgagatttttccatgttgtgtacatcaatagttcatctattttattgctcagtaatattccattgtgtggatgtatcactatttgtttacacattcaccactgatatataagttgcttccagtgtgaggctgttttaaataaagctgctatgaatattcatgtaagagtctctgcatcgacctatgttatttttctttggtaaataagtaggagtagaatggctgggttatattttaggcatacttataaccttccaagaaatagccaactctttgagaaaatagttgtgccattttacattctagcagcagtgtatgagagtagtattgctccagatccttgccaacactcattatgactcctttatccattcagtcattagctattgttagtgttagtgtattttttgtgtggcc

SEQ ID NO: 463146 - DNA, 846 bp, Homo sapiens
aggggcggaaccgcatgactggcagtggcatcagcgatggcggctgcgtcggggtcggttctgcagcgctgtatcgtgtcgccggcagggaggcatagcgcctctctgatcttcctgcatggctcaggtgattctggacaaggattaagaatgtggatcaagcaggttttaaatcaagatttaacattccaacacataaaaattatttatccaacagctcctcccagatcatatactcctatgaaaggaggaatctccaatgtatggtttgacagatttaaaataaccaatgactgcccagaacaccttgaatcaattgatgtcatgtgtcaagtgcttactgatttgattgatgaagaagtaaaaagtggcatcaagaagaacaggatattaataggaggattctctatgggaggatgcatggcaatgcatttagcatatagaaatcatcaagatgtggcaggagtatttgctctttctagttttctgaataaagcatctgctgtttaccaggctcttcagaagagtaatggtgtacttcctgaattatttcagtgtcatggtactgcagatgagttagttcttcattcttgggcagaagagacaaactcaatgttaaaatctctaggagtgaccacgaagtttcatagttttccaaatgtttaccatgagctaagcaaaactgagttagacatattgaagttatggattcttacaaagctgccaggagaaatggaaaaacaaaaatgaatgaatcaagagtgatttgttaatgtaagtgtaatgtctttgtgaaaagtgatttttactgccaaattataatgataattaaaatattaagaaata

SEQ ID NO: 463147 - DNA, 2074 bp, Homo sapiens
aggcatttggaagatgaaaagcttgtcagacttttcgaagaaagtggtctttgagccgagacgggtgattctggacaaggattaagaatgtggatcaagcaggttttaaatcaagatttaacattccaacacataaaaattatttatccaacagctcctcccagatcatatactcctatgaaaggaggaatctccaatgtatggtttgacagatttaaaataaccaatgactgcccagaacaccttgaatcaattgatgtcatgtgtcaagtgcttactgatttgattgatgaagaagtaaaaagtggcatcaagaagaacaggatattaataggaggattctctatgggaggatgcatggcaatgcatttagcatatagaaatcatcaagatgtggcaggagtatttgctctttctagttttctgaataaagcatctgctgtttaccaggctcttcagaagagtaatggtgtacttcctgaattatttcagtgtcatggtactgcagatgagttagttcttcattcttgggcagaagagacaaactcaatgttaaaatctctaggagtgaccacgaagtttcatagttttccaaatgtttaccatgagctaagcaaaactgagttagacatattgaagttatggattcttacaaagctgccaggagaaatggaaaaacaaaaatgaatgaatcaagagtgatttgttaatgtaagtgtaatgtctttgtgaaaagtgatttttactgccaaattataatgataattaaaatattaagaaataacactttcctgacttttttattattaaaatgcttatcactgtagacagtagctaatcttattaatgaaaaacaatagacaaacatctgtgcataatttttcagacacaattctgtaaatatttggaaaccttttaagtatttaaacttttaaatttttgaaataaagtattctaaactaatataaataaggacaatgaaaaaacatgaaaggacttagcataatgttattttatcttttctacaactttgtttaaattacctttccaaagatatttgtgtttatgtaattttccacggaataacattaatactctaggtttataaaccggtttcacattatttcatttgatcatcacaagagctttgtgaagtaagccgagaagttgttactggtatttaataatagcaatagaggagttaaagactttcccacagcttgcaggtcaagacaagaaattcaggtctcctaattctcagtggagctctatttctgttaacccaaattgctgctctgttttaggtctcaatttcatctgtaaaatgatactaatagtacttatcccattggatttttgttgagatttaaataaatagccaaaagccaatacataataaacactcaataaagattaaccataaggagagtcatgatctggttccaggaatacattgttagatgactgaaaaattgtattacttcaatgaaaatactataaataataacattttcatatattagttggttctcatgcatacataatctaattttatttgatcctcacaactgtttaagttttattaaatatacattatccctatttgtataaatagaatcatacaatacctgcctgctttcattcaacaaaattatcatgagatttttccatgttgtgtacatcaatagttcatctattttattgctcagtaatattccattgtgtggatgtatcactatttgtttacacattcaccactgatatataagttgcttccagtgtgaggctgttttaaataaagctgctatgaatattcatgtaagagtctctgcatcgacctatgttatttttctttggtaaataagtaggagtagaatggctgggttatattttaggcatacttataaccttccaagaaatagccaactctttgagaaaatagttgtgccattttacattctagcagcagtgtatgagagtagtattgctccagatccttgccaacactcattatgactcctttatccattcagtcattagctattgttagtgttagtgtattttttgtgtggcc

SEQ ID NO: 463148 - DNA, 2015 bp, Homo sapiens
aaaatgaggccagacaggttcagcagcttggccaaggtctcttagctgttactgtgattctggacaaggattaagaatgtggatcaagcaggttttaaatcaagatttaacattccaacacataaaaattatttatccaacagctcctcccagatttaaaataaccaatgactgcccagaacaccttgaatcaattgatgtcatgtgtcaagtgcttactgatttgattgatgaagaagtaaaaagtggcatcaagaagaacaggatattaataggaggattctctatgggaggatgcatggcaatgcatttagcatatagaaatcatcaagatgtggcaggagtatttgctctttctagttttctgaataaagcatctgctgtttaccaggctcttcagaagagtaatggtgtacttcctgaattatttcagtgtcatggtactgcagatgagttagttcttcattcttgggcagaagagacaaactcaatgttaaaatctctaggagtgaccacgaagtttcatagttttccaaatgtttaccatgagctaagcaaaactgagttagacatattgaagttatggattcttacaaagctgccaggagaaatggaaaaacaaaaatgaatgaatcaagagtgatttgttaatgtaagtgtaatgtctttgtgaaaagtgatttttactgccaaattataatgataattaaaatattaagaaataacactttcctgacttttttattattaaaatgcttatcactgtagacagtagctaatcttattaatgaaaaacaatagacaaacatctgtgcataatttttcagacacaattctgtaaatatttggaaaccttttaagtatttaaacttttaaatttttgaaataaagtattctaaactaatataaataaggacaatgaaaaaacatgaaaggacttagcataatgttattttatcttttctacaactttgtttaaattacctttccaaagatatttgtgtttatgtaattttccacggaataacattaatactctaggtttataaaccggtttcacattatttcatttgatcatcacaagagctttgtgaagtaagccgagaagttgttactggtatttaataatagcaatagaggagttaaagactttcccacagcttgcaggtcaagacaagaaattcaggtctcctaattctcagtggagctctatttctgttaacccaaattgctgctctgttttaggtctcaatttcatctgtaaaatgatactaatagtacttatcccattggatttttgttgagatttaaataaatagccaaaagccaatacataataaacactcaataaagattaaccataaggagagtcatgatctggttccaggaatacattgttagatgactgaaaaattgtattacttcaatgaaaatactataaataataacattttcatatattagttggttctcatgcatacataatctaattttatttgatcctcacaactgtttaagttttattaaatatacattatccctatttgtataaatagaatcatacaatacctgcctgctttcattcaacaaaattatcatgagatttttccatgttgtgtacatcaatagttcatctattttattgctcagtaatattccattgtgtggatgtatcactatttgtttacacattcaccactgatatataagttgcttccagtgtgaggctgttttaaataaagctgctatgaatattcatgtaagagtctctgcatcgacctatgttatttttctttggtaaataagtaggagtagaatggctgggttatattttaggcatacttataaccttccaagaaatagccaactctttgagaaaatagttgtgccattttacattctagcagcagtgtatgagagtagtattgctccagatccttgccaacactcattatgactcctttatccattcagtcattagctattgttagtgttagtgtattttttgtgtggcc

SEQ ID NO: 463149 - DNA, 1965 bp, Homo sapiens
taaatttaacattcacttaaatatctattgctgtttcttttgggttcttccagaataattttttcttattctttaccttaatttttaagggtattcaagaagatctccatgtttataaaatctaagttaaccatttctccccttttcattctgatgtataagtttacagcccagaaataggttgctaaagctatgttttaatattacgtgaatgcacaaaagatggaggattctctatgggaggatgcatggcaatgcatttagcatatagaaatcatcaagatgtggcaggagtatttgctctttctagttttctgaataaagcatctgctgtttaccaggctcttcagaagagtaatggtgtacttcctgaattatttcagtgtcatggtactgcagatgagttagttcttcattcttgggcagaagagacaaactcaatgttaaaatctctaggagtgaccacgaagtttcatagttttccaaatgtttaccatgagctaagcaaaactgagttagacatattgaagttatggattcttacaaagctgccaggagaaatggaaaaacaaaaatgaatgaatcaagagtgatttgttaatgtaagtgtaatgtctttgtgaaaagtgatttttactgccaaattataatgataattaaaatattaagaaataacactttcctgacttttttattattaaaatgcttatcactgtagacagtagctaatcttattaatgaaaaacaatagacaaacatctgtgcataatttttcagacacaattctgtaaatatttggaaaccttttaagtatttaaacttttaaatttttgaaataaagtattctaaactaatataaataaggacaatgaaaaaacatgaaaggacttagcataatgttattttatcttttctacaactttgtttaaattacctttccaaagatatttgtgtttatgtaattttccacggaataacattaatactctaggtttataaaccggtttcacattatttcatttgatcatcacaagagctttgtgaagtaagccgagaagttgttactggtatttaataatagcaatagaggagttaaagactttcccacagcttgcaggtcaagacaagaaattcaggtctcctaattctcagtggagctctatttctgttaacccaaattgctgctctgttttaggtctcaatttcatctgtaaaatgatactaatagtacttatcccattggatttttgttgagatttaaataaatagccaaaagccaatacataataaacactcaataaagattaaccataaggagagtcatgatctggttccaggaatacattgttagatgactgaaaaattgtattacttcaatgaaaatactataaataataacattttcatatattagttggttctcatgcatacataatctaattttatttgatcctcacaactgtttaagttttattaaatatacattatccctatttgtataaatagaatcatacaatacctgcctgctttcattcaacaaaattatcatgagatttttccatgttgtgtacatcaatagttcatctattttattgctcagtaatattccattgtgtggatgtatcactatttgtttacacattcaccactgatatataagttgcttccagtgtgaggctgttttaaataaagctgctatgaatattcatgtaagagtctctgcatcgacctatgttatttttctttggtaaataagtaggagtagaatggctgggttatattttaggcatacttataaccttccaagaaatagccaactctttgagaaaatagttgtgccattttacattctagcagcagtgtatgagagtagtattgctccagatccttgccaacactcattatgactcctttatccattcagtcattagctattgttagtgttagtgtattttttgtgtggcc

SEQ ID NO: 463150 - DNA, 1875 bp, Homo sapiens
catttttaagacgtcctctatagaataaatgtaagtgacacacagttacaaattgagtgatgccaggaaccagctaagtccccaggcctggcccaccaatgtatacctcagacagcactccctctgccttttttttcccattagttattgaagccttggtaaaattggaattttcctgttctctctgatttctaagaatgatcttaaatggaatttcttaaacttttctgtctttgtatcttcttctctaggctcttcagaagagtaatggtgtacttcctgaattatttcagtgtcatggtactgcagatgagttagttcttcattcttgggcagaagagacaaactcaatgttaaaatctctaggagtgaccacgaagtttcatagttttccaaatgtttaccatgagctaagcaaaactgagttagacatattgaagttatggattcttacaaagctgccaggagaaatggaaaaacaaaaatgaatgaatcaagagtgatttgttaatgtaagtgtaatgtctttgtgaaaagtgatttttactgccaaattataatgataattaaaatattaagaaataacactttcctgacttttttattattaaaatgcttatcactgtagacagtagctaatcttattaatgaaaaacaatagacaaacatctgtgcataatttttcagacacaattctgtaaatatttggaaaccttttaagtatttaaacttttaaatttttgaaataaagtattctaaactaatataaataaggacaatgaaaaaacatgaaaggacttagcataatgttattttatcttttctacaactttgtttaaattacctttccaaagatatttgtgtttatgtaattttccacggaataacattaatactctaggtttataaaccggtttcacattatttcatttgatcatcacaagagctttgtgaagtaagccgagaagttgttactggtatttaataatagcaatagaggagttaaagactttcccacagcttgcaggtcaagacaagaaattcaggtctcctaattctcagtggagctctatttctgttaacccaaattgctgctctgttttaggtctcaatttcatctgtaaaatgatactaatagtacttatcccattggatttttgttgagatttaaataaatagccaaaagccaatacataataaacactcaataaagattaaccataaggagagtcatgatctggttccaggaatacattgttagatgactgaaaaattgtattacttcaatgaaaatactataaataataacattttcatatattagttggttctcatgcatacataatctaattttatttgatcctcacaactgtttaagttttattaaatatacattatccctatttgtataaatagaatcatacaatacctgcctgctttcattcaacaaaattatcatgagatttttccatgttgtgtacatcaatagttcatctattttattgctcagtaatattccattgtgtggatgtatcactatttgtttacacattcaccactgatatataagttgcttccagtgtgaggctgttttaaataaagctgctatgaatattcatgtaagagtctctgcatcgacctatgttatttttctttggtaaataagtaggagtagaatggctgggttatattttaggcatacttataaccttccaagaaatagccaactctttgagaaaatagttgtgccattttacattctagcagcagtgtatgagagtagtattgctccagatccttgccaacactcattatgactcctttatccattcagtcattagctattgttagtgttagtgtattttttgtgtggcc

SEQ ID NO: 463151 - DNA, 2290 bp, Homo sapiens
aggggcggaaccgcatgactggcagtggcatcagcgatggcggctgcgtcggggtcggttctgcagcgctgtatcgtgtcgccggcagggaggcatagcgcctctctgatcttcctgcatggctcaggtgattctggacaaggattaagaatgtggatcaagcaggttttaaatcaagatttaacattccaacacataaaaattatttatccaacagctcctcccagatcatatactcctatgaaaggaggaatctccaatgtatggtttgacagatttaaaataaccaatgactgcccagaacaccttgaatcaattgatgtcatgtgtcaagtgcttactgatttgattgatgaagaagtaaaaagtggcatcaagaagaacaggatattaatagatgtatctacatctggagttattgggggtattttgaaagagcctttcaggtggctcttgtccatggtgggctactgctacgataagaacttattatttcttgctggtatgttgaaaatcacagataacttttattcattatttacatagtgtgccttttttaaaaaatctaaactttgccagactggtaatcttctctcgggtatttgtgttctgagtccaaaataatattacctgcctattccagataaagtagtcctattttaataaatatcaagggatagtagaaagtatattaaactctattgcaaaagatccgaattccaaaattactattaatagttttatatttaaaataatatgtacctaatcttgggcctcagttccctccatgtataaaagattattgtagtaaattcaaatttatggtctcttaagagctcagctttacactttgttaagtgaaataaagcagcagacttgaaattaggagatttgaattctacttcaaagtatatttttgtatttctatgagtgtgtggctacatgatttacattctgtattttctcatggaatataatgagatgtcatttagctttctctcaagcttaggaatgtcacactgagtcactgacttgtcgtcaggcctggaatcaccattctctctgctgccgtcacctcataacagctatctccatattctgtgttggatgtgtttccttctcaaagttcccctgaacaggagggtctgtgtattttaatctgcatatatccagtgactggcatagaattggtacattaaagagacaataacagtttgactaatttttttttcaaactttggttttaaaaactacatataggcatacatgtttcatttttattatatcaccataaattagtttccaaaataatattgtaatccaaaaatgtgttaactagctcctcaaattttttttatcattcttaattcagaattcactaagcatctattatatagcaaacaccagatacataactccttatggagctcacagcttagcaagtaagacaaaaaggtgcaaattattaattgcgttgcagtgtgagggtttctgtacgtgtaaacaaaatataagtaaatattgagaatttaagtaatgcttgtaatatgactcattttgaattacgatagatattttacttggtgaacatgatatatttgtttaatcctggctccttgtagagcacagctctctttaccagtggtgacatagagggaacagggttatttatgttatcgcaggcctttgtctgtgaaacttagagtagacgaaatttctttttagcattctctttaaaggtctccagatattttaaaaatatggaaaattgttatatatcatatcctaaattattattttatgtattctactttttcttttaagtatgtttttgcttttaggaggattctctatgggaggatgcatggcaatgcatttagcatatagaaatcatcaagatgtggcaggagtatttgctctttctagttttctgaataaagcatctgctgtttaccaggctcttcagaagagtaatggtgtacttcctgaattatttcagtgtcatggtactgcagatgagttagttcttcattcttgggcagaagagacaaactcaatgttaaaatctctaggagtgaccacgaagtttcatagttttccaaatgtttaccatgagctaagcaaaactgagttagacatattgaagttatggattcttacaaagctgccaggagaaatggaaaaacaaaaatgaatgaatcaagagtgatttgttaatgtaagtgtaatgtctttgtgaaaagtgatttttactgccaaattataatgataattaaaatattaagaaata

SEQ ID NO: 463152 - DNA, 3459 bp, Homo sapiens
aggcatttggaagatgaaaagcttgtcagacttttcgaagaaagtggtctttgagccgagacgggtaggcttaaatgggacggtgattggaagggaattggaaagatcatatactcctatgaaaggaggaatctccaatgtatggtttgacagatttaaaataaccaatgactgcccagaacaccttgaatcaattgatgtcatgtgtcaagtgcttactgatttgattgatgaagaagtaaaaagtggcatcaagaagaacaggatattaatagatgtatctacatctggagttattgggggtattttgaaagagcctttcaggtggctcttgtccatggtgggctactgctacgataagaacttattatttcttgctggtatgttgaaaatcacagataacttttattcattatttacatagtgtgccttttttaaaaaatctaaactttgccagactggtaatcttctctcgggtatttgtgttctgagtccaaaataatattacctgcctattccagataaagtagtcctattttaataaatatcaagggatagtagaaagtatattaaactctattgcaaaagatccgaattccaaaattactattaatagttttatatttaaaataatatgtacctaatcttgggcctcagttccctccatgtataaaagattattgtagtaaattcaaatttatggtctcttaagagctcagctttacactttgttaagtgaaataaagcagcagacttgaaattaggagatttgaattctacttcaaagtatatttttgtatttctatgagtgtgtggctacatgatttacattctgtattttctcatggaatataatgagatgtcatttagctttctctcaagcttaggaatgtcacactgagtcactgacttgtcgtcaggcctggaatcaccattctctctgctgccgtcacctcataacagctatctccatattctgtgttggatgtgtttccttctcaaagttcccctgaacaggagggtctgtgtattttaatctgcatatatccagtgactggcatagaattggtacattaaagagacaataacagtttgactaatttttttttcaaactttggttttaaaaactacatataggcatacatgtttcatttttattatatcaccataaattagtttccaaaataatattgtaatccaaaaatgtgttaactagctcctcaaattttttttatcattcttaattcagaattcactaagcatctattatatagcaaacaccagatacataactccttatggagctcacagcttagcaagtaagacaaaaaggtgcaaattattaattgcgttgcagtgtgagggtttctgtacgtgtaaacaaaatataagtaaatattgagaatttaagtaatgcttgtaatatgactcattttgaattacgatagatattttacttggtgaacatgatatatttgtttaatcctggctccttgtagagcacagctctctttaccagtggtgacatagagggaacagggttatttatgttatcgcaggcctttgtctgtgaaacttagagtagacgaaatttctttttagcattctctttaaaggtctccagatattttaaaaatatggaaaattgttatatatcatatcctaaattattattttatgtattctactttttcttttaagtatgtttttgcttttaggaggattctctatgggaggatgcatggcaatgcatttagcatatagaaatcatcaagatgtggcaggagtatttgctctttctagttttctgaataaagcatctgctgtttaccaggctcttcagaagagtaatggtgtacttcctgaattatttcagtgtcatggtactgcagatgagttagttcttcattcttgggcagaagagacaaactcaatgttaaaatctctaggagtgaccacgaagtttcatagttttccaaatgtttaccatgagctaagcaaaactgagttagacatattgaagttatggattcttacaaagctgccaggagaaatggaaaaacaaaaatgaatgaatcaagagtgatttgttaatgtaagtgtaatgtctttgtgaaaagtgatttttactgccaaattataatgataattaaaatattaagaaataacactttcctgacttttttattattaaaatgcttatcactgtagacagtagctaatcttattaatgaaaaacaatagacaaacatctgtgcataatttttcagacacaattctgtaaatatttggaaaccttttaagtatttaaacttttaaatttttgaaataaagtattctaaactaatataaataaggacaatgaaaaaacatgaaaggacttagcataatgttattttatcttttctacaactttgtttaaattacctttccaaagatatttgtgtttatgtaattttccacggaataacattaatactctaggtttataaaccggtttcacattatttcatttgatcatcacaagagctttgtgaagtaagccgagaagttgttactggtatttaataatagcaatagaggagttaaagactttcccacagcttgcaggtcaagacaagaaattcaggtctcctaattctcagtggagctctatttctgttaacccaaattgctgctctgttttaggtctcaatttcatctgtaaaatgatactaatagtacttatcccattggatttttgttgagatttaaataaatagccaaaagccaatacataataaacactcaataaagattaaccataaggagagtcatgatctggttccaggaatacattgttagatgactgaaaaattgtattacttcaatgaaaatactataaataataacattttcatatattagttggttctcatgcatacataatctaattttatttgatcctcacaactgtttaagttttattaaatatacattatccctatttgtataaatagaatcatacaatacctgcctgctttcattcaacaaaattatcatgagatttttccatgttgtgtacatcaatagttcatctattttattgctcagtaatattccattgtgtggatgtatcactatttgtttacacattcaccactgatatataagttgcttccagtgtgaggctgttttaaataaagctgctatgaatattcatgtaagagtctctgcatcgacctatgttatttttctttggtaaataagtaggagtagaatggctgggttatattttaggcatacttataaccttccaagaaatagccaactctttgagaaaatagttgtgccattttacattctagcagcagtgtatgagagtagtattgctccagatccttgccaacactcattatgactcctttatccattcagtcattagctattgttagtgttagtgtattttttgtgtggcc

SEQ ID NO: 463153 - DNA, 798 bp, Homo sapiens
aggggcggaaccgcatgactggcagtggcatcagcgatggcggctgcgtcggggtcggttctgcagcgctgtatcgtgtcgccggcagggaggcatagcgcctctctgatcttcctgcatggctcaggtgattctggacaaggattaagaatgtggatcaagcaggttttaaatcaagatttaacattccaacacataaaaattatttatccaacagctcctcccagatttaaaataaccaatgactgcccagaacaccttgaatcaattgatgtcatgtgtcaagtgcttactgatttgattgatgaagaagtaaaaagtggcatcaagaagaacaggatattaataggaggattctctatgggaggatgcatggcaatgcatttagcatatagaaatcatcaagatgtggcaggagtatttgctctttctagttttctgaataaagcatctgctgtttaccaggctcttcagaagagtaatggtgtacttcctgaattatttcagtgtcatggtactgcagatgagttagttcttcattcttgggcagaagagacaaactcaatgttaaaatctctaggagtgaccacgaagtttcatagttttccaaatgtttaccatgagctaagcaaaactgagttagacatattgaagttatggattcttacaaagctgccaggagaaatggaaaaacaaaaatgaatgaatcaagagtgatttgttaatgtaagtgtaatgtctttgtgaaaagtgatttttactgccaaattataatgataattaaaatattaagaaata

SEQ ID NO: 463154 - DNA, 1967 bp, Homo sapiens
aggggcggaaccgcatgactggcagtggcatcagcgatggcggctgcgtcggggtcggttctgcagcgctgtatcgtgtcgccggcagggaggcatagcgcctctctgatcttcctgcatggctcaggtgattctggacaaggattaagaatgtggatcaagcaggttttaaatcaagatttaacattccaacacataaaaattatttatccaacagctcctcccaggaggattctctatgggaggatgcatggcaatgcatttagcatatagaaatcatcaagatgtggcaggagtatttgctctttctagttttctgaataaagcatctgctgtttaccaggctcttcagaagagtaatggtgtacttcctgaattatttcagtgtcatggtactgcagatgagttagttcttcattcttgggcagaagagacaaactcaatgttaaaatctctaggagtgaccacgaagtttcatagttttccaaatgtttaccatgagctaagcaaaactgagttagacatattgaagttatggattcttacaaagctgccaggagaaatggaaaaacaaaaatgaatgaatcaagagtgatttgttaatgtaagtgtaatgtctttgtgaaaagtgatttttactgccaaattataatgataattaaaatattaagaaataacactttcctgacttttttattattaaaatgcttatcactgtagacagtagctaatcttattaatgaaaaacaatagacaaacatctgtgcataatttttcagacacaattctgtaaatatttggaaaccttttaagtatttaaacttttaaatttttgaaataaagtattctaaactaatataaataaggacaatgaaaaaacatgaaaggacttagcataatgttattttatcttttctacaactttgtttaaattacctttccaaagatatttgtgtttatgtaattttccacggaataacattaatactctaggtttataaaccggtttcacattatttcatttgatcatcacaagagctttgtgaagtaagccgagaagttgttactggtatttaataatagcaatagaggagttaaagactttcccacagcttgcaggtcaagacaagaaattcaggtctcctaattctcagtggagctctatttctgttaacccaaattgctgctctgttttaggtctcaatttcatctgtaaaatgatactaatagtacttatcccattggatttttgttgagatttaaataaatagccaaaagccaatacataataaacactcaataaagattaaccataaggagagtcatgatctggttccaggaatacattgttagatgactgaaaaattgtattacttcaatgaaaatactataaataataacattttcatatattagttggttctcatgcatacataatctaattttatttgatcctcacaactgtttaagttttattaaatatacattatccctatttgtataaatagaatcatacaatacctgcctgctttcattcaacaaaattatcatgagatttttccatgttgtgtacatcaatagttcatctattttattgctcagtaatattccattgtgtggatgtatcactatttgtttacacattcaccactgatatataagttgcttccagtgtgaggctgttttaaataaagctgctatgaatattcatgtaagagtctctgcatcgacctatgttatttttctttggtaaataagtaggagtagaatggctgggttatattttaggcatacttataaccttccaagaaatagccaactctttgagaaaatagttgtgccattttacattctagcagcagtgtatgagagtagtattgctccagatccttgccaacactcattatgactcctttatccattcagtcattagctattgttagtgttagtgtattttttgtgtggcc

SEQ ID NO: 463155 - DNA, 2460 bp, Homo sapiens
aggggcggaaccgcatgactggcagtggcatcagcgatggcggctgcgtcggggtcggttctgcagcgctgtatcgtgtcgccggcagggaggcatagcgcctctctgatcttcctgcatggctcaggtggatttcaattttacgtcctggttttctacagctcgggaaacatcctcccctcggttaccccagtattgcccaagtggaggtgtcgccgggcccaaatagggcccagtgggtggctcccccgtcgccagccccggctgtagatgcacgggcagcgccacctgcccccagcctcccccgttagtcttcctctttctatcgggcggtcactggtccaccaccctcgctttggggccttgtgtcccgccgctcagccagccctccatccccacaacacacctccccattcctcgccccaagtttaaacagagcaagttagtaaggtgattctggacaaggattaagaatgtggatcaagcaggttttaaatcaagatttaacattccaacacataaaaattatttatccaacagctcctcccagatcatatactcctatgaaaggaggaatctccaatgtatggtttgacagatttaaaataaccaatgactgcccagaacaccttgaatcaattgatgtcatgtgtcaagtgcttactgatttgattgatgaagaagtaaaaagtggcatcaagaagaacaggatattaataggaggattctctatgggaggatgcatggcaatgcatttagcatatagaaatcatcaagatgtggcaggagtatttgctctttctagttttctgaataaagcatctgctgtttaccaggctcttcagaagagtaatggtgtacttcctgaattatttcagtgtcatggtactgcagatgagttagttcttcattcttgggcagaagagacaaactcaatgttaaaatctctaggagtgaccacgaagtttcatagttttccaaatgtttaccatgagctaagcaaaactgagttagacatattgaagttatggattcttacaaagctgccaggagaaatggaaaaacaaaaatgaatgaatcaagagtgatttgttaatgtaagtgtaatgtctttgtgaaaagtgatttttactgccaaattataatgataattaaaatattaagaaataacactttcctgacttttttattattaaaatgcttatcactgtagacagtagctaatcttattaatgaaaaacaatagacaaacatctgtgcataatttttcagacacaattctgtaaatatttggaaaccttttaagtatttaaacttttaaatttttgaaataaagtattctaaactaatataaataaggacaatgaaaaaacatgaaaggacttagcataatgttattttatcttttctacaactttgtttaaattacctttccaaagatatttgtgtttatgtaattttccacggaataacattaatactctaggtttataaaccggtttcacattatttcatttgatcatcacaagagctttgtgaagtaagccgagaagttgttactggtatttaataatagcaatagaggagttaaagactttcccacagcttgcaggtcaagacaagaaattcaggtctcctaattctcagtggagctctatttctgttaacccaaattgctgctctgttttaggtctcaatttcatctgtaaaatgatactaatagtacttatcccattggatttttgttgagatttaaataaatagccaaaagccaatacataataaacactcaataaagattaaccataaggagagtcatgatctggttccaggaatacattgttagatgactgaaaaattgtattacttcaatgaaaatactataaataataacattttcatatattagttggttctcatgcatacataatctaattttatttgatcctcacaactgtttaagttttattaaatatacattatccctatttgtataaatagaatcatacaatacctgcctgctttcattcaacaaaattatcatgagatttttccatgttgtgtacatcaatagttcatctattttattgctcagtaatattccattgtgtggatgtatcactatttgtttacacattcaccactgatatataagttgcttccagtgtgaggctgttttaaataaagctgctatgaatattcatgtaagagtctctgcatcgacctatgttatttttctttggtaaataagtaggagtagaatggctgggttatattttaggcatacttataaccttccaagaaatagccaactctttgagaaaatagttgtgccattttacattctagcagcagtgtatgagagtagtattgctccagatccttgccaacactcattatgactcctttatccattcagtcattagctattgttagtgttagtgtattttttgtgtggcc

SEQ ID NO: 463156 - DNA, 2164 bp, Homo sapiens
aggggcggaaccgcatgactggcagtggcatcagcgatggcggctgcgtcggggtcggttctgcagcgctgtatcgtgtcgccggcagggaggcatagcgcctctctgatcttcctgcatggctcaggtgattctggacaaggattaagaatgtggatcaagcaggttttaaatcaagatttaacattccaacacataaaaattatttatccaacagctcctcccagttacactgttggaccaagttttgccagatcatatactcctatgaaaggaggaatctccaatgtatggtttgacagatttaaaataaccaatgactgcccagaacaccttgaatcaattgatgtcatgtgtcaagtgcttactgatttgattgatgaagaagtaaaaagtggcatcaagaagaacaggatattaataggaggattctctatgggaggatgcatggcaatgcatttagcatatagaaatcatcaagatgtggcaggagtatttgctctttctagttttctgaataaagcatctgctgtttaccaggctcttcagaagagtaatggtgtacttcctgaattatttcagtgtcatggtactgcagatgagttagttcttcattcttgggcagaagagacaaactcaatgttaaaatctctaggagtgaccacgaagtttcatagttttccaaatgtttaccatgagctaagcaaaactgagttagacatattgaagttatggattcttacaaagctgccaggagaaatggaaaaacaaaaatgaatgaatcaagagtgatttgttaatgtaagtgtaatgtctttgtgaaaagtgatttttactgccaaattataatgataattaaaatattaagaaataacactttcctgacttttttattattaaaatgcttatcactgtagacagtagctaatcttattaatgaaaaacaatagacaaacatctgtgcataatttttcagacacaattctgtaaatatttggaaaccttttaagtatttaaacttttaaatttttgaaataaagtattctaaactaatataaataaggacaatgaaaaaacatgaaaggacttagcataatgttattttatcttttctacaactttgtttaaattacctttccaaagatatttgtgtttatgtaattttccacggaataacattaatactctaggtttataaaccggtttcacattatttcatttgatcatcacaagagctttgtgaagtaagccgagaagttgttactggtatttaataatagcaatagaggagttaaagactttcccacagcttgcaggtcaagacaagaaattcaggtctcctaattctcagtggagctctatttctgttaacccaaattgctgctctgttttaggtctcaatttcatctgtaaaatgatactaatagtacttatcccattggatttttgttgagatttaaataaatagccaaaagccaatacataataaacactcaataaagattaaccataaggagagtcatgatctggttccaggaatacattgttagatgactgaaaaattgtattacttcaatgaaaatactataaataataacattttcatatattagttggttctcatgcatacataatctaattttatttgatcctcacaactgtttaagttttattaaatatacattatccctatttgtataaatagaatcatacaatacctgcctgctttcattcaacaaaattatcatgagatttttccatgttgtgtacatcaatagttcatctattttattgctcagtaatattccattgtgtggatgtatcactatttgtttacacattcaccactgatatataagttgcttccagtgtgaggctgttttaaataaagctgctatgaatattcatgtaagagtctctgcatcgacctatgttatttttctttggtaaataagtaggagtagaatggctgggttatattttaggcatacttataaccttccaagaaatagccaactctttgagaaaatagttgtgccattttacattctagcagcagtgtatgagagtagtattgctccagatccttgccaacactcattatgactcctttatccattcagtcattagctattgttagtgttagtgtattttttgtgtggcc

SEQ ID NO: 463157 - DNA, 3206 bp, Homo sapiens
aagctcatccccatggctttgtagacaaaactcccacatccccctggttccccaccaaccatcccacccctgaataaacaacagctcatttgtaagagattttaatttcatcttggtatgccattaaggagtggaataaggatctctattcattttcactcacatagtatctcctacattctccaactggtctttaccacagaaacctgtggggccatacagcatctgcataattttcactcatcagactggtttggagtgatagggacgtgtctctgtgttcaagtctccaatgatgtccccagaaatgaggccaagcctatcctggcccctcctggatgggtccacagtgacccgctgtcttccccaccaactcattctgggttcccaggagacttcctagcacagaacaataccatcctagcaccgcaactggagaccagggtgtggaactgtccccatgtacaatggctgctgggtcttctgtgccgaggatcagaggagtaaacgtttgcttaattaaggccttctgtagcactgatactgctgatctctggcatgaagcgcaagacttgcaattcaatgacaacaaacaggtctacaaggagagcacaacttcccatttaaaaccaacaaacaagaagctttgaaaacaagataaatggaagtgtcaataatgaatatgcatgaaggtctttctcctgtagtcattggttaggcgattctggcagtattttgtagggcacattattctgctttggaacttcggaatgggtgttgtaaaagtcaagtcagcatgtatgagaacaccaatctataagagtgttcaacaaaggaaggcattgttattttactatcattatttttactactttatgttattttggaaagagccaagtcaccgaggtgtcttctattaaatcaattagcctggaaggagaactaagcaagatgagaaactgaacgtatctgtgactctgcaagcagtccctgacgctgtggtgggatccaggcctggacgctgtggataaggtcagtgccatccccaatcagcagttctaagcctgcagctcaggagccctcaaccctctcacaagttcctcgtggctcagtcttcccttgaaggccttatttctccagtgggtgtggtctaggcttcactgagtccagatatgtcatccaaagagctgggtagtgggaggcctctggtaggaacagcctggattccagccagaactgcctgggaggaggcaccagcttaccagagctcagcctctgggtgttctgctgatcttgctgctgctgctgctgtcgcctggccagcttcttcatctgataaggagaggaccataggattagaagtcaggtggcctgcagcatgttcacaaagtaagggggggcctggaagtgacaccttccccgggagagggcttgttggcaaagctctggctcttacttagtaaaggagcaacagtggccagccccatatgcgagaagcattgcagctgagagctcttccactctgcagcagtataaagacagctggctgggaagcaggggtgcagcttgtcttagcaggaatagggattttttcctcagtaaataaaacttgctgcttgtggtgtgaccattttacattaggtaataagtgtgtgactgtgaaatctgcagcccagcctagacgtatggaacaagaggttgtgatttgggggcttggaggatacttcaaatgaggccttgaatgctcgcctctgttgagttgtcaagatggttctcggacgtttggggcgcttatggtccttgccttcctcagcagttcctttccctgccccatgggctgacttgcagagactttcttcatcatcacttttacctgaaagaagcaaaagacaatgtttgtgaaaatgtactaatacaggcaagttacttaactctctacaactaaatgtactcttctgcaaaatagtgatatatgagaggatctacttcattggggttgctgtgaggattaaatgagtttataccagtacggcactgagtgccctaaatgccaatgagccttgactgttgatgattaatattatttcttagatgtcatttttcaagactagacctagacactatgtctgaaactctagttactgccaagtggtagaaaatattattgttaaaaaggccatagagaaaagcattagattacctgccagtacagataactcagaatggacaggtaacactgataactagtcaacattgcttttctgtaaagtaaataactctctactgttaaagtaattgtctaactatttgaaatacttcaactctataagcagtgaacaacatgagggttaactctgaaaggaaataaaatctctactctgactctggaggcaggaaacactgctgatggttagcatggtttgatatgttctctcccacagtcaataacatatatgcatttaataagaaatgccactacccaacagtcaccaatgtggaattttgggcatcctggcacatctgagccagaaagattctgaagatggaggaacagaggaaccttttggcacctctcaaagtacagatagatgccacaagccagctgccaacaggaatccagaccctggctaaccatcacccagcttccatctactgtgttcaggggcagacctgcctgacttggatatcagcttctccatgaaaatatgcagtgcctaaaatttacactgatcgatttgttcacgagaaaggacatttctaaaagagccaggagactgcccccagaaccaagaggagtactggagagcagaagatgaagaaaaacctttaaacagcagagcagtgaagtggagggagaggcggcccctctcctttgccagagactcccactcccagatgcaggctggagcgatccctcataatttaagctgacacccctcagcggagatgaaaggaacaccactcgctgctctccaacaacaaatgtcagcatccctggaggccgtttagacacaaacgcagcataaatctgactcctagtggggaagtccagagattaagtctccacacacagcctaccagagtgaaatgaatttgcttggcacaaagtttgaacatgtttctcagggcctttctttcccctttcttgtaaaaaaaaaatctggaatggttcagggctgttttcccccttgctgttccttccactc

SEQ ID NO: 463158 - DNA, 1051 bp, Homo sapiens
acaacagacgctccccttgccctttatgatgtttacatgggcggagggatccctcccagctgacagccacaccgcgccggcccttctttttttaaagagcctagccacgggcgctgactggccggcagccgggcgcgtcatcctccgggggcggggcccgggccgcattgtctcgtctagggccggctggacgccccagaggccggacctgggcaaccccagcctggaggtgccggggccggagctcccagagggctgggtgcgaggcctaggcggggtcaggttcgggttcctaggccatagcggagctgcagcccaggcggccggagcggaacccagccccgctccgagtgccacgtctccaggaaccccctccttactcttggacaacactccgcccccgcccgggcctccgtcccccaaaccgccctcatttgtgcagcgccagatccttcggacacatccctaggtgtctccatcctcattcggtccatccaactcccagacctcacgtcaaccggctgcaccccactttccagcctgcgccccagatctgcagccttcgcccctagatacacccgcctggtgatgaggcgctcctcgcgttccttccgtctccagtgcaccggctttccctcgtcctctgcgcagtccatctcagctcatctctccaattcaatgccatcatctctcctcaccatctctcggtgccctggaatgtttgctgtcagatgtcccctgtgaaacccacaaacgcttgcgatttggcctccttgttttattttgtgtagtcctacaacgtcttgttactaccccctattacaacacttataactcaagataagaagccagcaacaacaaaacaattttgggcggtcgccccgagagagaggtttaaacgccctgtggggcgcggaggggccaagagacagcagcaagggcaccacggtcccagaagaccggggcacacacagggttgggtctcccaaaaagaagcggggcacgggtttcgacaacccagggtggggctgggctacaggcagggcgtacg

SEQ ID NO: 463159 - DNA, 657 bp, Homo sapiens
acgaagcgactggcaccagctgagtgcggcgactccaagctggtgcagctaggggtcagtcggtctagcatacgactgcagcagcggcgacggaaccagccgctcgatgcacgtctcagaaccctcttatctggacaatccgcccgccggctcgtccccaacgcctcattgtgcggcgatccttcggacacatccctaggtgtctccatcctcattcggtccatccaactcccagacctcacgtcaaccggctgcaccccactttccagcctgcgccccagatctgcagccttcgcccctagatacacccgcctggtgatgaggcgctcctcgcgttccttccgtctccagtgcaccggctttccctcgtcctctgcgcagtccatctcagctcatctctccaattcaatgccatcatctctcctcaccatctctcggtgccctggaatgtttgctgtcagatgtcccctgtgaaacccacaaacgcttgcgatttggcctccttgttttattttgtgtagtcctacaacgtcttgttactaccccctattacaacacttataactcagtatttgtcttttttccgcggtgtccctgcactctccccatacatattcctctcctgccagattgtaagcctctagagggaagaagtaa

SEQ ID NO: 463160 - DNA, 1041 bp, Homo sapiens
acaacagacgctccccttgccctttatgatgtttacatgggcggagggatccctcccagctgacagccacaccgcgccggcccttctttttttaaagagcctagccacgggcgctgactggccggcagccgggcgcgtcatcctccgggggcggggcccgggccgcattgtctcgtctagggccggctggacgccccagaggccggacctgggcaaccccagcctggaggtgccggggccggagctcccagagggctgggtgcgaggcctaggcggggtcaggttcgggttcctaggccatagcggagctgcagcccaggcggccggagcggaacccagccccgctccgagtgccacgtctccaggaaccccctccttactcttggacaacactccgcccccgcccgggcctccgtcccccaaaccgccctcatttgtgcagcgccagatccttcggacacatccctaggtgtctccatcctcattcggtccatccaactcccagacctcacgtcaaccggctgcaccccactttccagcctgcgccccagatctgcagccttcgcccctagatacacccgcctggtgatgaggcgctcctcgcgttccttccgggctccaggtgtccgtgagcctcccttccgccctggcctccggtctctgccttgctcgtgcttctaccaccacccttcccctcccaacccggtggatcctctcgtctcccccagtctccagtgcaccggctttccctcgtcctctgcgcagtccatctcagctcatctctccaattcaatgccatcatctctcctcaccatctctcggtgccctggaatgtttgctgtcagatgtcccctgtgaaacccacaaacgcttgcgatttggcctccttgttttattttgtgtagtcctacaacgtcttgttactaccccctattacaacacttataactcagtatttgtcttttttccgcggtgtccctgcactctccccatacatattcctctcctgccagattgtaagcctctagagggaagaagtaa

SEQ ID NO: 463161 - DNA, 1245 bp, Homo sapiens
acaacagacgctccccttgccctttatgatgtttacatgggcggagggatccctcccagctgacagccacaccgcgccggcccttctttttttaaagagcctagccacgggcgctgactggccggcagccgggcgcgtcatcctccgggggcggggcccgggccgcattgtctcgtctagggccggctggacgccccagaggccggacctgggcaaccccagcctggaggtgccggggccggagctcccagagggctgggtgcgaggcctaggcggggtcaggttcgggttcctaggccatagcggagctgcagcccaggcggccggagcggaacccagccccgctccgagtgccacgtctccaggaaccccctccttactcttggacaacactccgcccccgcccgggcctccgtcccccaaaccgccctcatttgtgcagcgccagatccttcggacacatccctaggtgtctccatcctcattcggtccatccaactcccagacctcacgtcaaccggctgcaccccactttccagcctgcgccccagatctgcagccttcgcccctagatacacccgcctggtgatgaggcgctcctcgcgttccttccggtaaccgcgttgcgaagaccacgctgccgggttgcaaacttggggggacttcctccctcccctccccctgggcgccgtgcaactgccctgggaccgggttctgggatgaggggggcagaccgggctccccagcggccggcgcagcacgtagcgcacgtgtagggtccgctccccaccccctcgccgcctctgacaacttttcagggctccaggtgtccgtgagcctcccttccgccctggcctccggtctctgccttgctcgtgcttctaccaccacccttcccctcccaacccggtggatcctctcgtctcccccagtctccagtgcaccggctttccctcgtcctctgcgcagtccatctcagctcatctctccaattcaatgccatcatctctcctcaccatctctcggtgccctggaatgtttgctgtcagatgtcccctgtgaaacccacaaacgcttgcgatttggcctccttgttttattttgtgtagtcctacaacgtcttgttactaccccctattacaacacttataactcagtatttgtcttttttccgcggtgtccctgcactctccccatacatattcctctcctgccagattgtaagcctctagagggaagaagtaa

SEQ ID NO: 463162 - DNA, 389 bp, Homo sapiens
gttggatccggttggatccggttggatccgaattcggatccaaaaattcagccctgaaatcaggcacatctgttcgttggactaaacccacaggttagttcagtcaaagcaggcaacccccttgtgggcactgaccctgccactggggtcatggcggttgtggcagctggggaggtttggccccaacagccctcctgtgcctgcttccctgtgtgtcggggtcctccagggagctgacccagaggtggaggccacggaggcagggtctctggggactgtcggggggtacagagggagaaggctctgcaagagctccctggcaatacccccttgtgtaattgctttgtgtgcgacagggaggaagtttcaataaagcagcaacaagcttc

SEQ ID NO: 463163 - DNA, 506 bp, Homo sapiens
aggccttaaaggctcccaaaaagggggttcctgccggtccacccagtgaagccctgtctttgccatcgaagaccccagaggggggcccagcaccacccccatactcagaggtgtgaccctcgccaggccccagccccagtgctgggaggggtggagctgcctcataatctgcttttttgctttggtggcccctgtggcctgggtgggccctcccgcccctccctggcaggacaatctgcttgtgtctccctcgctggcctgctcctcctgcagggcctgtgagctgctcacaactgggtcaacgctttaggctgagtcactcctcgggtctctccataattcagcccaacaatgcttggtttatttcaatcagctctgacacttgtttagacgattggccattctaaagttggtgagtttgtcaagcaactatcgacttgatcagttcagccaagcaactgacaaatcaaaaacccacttgtcagttcagtaaaataatttggtca

SEQ ID NO: 463164 - DNA, 1018 bp, Homo sapiens
ggcaatggggacaaagtcctccctcgtcccctgccgcagggttgttgagaaaaggtgaaatgggggagggatccccactactggcttccctgctgtacaccactaaggtgggaggggctggtcggggggccgtgatgcaggctcagctgactgatgctttgctttgcctccagatcatgagcgtcttgttgttcatcgagcactcggtagaggtggcccatggcaaggcgtcctgcaagctctcccagatgggctacctcaggatcggccgattcctcattgctctcaggccactccccagggatgccttcctcagcctcaccctggctgaagtggaccccagcctgcacctccagcccagcaccctctctgacctgatctccagcttcctgctcatcaccatgctcttcatcatcagcctgagcctactgatcggcgtagtcaagaaccgggagaagtacctgctgcccttcctgtccctgcaaatcatggactatctcctgtgcctgctcaccctgctgggctcctacattgagctgcccgcctacctcaagttggcctcccggagccgtgctagctcctccaagttccccctgatgacgctgcagctgctggacttctgcctgagcatcctgaccctctgcagctcctacatggaagtgcccacctatctcaacttcaagtccatgaaccacatggaggatatgcctcataaccagttcatcaagatgatgatcatcttttccatcgccttcatcactgtccttatcttcaaggtctacatgttcaagtgcgtgtggcggtgctacagattgatcaagtgcatgaactcggtggaggagaagagaaactccaagatgctccagaagtctcatatcgattccaggaggcgcagagaaaactaagatgccacctctgccttagaggagtgtacagttcagacacatagatacaattacaacttggtgtgaagcacagggacaataagcacagaggaaggacctggcctcttctcagg

SEQ ID NO: 463165 - DNA, 431 bp, Homo sapiens
  misc_feature (269)..(269): n is a, c, g, or t
  misc_feature (271)..(271): n is a, c, g, or t
  misc_feature (309)..(310): n is a, c, g, or t
  misc_feature (312)..(312): n is a, c, g, or t
  misc_feature (316)..(316): n is a, c, g, or t
  misc_feature (348)..(348): n is a, c, g, or t
  misc_feature (352)..(352): n is a, c, g, or t
  misc_feature (356)..(356): n is a, c, g, or t
  misc_feature (358)..(358): n is a, c, g, or t
  misc_feature (379)..(379): n is a, c, g, or t
  misc_feature (384)..(384): n is a, c, g, or t
  misc_feature (392)..(392): n is a, c, g, or t
  misc_feature (405)..(405): n is a, c, g, or t
  misc_feature (413)..(413): n is a, c, g, or t
  misc_feature (415)..(415): n is a, c, g, or t
gcagcagcttccccttctctgccctgctccaggcaccaggctctttccccttcagtgtctcagaggaggggacggcagcaccatggacccccgcttgtccactgtccgccagacctgctgctgcttcaatgtccgcatcgcaaccaccgccctggccatctaccatgtgatcatgagcgtcttgttgttcatcgagcactcggtagaggtggcccatggcaaggcgtcctgcaagctctcccagatgggctacctcaggatcgattatntnttcaattcagaagaaaaaggatgagccgcagcatgagnngnagcngctagatactagaacgttactgttgtactaanatcngatntnatcattcggaaagataggganaagantaagggtnccccgccaatagnaaaaggantntgcgaatgggcgggaa

SEQ ID NO: 463166 - DNA, 2090 bp, Homo sapiens
ggcctgggctttcctgtgcatcctcatgtccccaaaccagtggttccccaagtgtggtcctgggagcctggctggggtcccaggggcacccctgagcacctccctgctctccttgcctttcagctgacctgatctccagcttcctgctcatcaccatgctcttcatcatcagcctgagcctactgatcggcgtagtcaagaaccgggagaagtacctgctgcccttcctgtccctgcaaatcatggactatctcctgtgcctgctcaccctgctgggctcctacattgagctgcccgcctacctcaagttggcctcccggagccgtgctagctcctccaagttccccctgatgacgctgcagctgctggacttctgcctgagcatcctgaccctctgcagctcctacatggaagtgcccacctatctcaacttcaagtccatgaaccacatgaattacctccccagccaggaggatatgcctcataaccagttcatcaagatgatgatcatcttttccatcgccttcatcactgtccttatcttcaaggtctacatgttcaagtgcgtgtggcggtgctacagattgatcaagtgcatgaactcggtggaggagaagagaaactccaagatgctccagaaggtggtcctgccgtcctacgaggaagccctgtctttgccatcgaagaccccagaggggggcccagcaccacccccatactcagaggtgtgaccctcgccaggccccagccccagtgctgggaggggtggagctgcctcataatctgcttttttgctttggtggcccctgtggcctgggtgggccctcccgcccctccctggcaggacaatctgcttgtgtctccctcgctggcctgctcctcctgcagggcctgtgagctgctcacaactgggtcaacgctttaggctgagtcactcctcgggtctctccataattcagcccaacaatgcttggtttatttcaatcagctctgacacttgtttagacgattggccattctaaagttggtgagtttgtcaagcaactatcgacttgatcagttcagccaagcaactgacaaatcaaaaacccacttgtcagttcagtaaaataatttggtcaaacaacagtctattgcattgatttataaatagttgtcagttcacatagcaatttaatcaagtaatcattaattagttaccccctatatataaatatatgtaatcaatttcttcaaatagcttgcttacatgataatcaattagccaaccatgagtcatttagaatagtgataaatagaatacacagaatagtgatgaaattcaatttaaaaaatcacgttagcctccaaaccatttaattcaaatgaacccatcaactggatgccaactctggcgaatgtaggacctctgagtggctgtataattgttaattcaaatgaaattcatttaaacagttgacaaactgtcattcaacaattagctccaggaaataacagttatttcatcataaaacagtcccttcaaacacacaattgttctgctgaagagttgtcatcaacaatccaatgctcacctattcagttgctctgtggtcagtgtggctgcatagcagtggattccatgaaaggagtcattttagtgatgagctgccagtccattcccaggccaggctgtcgctggccatccattcagtcgattcagtcataggcgaatctgttctgcccgaggcttgtggtcaagcaaaaattcagccctgaaatcaggcacatctgttcgttggactaaacccacaggttagttcagtcaaagcaggcaacccccttgtgggcactgaccctgccactggggtcatggcggttgtggcagctggggaggtttggccccaacagccctcctgtgcctgcttccctgtgtgtcggggtcctccagggagctgacccagaggtggaggccacggaggcagggtctctggggactgtcggggggtacagagggagaaggctctgcaagagctccctggcaatacccccttgtgtaattgctttgtgtgcgacagggaggaagtttcaataaagcagcaacaagcttc

SEQ ID NO: 463167 - DNA, 1997 bp, Homo sapiens
ggcctgggctttcctgtgcatcctcatgtccccaaaccagtggttccccaagtgtggtcctgggagcctggctggggtcccaggggcacccctgagcacctccctgctctccttgcctttcagctgacctgatctccagcttcctgctcatcaccatgctcttcatcatcagcctgagcctactgatcggcgtagtcaagaaccgggagaagtacctgctgcccttcctgtccctgcaaatcatggactatctcctgtgcctgctcaccctgctgggctcctacattgacatcctgaccctctgcagctcctacatggaagtgcccacctatctcaacttcaagtccatgaaccacatgaattacctccccagccaggaggatatgcctcataaccagttcatcaagatgatgatcatcttttccatcgccttcatcactgtccttatcttcaaggtctacatgttcaagtgcgtgtggcggtgctacagattgatcaagtgcatgaactcggtggaggagaagagaaactccaagatgctccagaaggtggtcctgccgtcctacgaggaagccctgtctttgccatcgaagaccccagaggggggcccagcaccacccccatactcagaggtgtgaccctcgccaggccccagccccagtgctgggaggggtggagctgcctcataatctgcttttttgctttggtggcccctgtggcctgggtgggccctcccgcccctccctggcaggacaatctgcttgtgtctccctcgctggcctgctcctcctgcagggcctgtgagctgctcacaactgggtcaacgctttaggctgagtcactcctcgggtctctccataattcagcccaacaatgcttggtttatttcaatcagctctgacacttgtttagacgattggccattctaaagttggtgagtttgtcaagcaactatcgacttgatcagttcagccaagcaactgacaaatcaaaaacccacttgtcagttcagtaaaataatttggtcaaacaacagtctattgcattgatttataaatagttgtcagttcacatagcaatttaatcaagtaatcattaattagttaccccctatatataaatatatgtaatcaatttcttcaaatagcttgcttacatgataatcaattagccaaccatgagtcatttagaatagtgataaatagaatacacagaatagtgatgaaattcaatttaaaaaatcacgttagcctccaaaccatttaattcaaatgaacccatcaactggatgccaactctggcgaatgtaggacctctgagtggctgtataattgttaattcaaatgaaattcatttaaacagttgacaaactgtcattcaacaattagctccaggaaataacagttatttcatcataaaacagtcccttcaaacacacaattgttctgctgaagagttgtcatcaacaatccaatgctcacctattcagttgctctgtggtcagtgtggctgcatagcagtggattccatgaaaggagtcattttagtgatgagctgccagtccattcccaggccaggctgtcgctggccatccattcagtcgattcagtcataggcgaatctgttctgcccgaggcttgtggtcaagcaaaaattcagccctgaaatcaggcacatctgttcgttggactaaacccacaggttagttcagtcaaagcaggcaacccccttgtgggcactgaccctgccactggggtcatggcggttgtggcagctggggaggtttggccccaacagccctcctgtgcctgcttccctgtgtgtcggggtcctccagggagctgacccagaggtggaggccacggaggcagggtctctggggactgtcggggggtacagagggagaaggctctgcaagagctccctggcaatacccccttgtgtaattgctttgtgtgcgacagggaggaagtttcaataaagcagcaacaagcttc

SEQ ID NO: 463168 - DNA, 944 bp, Homo sapiens
cccctatatatttatatatagggggtaactaattaataatcattaattagttaccccctatatataaatatatgtaatcaatttcttcaaatagcttgcttacatgataatcaattagccaaccatgagtcatttagaatagtgataaatagaatacacagaatagtgatgaaattcaatttaaaaaatcacgttagcctccaaaccatttaattcaaatgaacccatcaactggatgccaactctggcgaatgtaggacctctgagtggctgtataattgttaattcaaatgaaattcatttaaacagttgacaaactgtcattcaacaattagctccaggaaataacagttatttcatcataaaacagtcccttcaaacacacaattgttctgctgaagagttgtcatcaacaatccaatgctcacctattcagttgctctgtggtcagtgtggctgcatagcagtggattccatgaaaggagtcattttagtgatgagctgccagtccattcccaggccaggctgtcgctggccatccattcagtcgattcagtcataggcgaatctgttctgcccgaggcttgtggtcaagcaaaaattcagccctgaaatcaggcacatctgttcgttggactaaacccacaggttagttcagtcaaagcaggcaacccccttgtgggcactgaccctgccactggggtcatggcggttgtggcagctggggaggtttggccccaacagccctcctgtgcctgcttccctgtgtgtcggggtcctccagggagctgacccagaggtggaggccacggaggcagggtctctggggactgtcggggggtacagagggagaaggctctgcaagagctccctggcaatacccccttgtgtaattgctttgtgtgcgacagggaggaagtttcaataaagcagcaacaagcttc

SEQ ID NO: 463169 - DNA, 1278 bp, Homo sapiens
gcagcagcttccccttctctgccctgctccaggcaccaggctctttccccttcagtgtctcagaggaggggacggcagcaccatggacccccgcttgtccactgtccgccagacctgctgctgcttcaatgtccgcatcgcaaccaccgccctggccatctaccatgtgatcatgagcgtcttgttgttcatcgagcactcggtagaggtggcccatggcaaggcgtcctgcaagctctcccagatgggctacctcaggatcgctgacctgatctccagcttcctgctcatcaccatgctcttcatcatcagcctgagcctactgatcggcgtagtcaagaaccgggagaagtacctgctgcccttcctgtccctgcaaatcatggactatctcctgtgcctgctcaccctgctgggctcctacattgagctgcccgcctacctcaagttggcctcccggagccgtgctagctcctccaagttccccctgatgacgctgcagctgctggacttctgcctgagcatcctgaccctctgcagctcctacatggaagtgcccacctatctcaacttcaagtccatgaaccacatgaattacctccccagccaggaggatatgcctcataaccagttcatcaagatgatgatcatcttttccatcgccttcatcactgtccttatcttcaaggtctacatgttcaagtgcgtgtggcggtgctacagattgatcaagtgcatgaactcggtggaggagaagagaaactccaagatgctccagaaggtggtcctgccgtcctacgaggaagccctgtctttgccatcgaagaccccagaggggggcccagcaccacccccatactcagaggtgtgaccctcgccaggccccagccccagtgctgggaggggtggagctgcctcataatctgcttttttgctttggtggcccctgtggcctgggtgggccctcccgcccctccctggcaggacaatctgcttgtgtctccctcgctggcctgctcctcctgcagggcctgtgagctgctcacaactgggtcaacgctttaggctgagtcactcctcgggtctcctcctcccaccccaaggcatcaagcccttctcgcctggcagctcgaagtagaaccccttcaagtaaattatttctcaatggccaatcagaacaggagggcagagagaaagagaaagaagaagacagagagagaggagaggaaacgccgagagaggaagggagagagaaagaagaaaagaagcacagacgaa

SEQ ID NO: 463170 - DNA, 1071 bp, Homo sapiens
gcagcagcttccccttctctgccctgctccaggcaccaggctctttccccttcagtgtctcagaggaggggacggcagcaccatggacccccgcttgtccactgtccgccagacctgctgctgcttcaatgtccgcatcgcaaccaccgccctggccatctaccatgtgatcatgagcgtcttgttgttcatcgagcactcggtagaggtggcccatggcaaggcgtcctgcaagctctcccagatgggctacctcaggatcgctgacctgatctccagcttcctgctcatcaccatgctcttcatcatcagcctgagcctactgatcggcgtagtcaagaaccgggagaagtacctgctgcccttcctgtccctgcaaatcatggactatctcctgtgcctgctcaccctgctgggctcctacattgagctgcccgcctacctcaagttggcctcccggagccgtgctagctcctccaagttccccctgatgacgctgcagctgctggacttctgcctgagcatcctgaccctctgcagctcctacatggaagtgcccacctatctcaacttcaagtccatgaaccacatgaattacctccccagccaggaggatatgcctcataaccagttcatcaagatgatgatcatcttttccatcgccttcatcactgtccttatcttcaaggtctacatgttcaagtgcgtgtggcggtgctacagattgatcaagtgcatgaactcggtggaggagaagagaaactccaagatgctccagaaggtggtcctgccgtcctacgaggaagccctgtctttgccatcgaagaccccagaggggggcccagcaccacccccatactcagaggtgtgaccctcgccaggccccagccccagtgctgggaggggtggagctgcctcataatctgcttttttgctttggtggcccctgtggcctgggtgggccctcccgcccctccctggcaggacaatctgcttgtgtctccctcgctgacccacactcatctgggcaaccccttccttacagcctcggatcacctccttggcctctac

SEQ ID NO: 463171 - DNA, 629 bp, Homo sapiens
gcagcagcttccccttctctgccctgctccaggcaccaggctctttccccttcagtgtctcagaggaggggacggcagcaccatggacccccgcttgtccactgtccgccagacctgctgctgcttcaatgtccgcatcgcaaccaccgccctggccatctaccatgtgatcatgagcgtcttgttgttcatcgagcactcggtagaggtggcccatggcaaggcgtcctgcaagctctcccagatgggctacctcaggatcgctgacctgatctccagcttcctgctcatcaccatgctcttcatcatcagcctgagcctactgatcggcgtagtcaagaaccgggagaagtacctgctgcccttcctgtccctgcaaatcatggactatctcctgtgcctgctcaccctgctgggctcctacattgagctgcccgcctacctcaagttggcctcccggagccgtgctggagctgacccagaggtggaggccacggaggcagggtctctggggactgtcggggggtacagagggagaaggctctgcaagagctccctggcaatacccccttgtgtaattgctttgtgtgcgacagggaggaagtttcaataaagcagcaacaagcttc

SEQ ID NO: 463172 - DNA, 449 bp, Homo sapiens
caaccagaatgagaggtccgagcaggagcagctggatgctggcttctggagagagtggtggctcctgcctggcatatgtcctaggcctgctggagcgtgagaaggacgctcagcaaagcacagcctgacctgggcctttttccaggtctacatgttcaagtgcgtgtggcggtgctacagattgatcaagtgcatgaactcggtggaggagaagagaaactccaagatgctccagaaggtgagtgtggctgcaggtgggtgccagccctgtcactaactccctgtgccatttgggtcaagtttccttccctctctggaccttggtttctctatttgtaagatgagggttggaacagaagaaatgtgttctctttcagttctggtagtctaagattcattcactcactcattcatttattcagtatttactgcctctcactctttgctag

SEQ ID NO: 463173 - DNA, 828 bp, Homo sapiens
gcagcagcttccccttctctgccctgctccaggcaccaggctctttccccttcagtgtctcagaggaggggacggcagcaccatggacccccgcttgtccactgtccgccagacctgctgctgcttcaatgtccgcatcgcaaccaccgccctggccatctaccatgtgatcatgagcgtcttgttgttcatcgagcactcggtagaggtggcccatggcaaggcgtcctgcaagctctcccagatgggctacctcaggatcgctgacctgatctccagcttcctgctcatcaccatgctcttcatcatcagcctgagcctactgatcggcgtagtcaagaaccgggagaagtacctgctgcccttcctgtccctgcaaatcatggactatctcctgtgcctgctcaccctgctgggctcctacattgagctgcccgcctacctcaagttggcctcccggagccgtgctagctcctccaagttccccctgatgacgctgcagctgctggacttctgcctgagcatcctgaccctctgcagctcctacatggaagtgcccacctatctcaacttcaagtccatgaaccacatgaattacctccccagccaggaggatatgcctcataaccagttcatcaagatgatgatcatcttttccatcgccttcatcactgtccttatcttcaaggtctacatgttcaagtgcgtgtggcggtgctacagattgatcaagtgcatgaactcggtggaggagaagagaaactccaagatgctccagaaggtcctgccgtcctactctgaaagtgggtaccgagctgaatcgaaaag

SEQ ID NO: 463174 - DNA, 397 bp, Homo sapiens
agcaaattgagtcaaatcctgctctttgagccctgatagatggggatggttcccttacgtctcctgggacaccaagactcctctcattcagggcctgggtcttatccactccctgtccccagagtgtcactcagagggaggtgacctcaactgaggagggcagggaaggtttgggagagggtgggaaggggatgcatgaggatatcaggctgggtggcggagtgttggctgcatgcaggggacacttgacggtgctgggcctacctttcagaaccgggagaagtacctgctgcccttcctgtccctgcaaatcatggactatctcctgtgcctgctcaccctgctgggctcctacattgagctgcccgcctacctcaagttggcctcccggagccgt

SEQ ID NO: 463175 - DNA, 2230 bp, Homo sapiens
gcagcagcttccccttctctgccctgctccaggcaccaggctctttccccttcagtgtctcagaggaggggacggcagcaccatggacccccgcttgtccactgtccgccagacctgctgctgcttcaatgtccgcatcgcaaccaccgccctggccatctaccatgtgatcatgagcgtcttgttgttcatcgagcactcggtagaggtggcccatggcaaggcgtcctgcaagctctcccagatgggctacctcaggatcgctgacctgatctccagcttcctgctcatcaccatgctcttcatcatcagcctgagcctactgatcggcgtagtcaagaaccgggagaagtacctgctgcccttcctgtccctgcaaatcatggactatctcctgtgcctgctcaccctgctgggctcctacattgagctgcccgcctacctcaagttggcctcccggagccgtgctagctcctccaagttccccctgatgacgctgcagctgctggacttctgcctgagcatcctgaccctctgcagctcctacatggaagtgcccacctatctcaacttcaagtccatgaaccacatgaattacctccccagccaggaggatatgcctcataaccagttcatcaagatgatgatcatcttttccatcgccttcatcactgtccttatcttcaaggtctacatgttcaagtgcgtgtggcggtgctacagattgatcaagtgcatgaactcggtggaggagaagagaaactccaagatgctccagaaggtggtcctgccgtcctacgaggaagccctgtctttgccatcgaagaccccagaggggggcccagcaccacccccatactcagaggtgtgaccctcgccaggccccagccccagtgctgggaggggtggagctgcctcataatctgcttttttgctttggtggcccctgtggcctgggtgggccctcccgcccctccctggcaggacaatctgcttgtgtctccctcgctggcctgctcctcctgcagggcctgtgagctgctcacaactgggtcaacgctttaggctgagtcactcctcgggtctctccataattcagcccaacaatgcttggtttatttcaatcagctctgacacttgtttagacgattggccattctaaagttggtgagtttgtcaagcaactatcgacttgatcagttcagccaagcaactgacaaatcaaaaacccacttgtcagttcagtaaaataatttggtcaaacaacagtctattgcattgatttataaatagttgtcagttcacatagcaatttaatcaagtaatcattaattagttaccccctatatataaatatatgtaatcaatttcttcaaatagcttgcttacatgataatcaattagccaaccatgagtcatttagaatagtgataaatagaatacacagaatagtgatgaaattcaatttaaaaaatcacgttagcctccaaaccatttaattcaaatgaacccatcaactggatgccaactctggcgaatgtaggacctctgagtggctgtataattgttaattcaaatgaaattcatttaaacagttgacaaactgtcattcaacaattagctccaggaaataacagttatttcatcataaaacagtcccttcaaacacacaattgttctgctgaagagttgtcatcaacaatccaatgctcacctattcagttgctctgtggtcagtgtggctgcatagcagtggattccatgaaaggagtcattttagtgatgagctgccagtccattcccaggccaggctgtcgctggccatccattcagtcgattcagtcataggcgaatctgttctgcccgaggcttgtggtcaagcaaaaattcagccctgaaatcaggcacatctgttcgttggactaaacccacaggttagttcagtcaaagcaggcaacccccttgtgggcactgaccctgccactggggtcatggcggttgtggcagctggggaggtttggccccaacagccctcctgtgcctgcttccctgtgtgtcggggtcctccagggagctgacccagaggtggaggccacggaggcagggtctctggggactgtcggggggtacagagggagaaggctctgcaagagctccctggcaatacccccttgtgtaattgctttgtgtgcgacagggaggaagtttcaataaagcagcaacaagcttc

SEQ ID NO: 463176 - DNA, 2548 bp, Homo sapiens
  misc_feature (2279)..(2279): n is a, c, g, or t
  misc_feature (2283)..(2283): n is a, c, g, or t
  misc_feature (2285)..(2285): n is a, c, g, or t
  misc_feature (2289)..(2289): n is a, c, g, or t
  misc_feature (2294)..(2294): n is a, c, g, or t
  misc_feature (2302)..(2304): n is a, c, g, or t
  misc_feature (2307)..(2307): n is a, c, g, or t
  misc_feature (2328)..(2328): n is a, c, g, or t
  misc_feature (2339)..(2339): n is a, c, g, or t
  misc_feature (2351)..(2351): n is a, c, g, or t
  misc_feature (2365)..(2366): n is a, c, g, or t
  misc_feature (2368)..(2368): n is a, c, g, or t
  misc_feature (2393)..(2393): n is a, c, g, or t
  misc_feature (2407)..(2407): n is a, c, g, or t
  misc_feature (2411)..(2411): n is a, c, g, or t
  misc_feature (2414)..(2414): n is a, c, g, or t
gcagcagcttccccttctctgccctgctccaggcaccaggctctttccccttcagtgtctcagaggaggggacggcagcaccatggacccccgcttgtccactgtccgccagacctgctgctgcttcaatgtccgcatcgcaaccaccgccctggccatctaccatgtgatcatgagcgtcttgttgttcatcgagcactcggtagaggtggcccatggcaaggcgtcctgcaagctctcccagatgggctacctcaggatcgctgacctgatctccagcttcctgctcatcaccatgctcttcatcatcagcctgagcctactgatcggcgtagtcaagaaccgggagaagtacctgctgcccttcctgtccctgcaaatcatggactatctcctgtgcctgctcaccctgctgggctcctacattgagctgcccgcctacctcaagttggcctcccggagccgtgctagctcctccaagttccccctgatgacgctgcagctgctggacttctgcctgagcatcctgaccctctgcagctcctacatggaagtgcccacctatctcaacttcaagtccatgaaccacatgaattacctccccagccaggaggatatgcctcataaccagttcatcaagatgatgatcatcttttccatcgccttcatcactgtccttatcttcaaggtctacatgttcaagtgcgtgtggcggtgctacagattgatcaagtgcatgaactcggtggaggagaagagaaactccaagatgctccagaaggtggtcctgccgtcctacgaggaagccctgtctttgccatcgaagaccccagaggggggcccagcaccacccccatactcagaggtgtgaccctcgccaggccccagccccagtgctgggaggggtggagctgcctcataatctgcttttttgctttggtggcccctgtggcctgggtgggccctcccgcccctccctggcaggacaatctgcttgtgtctccctcgctggcctgctcctcctgcagggcctgtgagctgctcacaactgggtcaacgctttaggctgagtcactcctcgggtctctccataattcagcccaacaatgcttggtttatttcaatcagctctgacacttgtttagacgattggccattctaaagttggtgagtttgtcaagcaactatcgacttgatcagttcagccaagcaactgacaaatcaaaaacccacttgtcagttcagtaaaataatttggtcaaacaacagtctattgcattgatttataaatagttgtcagttcacatagcaatttaatcaagtaatcattaattagttaccccctatatataaatatatgtaatcaatttcttcaaatagcttgcttacatgataatcaattagccaaccatgagtcatttagaatagtgataaatagaatacacagaatagtgatgaaattcaatttaaaaaatcacgttagcctccaaaccatttaattcaaatgaacccatcaactggatgccaactctggcgaatgtaggacctctgagtggctgtataattgttaattcaaatgaaattcatttaaacagttgacaaactgtcattcaacaattagctccaggaaataacagttatttcatcataaaacagtcccttcaaacacacaattgttctgctgaagagttgtcatcaacaatccaatgctcacctattcagttgctctgtggtcagtgtggctgcatagcagtggattccatgaaaggagtcattttagtgatgagctgccagtccattcccaggccaggctgtcgctggccatccattcagtcgattcagtcataggcgaatctgttctgcccgaggcttgtggtcaagcaaaaattcagccctgaaatcaggcacatctgttcgttggactaaacccacaggttagttcagtcaaagcaggcaacccccttgtgggcactgaccctgccactggggtcatggcggttgtggcagctggggaggtttggccccaacagccctcctgtgcctgcttccctgtgtgtcggggtcctccagggagctgacccagaggtggaggccacggaggcagggtctctggggactgtcggggggtacagagggagaaggctctgcaagagctccctggcaatacccccttgtgtaattgctttgtgtgcgacagggaggaagtttcaataaagcagcaacaagcttccaaaaaaaaaaaaaaaaaaaaaaaaaaaactcccggggcccctaaggcngggngngggnaaaangagagggnnnggnaaggggcccggggccaaaagngggtccctggncccaagttttcntggcccccaagggnngnaaaccgccggggctccccccaatangggggagccggaantaanttntccgaataagcccggggtaacccgggcttaaggcgactgtgcgcacagaaaaatagccagagacgacgaaacacaaacgagagacagagaaacgcagagccagagggttacaccacgcttggcaccacacaaag

SEQ ID NO: 463177 - DNA, 2212 bp, Homo sapiens
gcagcagcttccccttctctgccctgctccaggcaccaggctctttccccttcagtgtctcagaggaggggacggcagcaccatggacccccgcttgtccactgtccgccagacctgctgctgcttcaatgtccgcatcgcaaccaccgccctggccatctaccatgtgatcatgagcgtcttgttgttcatcgagcactcggtagaggtggcccatggcaaggcgtcctgcaagctctcccagatgggctacctcaggatcgctgacctgatctccagcttcctgctcatcaccatgctcttcatcatcagcctgagcctactgatcggcgtagtcaagaaccgggagaagtacctgctgcccttcctgtccctgcaaatcatggactatctcctgtgcctgctcaccctgctgggctcctacattgagctgcccgcctacctcaagttggcctcccggagccgtgctagctcctccaagttccccctgatgacgctgcagctgctggacttctgcctgagcatcctgaccctctgcagctcctacatggaagtgcccacctatctcaacttcaagtccatgaaccacatggaggatatgcctcataaccagttcatcaagatgatgatcatcttttccatcgccttcatcactgtccttatcttcaaggtctacatgttcaagtgcgtgtggcggtgctacagattgatcaagtgcatgaactcggtggaggagaagagaaactccaagatgctccagaaggtggtcctgccgtcctacgaggaagccctgtctttgccatcgaagaccccagaggggggcccagcaccacccccatactcagaggtgtgaccctcgccaggccccagccccagtgctgggaggggtggagctgcctcataatctgcttttttgctttggtggcccctgtggcctgggtgggccctcccgcccctccctggcaggacaatctgcttgtgtctccctcgctggcctgctcctcctgcagggcctgtgagctgctcacaactgggtcaacgctttaggctgagtcactcctcgggtctctccataattcagcccaacaatgcttggtttatttcaatcagctctgacacttgtttagacgattggccattctaaagttggtgagtttgtcaagcaactatcgacttgatcagttcagccaagcaactgacaaatcaaaaacccacttgtcagttcagtaaaataatttggtcaaacaacagtctattgcattgatttataaatagttgtcagttcacatagcaatttaatcaagtaatcattaattagttaccccctatatataaatatatgtaatcaatttcttcaaatagcttgcttacatgataatcaattagccaaccatgagtcatttagaatagtgataaatagaatacacagaatagtgatgaaattcaatttaaaaaatcacgttagcctccaaaccatttaattcaaatgaacccatcaactggatgccaactctggcgaatgtaggacctctgagtggctgtataattgttaattcaaatgaaattcatttaaacagttgacaaactgtcattcaacaattagctccaggaaataacagttatttcatcataaaacagtcccttcaaacacacaattgttctgctgaagagttgtcatcaacaatccaatgctcacctattcagttgctctgtggtcagtgtggctgcatagcagtggattccatgaaaggagtcattttagtgatgagctgccagtccattcccaggccaggctgtcgctggccatccattcagtcgattcagtcataggcgaatctgttctgcccgaggcttgtggtcaagcaaaaattcagccctgaaatcaggcacatctgttcgttggactaaacccacaggttagttcagtcaaagcaggcaacccccttgtgggcactgaccctgccactggggtcatggcggttgtggcagctggggaggtttggccccaacagccctcctgtgcctgcttccctgtgtgtcggggtcctccagggagctgacccagaggtggaggccacggaggcagggtctctggggactgtcggggggtacagagggagaaggctctgcaagagctccctggcaatacccccttgtgtaattgctttgtgtgcgacagggaggaagtttcaataaagcagcaacaagcttc

SEQ ID NO: 463178 - DNA, 1261 bp, Homo sapiens
gcagcagcttccccttctctgccctgctccaggcaccaggctctttccccttcagtgtctcagaggaggggacggcagcaccatggacccccgcttgtccactgtccgccagacctgctgctgcttcaatgtccgcatcgcaaccaccgccctggccatctaccatgtgatcatgagcgtcttgttgttcatcgagcactcggtagaggtggcccatggcaaggcgtcctgcaagctctcccagatgggctacctcaggatcgctgacctgatctccagcttcctgctcatcaccatgctcttcatcatcagcctgagcctactgatcggcgtagtcaagaaccgggagaagtacctgctgcccttcctgtccctgcaaatcatggactatctcctgtgcctgctcaccctgctgggctcctacattgagctgcccgcctacctcaagttggcctcccggagccgtgctagctcctccaagttccccctgatgacgctgcagctgctggacttctgcctgagcatcctgaccctctgcagctcctacatggaagtgcccacctatctcaacttcaagtccatgaaccacatgaattacctccccagccaggaggatatgcctcataaccagttcatcaagatgatgatcatcttttccatcgccttcatcactgtccttatcttcaaggtctacatgttcaagtgcgtgtggcggtgctacagattgatcaagtgcatgaactcggtggaggagaagagaaactccaagatgctccagaaggtggtcctgccgtcctacgaggaagccctgtctttgccatcgaagaccccagaggggggcccagcaccacccccatactcagaggtgtgaccctcgccaggccccagccccagtgctgggaggggtggagctgcctcataatctgcttttttgctttggtggcccctgtggcctgggtgggccctcccgcccctccctggcaggacaatctgcttgtgtctccctcgctggcctgctcctcctgcagggcctgtgagctgctcacaactgggtcaacgctttaggctgagtcactcctcgggtctctccataattcagcccaacaatgcttggtttatttcaatcagctctgacacttgtttagacgattggccattctaaagttggtgagtttgtcaagcaactatcgacttgatcagttcagccaagcaactgacaaatcaaaaacccacttgtcagttcagtaaaataatttggtca

SEQ ID NO: 463179 - DNA, 378 bp, Homo sapiens
gcacccctacagtcccagcagccagtccaggcccaggtgaccccgcagcctcaaaccccagttcagctcccgtctgtggctacccctcagtcatcgcagcaacagccgacgcctgtgcacgcccagcctcctggcacaccgctttccagcagcagcagcaagagtaactctgacttaggaatagagacagccagagagaaatgtgatcaatgaaggagacatctggagtgtgcgtgcttcttcagagggacgggtgatgggcagattggaaaaagcaccgcagatgggaaccttaatctttcttttctaaaattgatgctatgaaaatttgcgttttctgtaacttgtaaaaactaaaagttgcttgtctactgaaaa

SEQ ID NO: 463180 - DNA, 401 bp, Homo sapiens
gcggccgcctactactactactactgctcgaattcaaagcttctaacgatgtacggggacatgttctttttcattaaagagagaaatcaactattcaggaccggcccccacctttcctcaggagtcatttctgttccgcacaggcctgctgaactgggtgctttatatagggtaagtgtttctcattttttgttccctgtcctcaagccttaggggcaaaagaaacatccaagatttgaaatttcttttcttcttctcatctgcatggctgtagccatctctctgttctgcattatcttatgacaaaaaaaaaaattcttattttgaagcaaactcaaagctaggtcctgatgtctcaaggcacaggtactcgtacttaaaggtgagtctgaaatctgtgg

SEQ ID NO: 463181 - DNA, 2676 bp, Homo sapiens
cagaagagagacgaaaaaaaaactaggctaggacgaggccggggttaccacctccttgaaatgggctgagtccctcttgctcacccttgacttggaaaaaccagtttctcttttattgtctgttactaatctctattctaaaaattcagctcaattctcaaccatactccaaactctctcttttccagctacctttactccctctccttcaattccactttcctctgcttactttttttttttttctgacagggtctcactttgtcgcccaggcaggagtgcagtggctcaatcttgggctcactgcagcctcaacctcccagaggcggggtttcaccatgttgcccagactggtcttgaactcctgagcttaagcaatccacctgcctcggcctcccaaagtgttgggatcacaggcgtgagccaccgcatccggcctcatgttctttttcattaaagagagaaatcaactattcaggaccggcccccacctttcctcaggagtcatttctgttccgcacaggcctgctgaactgggtgctttatataggacactgtcatctctcaagtacccatcttggagggtacggaccccacatgagggtgaggctctctgcacactccagagtgaggactttaataatctagtggactgtacatgttgggaggggaagagcggggtgccgagggtctggagggagaagaattgactgccccttttgctcttggagttaagcagaaatctaaagagaaggcaaagaatcttgccttcctggcatcatttcctcctaccatcccaggccatcatttatttattacagccaacagactggcctctttcttccctttgactgggaatgggtcaaaggcggtgcaggaggaggatctggtccagataattcacaagcagggtgcattttcctctcattattgagaactgtgagtgtttatcaagaaggcagagcaggagaagatgaaccagtcttcttcccctcactacccagatctctgcctgccaacaagccccgtgttcaccctggcaaagagtctttacattcagaccaaggagagtgtgactccttctcagcactagctagaaacctcaagcccttgcttaagggcctttttcagagagacccaatgcccagaaggctagatgcgtggggaggagccacatacgagaaactgcctccctgcttcgggtcagaacaagccccaggaagaaagtatttcaaacaacaaggtgcatctgccccaacccatccagcctgcatgttggtgctgagaacagccttttatggggcttgcactgagccatgggcatgtctgaacacaacaaggaagaggccagagcagcaacagcacgcaaagggttgatgggcatttcttttaagacagagcagaaaactcttagatactttgcgtccttcctatttgactcagtctatgaaagccaggttagcttgctttcttcctccctaaatcctccatcctcatgaccaacaaagaaatagttgaatcattttccaggcacatcttggggaggatgtggggccattggaggctgtccttcctagataagtctttaggagtgagaacaaggagtcttaccctcctctgtccacccacccccatgaatgggcctggctccagccaggagttgtggtttttcctgagctcctcacctatctcttctggatttcacattggcaaacggggttgcaaagtgctcttcgtgctctttggacagtgccttgtggagaggaatgcccatgcccctgcattccaaggccttggtaagcaagctcagagtagctggatttttctaaagcaattgcagaacacctgctttttctttgtttcctctagaaaggaccaaccacgccgagctcagttatggcacacacagtgggacctagacaaagggagagggtgaccgacatcccaactaggtaaacacagaggaggttccacatggacttatctgggtggctgttttgaaaacgagaaacagtcaagagtccctggccccacagacccacctccccaactcagcactgtctgtctgtgcagcaggtgcaaggacgtgttgaactagctctctgcagcctccttggaggatgtgatcctatgggaggggtaggagtattcaggtccttgacatctcccaaatgtgtgattccgggatgccaaaggcctttggccaggtaatgcagtgtctacaggctgaggttgacatgcatccccaccctctgagaaaaagatcctcagacaatccatgtgcttctcttgtccttcattccaccggagtctgtctcatacccaaccagatttcagtggagtgaagttcaggaggcatggagctgacaaccatgaggcctcggcagccaccgccaccaccgccgccgccaccaccgtagcagcagcagcagcagcagcagcagcagcagcagcagcaagagtaactctgacttaggaatagagacagccagagagaaatgtgatcaatgaaggagacatctggagtgtgcgtgcttcttcagagggacgggtgatgggcagattggaaaaagcaccgcagatgggaaccttaatctttcttttctaaaattgatgctatgaaaatttgcgttttctgtaacttgtaaaaactaaaagttgcttgtctactgaaaa

SEQ ID NO: 463182 - DNA, 2320 bp, Homo sapiens
ggcatagtgggcagaagaatcttgaacaaggagtccagagcaggtcaagtctcctgatacaggttgtgactcatggttttttgtctctgcctgtagcagctacaggtctgtaaagcaaggggagagtgataaggaaagaactcacctttctggggctctctgacattaatgccacctcccatttgctttttgcagacactgtcatctctcaagtacccatcttggagggtacggaccccacatgagggtgaggctctctgcacactccagagtgaggactttaataatctagtggactgtacatgttgggaggggaagagcggggtgccgagggtctggagggagaagaattgactgccccttttgctcttggagttaagcagaaatctaaagagaaggcaaagaatcttgccttcctggcatcatttcctcctaccatcccaggccatcatttatttattacagccaacagactggcctctttcttccctttgactgggaatgggtcaaaggcggtgcaggaggaggatctggtccagataattcacaagcagggtgcattttcctctcattattgagaactgtgagtgtttatcaagaaggcagagcaggagaagatgaaccagtcttcttcccctcactacccagatctctgcctgccaacaagccccgtgttcaccctggcaaagagtctttacattcagaccaaggagagtgtgactccttctcagcactagctagaaacctcaagcccttgcttaagggcctttttcagagagacccaatgcccagaaggctagatgcgtggggaggagccacatacgagaaactgcctccctgcttcgggtcagaacaagccccaggaagaaagtatttcaaacaacaaggtgcatctgccccaacccatccagcctgcatgttggtgctgagaacagccttttatggggcttgcactgagccatgggcatgtctgaacacaacaaggaagaggccagagcagcaacagcacgcaaagggttgatgggcatttcttttaagacagagcagaaaactcttagatactttgcgtccttcctatttgactcagtctatgaaagccaggttagcttgctttcttcctccctaaatcctccatcctcatgaccaacaaagaaatagttgaatcattttccaggcacatcttggggaggatgtggggccattggaggctgtccttcctagataagtctttaggagtgagaacaaggagtcttaccctcctctgtccacccacccccatgaatgggcctggctccagccaggagttgtggtttttcctgagctcctcacctatctcttctggatttcacattggcaaacggggttgcaaagtgctcttcgtgctctttggacagtgccttgtggagaggaatgcccatgcccctgcattccaaggccttggtaagcaagctcagagtagctggatttttctaaagcaattgcagaacacctgctttttctttgtttcctctagaaaggaccaaccacgccgagctcagttatggcacacacagtgggacctagacaaagggagagggtgaccgacatcccaactaggtaaacacagaggaggttccacatggacttatctgggtggctgttttgaaaacgagaaacagtcaagagtccctggccccacagacccacctccccaactcagcactgtctgtctgtgcagcaggtgcaaggacgtgttgaactagctctctgcagcctccttggaggatgtgatcctatgggaggggtaggagtattcaggtccttgacatctcccaaatgtgtgattccgggatgccaaaggcctttggccaggtaatgcagtgtctacaggctgaggttgacatgcatccccaccctctgagaaaaagatcctcagacaatccatgtgcttctcttgtccttcattccaccggagtctgtctcatacccaaccagatttcagtggagtgaagttcaggaggcatggagctgacaaccatgaggcctcggcagccaccgccaccaccgccgccgccaccaccgtagcagcagcagcagcagcagcagcagcagcagcagcagcaagagtaactctgacttaggaatagagacagccagagagaaatgtgatcaatgaaggagacatctggagtgtgcgtgcttcttcagagggacgggtgatgggcagattggaaaaagcaccgcagatgggaaccttaatctttcttttctaaaattgatgctatgaaaatttgcgttttctgtaacttgtaaaaactaaaagttgcttgtctactgaaaa

SEQ ID NO: 463183 - DNA, 1056 bp, Homo sapiens
cagaagagagacgaaaaaaaaactaggctaggacgaggccggggttaccacctccttgaaatgggctgagtccctcttgctcacccttgacttggaaaaaccagtttctcttttattgtctgttactaatctctattctaaaaattcagctcaattctcaaccatactccaaactctctcttttccagctacctttactccctctccttcaattccactttcctctgcttactttttttttttttctgacagggtctcactttgtcgcccaggcaggagtgcagtggctcaatcttgggctcactgcagcctcaacctcccagaggcggggtttcaccatgttgcccagactggtcttgaactcctgagcttaagcaatccacctgcctcggcctcccaaagtgttgggatcacaggcgtgagccaccgcatccggcctcatgttctttttcattaaagagagaaatcaactattcaggaccggcccccacctttcctcaggagtcatttctgttccgcacaggcctgctgaactgggtgctttatataggacactgtcatctctcaagtacccatcttggagggtacggaccccacatgagggtgaggctctctgcacactccagaaaaggaccaaccacgccgagctcagttatggcacacacagtgggacctagacaaagggagagggtgaccgacatcccaactagatttcagtggagtgaagttcaggaggcatggagctgacaaccatgaggcctcggcagccaccgccaccaccgccgccgccaccaccgtagcagcagcagcagcagcagcagcagcagcagcagcagcaagagtaactctgacttaggaatagagacagccagagagaaatgtgatcaatgaaggagacatctggagtgtgcgtgcttcttcagagggacgggtgatgggcagattggaaaaagcaccgcagatgggaaccttaatctttcttttctaaaattgatgctatgaaaatttgcgttttctgtaacttgtaaaaactaaaagttgcttgtctactgaaaa

SEQ ID NO: 463184 - DNA, 980 bp, Homo sapiens
cagaagagagacgaaaaaaaaactaggctaggacgaggccggggttaccacctccttgaaatgggctgagtccctcttgctcacccttgacttggaaaaaccagtttctcttttattgtctgttactaatctctattctaaaaattcagctcaattctcaaccatactccaaactctctcttttccagctacctttactccctctccttcaattccactttcctctgcttactttttttttttttctgacagggtctcactttgtcgcccaggcaggagtgcagtggctcaatcttgggctcactgcagcctcaacctcccagaggcggggtttcaccatgttgcccagactggtcttgaactcctgagcttaagcaatccacctgcctcggcctcccaaagtgttgggatcacaggcgtgagccaccgcatccggcctcatgttctttttcattaaagagagaaatcaactattcaggaccggcccccacctttcctcaggagtcatttctgttccgcacaggcctgctgaactgggtgctttatataggaaaggaccaaccacgccgagctcagttatggcacacacagtgggacctagacaaagggagagggtgaccgacatcccaactagatttcagtggagtgaagttcaggaggcatggagctgacaaccatgaggcctcggcagccaccgccaccaccgccgccgccaccaccgtagcagcagcagcagcagcagcagcagcagcagcagcagcaagagtaactctgacttaggaatagagacagccagagagaaatgtgatcaatgaaggagacatctggagtgtgcgtgcttcttcagagggacgggtgatgggcagattggaaaaagcaccgcagatgggaaccttaatctttcttttctaaaattgatgctatgaaaatttgcgttttctgtaacttgtaaaaactaaaagttgcttgtctactgaaaa

SEQ ID NO: 463185 - DNA, 1032 bp, Homo sapiens
cagaagagagacgaaaaaaaaactaggctaggacgaggccggggttaccacctccttgaaatgggctgagtccctcttgctcacccttgacttggaaaaaccagtttctcttttattgtctgttactaatctctattctaaaaattcagctcaattctcaaccatactccaaactctctcttttccagctacctttactccctctccttcaattccactttcctctgcttactttttttttttttctgacagggtctcactttgtcgcccaggcaggagtgcagtggctcaatcttgggctcactgcagcctcaacctcccagaggcggggtttcaccatgttgcccagactggtcttgaactcctgagcttaagcaatccacctgcctcggcctcccaaagtgttgggatcacaggcgtgagccaccgcatccggcctcatgttctttttcattaaagagagaaatcaactattcaggaccggcccccacctttcctcaggagtcatttctgttccgcacaggcctgctgaactgggtgctttatataggacactgtcatctctcaagtacccatcttggagggtacggaccccacatgaggaaaggaccaaccacgccgagctcagttatggcacacacagtgggacctagacaaagggagagggtgaccgacatcccaactagatttcagtggagtgaagttcaggaggcatggagctgacaaccatgaggcctcggcagccaccgccaccaccgccgccgccaccaccgtagcagcagcagcagcagcagcagcagcagcagcagcagcaagagtaactctgacttaggaatagagacagccagagagaaatgtgatcaatgaaggagacatctggagtgtgcgtgcttcttcagagggacgggtgatgggcagattggaaaaagcaccgcagatgggaaccttaatctttcttttctaaaattgatgctatgaaaatttgcgttttctgtaacttgtaaaaactaaaagttgcttgtctactgaaaa

SEQ ID NO: 463186 - DNA, 1306 bp, Homo sapiens
atgaccagtgatttacgaaattcgaggcctccggtaaccccaagagagccaccaaggagcatttcaagaccaaggagagtgtgactccttctcagcactagctagaaacctcaagcccttgcttaagggcctttttcagagagacccaatgcccagaaggctagatgcgtggggaggagccacatacgagaaactgcctccctgcttcgggtcagaacaagccccaggaagaaagtatttcaaacaacaaggtgcatctgccccaacccatccagcctgcatgttggtgctgagaacagccttttatggggcttgcactgagccatgggcatgtctgaacacaacaaggaagaggccagagcagcaacagcacgcaaagggttgatgggcatttcttttaagacagagcagaaaactcttagatactttgcgtccttcctatttgactcagtctatgaaagccaggttagcttgctttcttcctccctaaatcctccatcctcatgaccaacaaagaaatagttgaatcattttccaggcacatcttggggaggatgtggggccattggaggctgtccttcctagataagtctttaggagtgagaacaaggagtcttaccctcctctgtccacccacccccatgaatgggcctggctccagccaggagttgtggtttttcctgagctcctcacctatctcttctggatttcacattggcaaacggggttgcaaagtgctcttcgtgctctttggacagtgccttgtggagaggaatgcccatgcccctgcattccaaggccttggtaagcaagctcagagtagctggatttttctaaagcaattgcagaacacctgctttttctttgtttcctctagaaaggaccaaccacgccgagctcagttatggcacacacagtgggacctagacaaagggagagggtgaccgacatcccaactagatttcagtggagtgaagttcaggaggcatggagctgacaaccatgaggcctcggcagccaccgccaccaccgccgccgccaccaccgtagcagcagcagcagcagcagcagcagcagcagcagcagcaagagtaactctgacttaggaatagagacagccagagagaaatgtgatcaatgaaggagacatctggagtgtgcgtgcttcttcagagggacgggtgatgggcagattggaaaaagcaccgcagatgggaaccttaatctttcttttctaaaattgatgctatgaaaatttgcgttttctgtaacttgtaaaaactaaaagttgcttgtctactgaaaa

SEQ ID NO: 463187 - DNA, 738 bp, Homo sapiens
agtggggcatactgcagcctcaacctcagaggcggggtttcaccatgttgcccagactggtcttgaactcctgagcttaagcaatccacctgcctcggcctcccaaagtgttgggatcacaggcgtgagccaccgcatccggcctcatgttctttttcattaaagagagaaatcaactattcaggaccggcccccacctttcctcaggagtcatttctgttccgcacaggcctgctgaactgggtgctttatataggacactgtcatctctcaagtacccatcttggagggtacggaccccacatgaggaaaggaccaaccacgccgagctcagttatggcacacacagtgggacctagacaaagggagagggtgaccgacatcccaactagatttcagtggagtgaagttcaggaggcatggagctgacaaccatgaggcctcggcagccaccgccaccaccgccgccgccaccaccgtagcagcagcagcagcagcagcagcagcagcagcagcagcaagagtaactctgacttaggaatagagacagccagagagaaatgtgatcaatgaaggagacatctggagtgtgcgtgcttcttcagagggacgggtgatgggcagattggaaaaagcaccgcagatgggaaccttaatctttcttttctaaaattgatgctatgaaaatttgcgttttctgtaacttgtaaaaactaaaagttgcttgtctactgaaaa

SEQ ID NO: 463188 - DNA, 1041 bp, Homo sapiens
cagaagagagacgaaaaaaaaactaggctaggacgaggccggggttaccacctccttgaaatgggctgagtccctcttgctcacccttgacttggaaaaaccagtttctcttttattgtctgttactaatctctattctaaaaattcagctcaattctcaaccatactccaaactctctcttttccagctacctttactccctctccttcaattccactttcctctgcttactttttttttttttctgacagggtctcactttgtcgcccaggcaggagtgcagtggctcaatcttgggctcactgcagcctcaacctcccaggttcaagcgattctcctgcctcagcccctcaagtagctgggactacaagcgcacaccaccacgcctgactaattttttgtatttttttgtagaggcggggtttcaccatgttgcccagactggtcttgaactcctgagcttaagcaatccacctgcctcggcctcccaaagtgttgggatcacaggcgtgagccaccgcatccggcctcatgttctttttcattaaagagagaaatcaactattcaggaccggcccccacctttcctcaggagtcatttctgttccgcacaggcctgctgaactgggtgctttatataggacactgtcatctctcaagtacccatcttggagggtacggaccccacatgaggatttcagtggagtgaagttcaggaggcatggagctgacaaccatgaggcctcggcagccaccgccaccaccgccgccgccaccaccgtagcagcagcagcagcagcagcagcagcagcagcagcagcaagagtaactctgacttaggaatagagacagccagagagaaatgtgatcaatgaaggagacatctggagtgtgcgtgcttcttcagagggacgggtgatgggcagattggaaaaagcaccgcagatgggaaccttaatctttcttttctaaaattgatgctatgaaaatttgcgttttctgtaacttgtaaaaactaaaagttgcttgtctactgaaaa

SEQ ID NO: 463189 - DNA, 691 bp, Homo sapiens
cagaagagagacgaaaaaaaaactaggctaggacgaggccggggttaccacctccttgaaatgggctgagtccctcttgctcacccttgacttggaaaaaccagtttctcttttattaggcggggtttcaccatgttgcccagactggtcttgaactcctgagcttaagcaatccacctgcctcggcctcccaaagtgttgggatcacaggcgtgagccaccgcatccggcctcatgttctttttcattaaagagagaaatcaactattcaggaccggcccccacctttcctcaggagtcatttctgttccgcacaggcctgctgaactgggtgctttatataggatttcagtggagtgaagttcaggaggcatggagctgacaaccatgaggcctcggcagccaccgccaccaccgccgccgccaccaccgtagcagcagcagcagcagcagcagcagcagcagcagcagcaagagtaactctgacttaggaatagagacagccagagagaaatgtgatcaatgaaggagacatctggagtgtgcgtgcttcttcagagggacgggtgatgggcagattggaaaaagcaccgcagatgggaaccttaatctttcttttctaaaattgatgctatgaaaatttgcgttttctgtaacttgtaaaaactaaaagttgcttgtctactgaaaa

SEQ ID NO: 463190 - DNA, 2590 bp, Homo sapiens
cagaagagagacgaaaaaaaaactaggctaggacgaggccggggttaccacctccttgaaatgggctgagtccctcttgctcacccttgacttggaaaaaccagtttctcttttattgtctgttactaatctctattctaaaaattcagctcaattctcaaccatactccaaactctctcttttccagctacctttactccctctccttcaattccactttcctctgcttactttttttttttttctgacagggtctcactttgtcgcccaggcaggagtgcagtggctcaatcttgggctcactgcagcctcaacctcccagaggcggggtttcaccatgttgcccagactggtcttgaactcctgagcttaagcaatccacctgcctcggcctcccaaagtgttgggatcacaggcgtgagccaccgcatccggcctcatgttctttttcattaaagagagaaatcaactattcaggaccggcccccacctttcctcaggagtcatttctgttccgcacaggcctgctgaactgggtgctttatataggacactgtcatctctcaagtacccatcttggagggtacggaccccacatgagggtgaggctctctgcacactccagagtgaggactttaataatctagtggactgtacatgttgggaggggaagagcggggtgccgagggtctggagggagaagaattgactgccccttttgctcttggagttaagcagaaatctaaagagaaggcaaagaatcttgccttcctggcatcatttcctcctaccatcccaggccatcatttatttattacagccaacagactggcctctttcttccctttgactgggaatgggtcaaaggcggtgcaggaggaggatctggtccagataattcacaagcagggtgcattttcctctcattattgagaactgtgagtgtttatcaagaaggcagagcaggagaagatgaaccagtcttcttcccctcactacccagatctctgcctgccaacaagccccgtgttcaccctggcaaagagtctttacattcagaccaaggagagtgtgactccttctcagcactagctagaaacctcaagcccttgcttaagggcctttttcagagagacccaatgcccagaaggctagatgcgtggggaggagccacatacgagaaactgcctccctgcttcgggtcagaacaagccccaggaagaaagtatttcaaacaacaaggtgcatctgccccaacccatccagcctgcatgttggtgctgagaacagccttttatggggcttgcactgagccatgggcatgtctgaacacaacaaggaagaggccagagcagcaacagcacgcaaagggttgatgggcatttcttttaagacagagcagaaaactcttagatactttgcgtccttcctatttgactcagtctatgaaagccaggttagcttgctttcttcctccctaaatcctccatcctcatgaccaacaaagaaatagttgaatcattttccaggcacatcttggggaggatgtggggccattggaggctgtccttcctagataagtctttaggagtgagaacaaggagtcttaccctcctctgtccacccacccccatgaatgggcctggctccagccaggagttgtggtttttcctgagctcctcacctatctcttctggatttcacattggcaaacggggttgcaaagtgctcttcgtgctctttggacagtgccttgtggagaggaatgcccatgcccctgcattccaaggccttggtaagcaagctcagagtagctggatttttctaaagcaattgcagaacacctgctttttctttgtttcctctagaaaggaccaaccacgccgagctcagttatggcacacacagtgggacctagacaaagggagagggtgaccgacatcccaactaggtaaacacagaggaggttccacatggacttatctgggtggctgttttgaaaacgagaaacagtcaagagtccctggccccacagacccacctccccaactcagcactgtctgtctgtgcagcaggtgcaaggacgtgttgaactagctctctgcagcctccttggaggatgtgatcctatgggaggggtaggagtattcaggtccttgacatctcccaaatgtgtgattccgggatgccaaaggcctttggccaggtaatgcagtgtctacaggctgaggttgacatgcatccccaccctctgagaaaaagatcctcagacaatccatgtgcttctcttgtccttcattccaccggagtctgtctcatacccaaccagatttcagtggagtgaagttcaggaggcatggagctgacaaccatgaggcctcggcagccaccgccaccaccgccgccgccaccaccgtagcagcagcagcagcagcagcagcagcagcagcagcagcaagagtaactctgacttaggaatagagacagccagagagaaatgtgatcaatgaaggagacatctggagtgtgcgtgcttcttcagcccccgagccacggccgccgccggggggggcggctgctgtacggcgg

SEQ ID NO: 463191 - DNA, 252 bp, Homo sapiens
tcctagttttagaagtttcaaagcagcagcagcaagagtaactctgacttaggaatagagacagccagagagaaatgtgatcaatgaaggagacatctggagtgtgcgtgcttcttcagagggacgggtgatgggcagattggaaaaagcaccgcagatgggaaccttaatctttcttttctaaaattgatgctatgaaaatttgcgttttctgtaacttgtaaaaactaaaagttgcttgtctactgaaaa

SEQ ID NO: 463192 - DNA, 873 bp, Homo sapiens
cagaagagagacgaaaaaaaaactaggctaggacgaggccggggttaccacctccttgaaatgggctgagtccctcttgctcacccttgacttggaaaaaccagtttctcttttattgtctgttactaatctctattctaaaaattcagctcaattctcaaccatactccaaactctctcttttccagctacctttactccctctccttcaattccactttcctctgcttactttttttttttttctgacagggtctcactttgtcgcccaggcaggagtgcagtggctcaatcttgggctcactgcagcctcaacctcccaggttcaagcgattctcctgcctcagcccctcaagtagctgggactacaagcgcacaccaccacgcctgactaattttttgtatttttttgtagaggcggggtttcaccatgttgcccagactggtcttgaactcctgagcttaagcaatccacctgcctcggcctcccaaagtgttgggatcacaggcgtgagccaccgcatccggcctcatgttctttttcattaaagagagaaatcaactattcaggaccggcccccacctttcctcaggagtcatttctgttccgcacaggcctgctgaactgggtgctttatatagggtaagtgtttctcattttttgttccctgtcctcaagccttaggggcaaaagaaacatccaagatttgaaatttcttttcttcttctcatctgcatggctgtagccatctctctgttctgcattatcttatgacaaaaaaaaaaattcttattttgaagcaaactcaaagctaggtcctgatgtctcaaggcacaggtactcgtacttaaaggtgagtctgaaatctgtgg

SEQ ID NO: 463193 - DNA, 878 bp, Homo sapiens
cagaagagagacgaaaaaaaaactaggctaggacgaggccggggttaccacctccttgaaatgggctgagtccctcttgctcacccttgacttggaaaaaccagtttctcttttattgtctgttactaatctctattctaaaaattcagctcaattctcaaccatactccaaactctctcttttccagctacctttactccctctccttcaattccactttcctctgcttactttttttttttttctgacagggtctcactttgtcgcccaggcaggagtgcagtggctcaatcttgggctcactgcagcctcaacctcccagaggcggggtttcaccatgttgcccagactggtcttgaactcctgagcttaagcaatccacctgcctcggcctcccaaagtgttgggatcacaggcgtgagccaccgcatccggcctcatgttctttttcattaaagagagaaatcaactattcaggaccggcccccacctttcctcaggagtcatttctgttccgcacaggcctgctgaactgggtgctttatataggacactgtcatctctcaagtacccatcttggagggtacggaccccacatgaggaaaggaccaaccacgccgagctcagttatggcacacacagtgggacctagacaaagggagagggtgaccgacatcccaactagggtccccaggcaggtggctgggacactatttgcaatcagcaaggaaccctgctgcccttagactccccacagagcaagcagaacttgcagaatggggtaaaaacactctattaaagattttttaaacctatttatattgtaataaagtaaatgtaaataaaatttaagtgaaggcagattgcagatatttcc

SEQ ID NO: 463194 - DNA, 3144 bp, Homo sapiens
  misc_feature (1)..(3): n is a, c, g, or t
  misc_feature (6)..(8): n is a, c, g, or t
  misc_feature (10)..(10): n is a, c, g, or t
nnnctnnngnttaggtgcaaggctcagataacctgcagtgtctctccaactctgggatgacaaagacctcacttcccttttctggtgttcacacaacaatgagaaataccacctccttgaaatgggctgagtccctcttgctcacccttgacttggaaaaaccagtttctcttttattgtctgttactaatctctattctaaaaattcagctcaattctcaaccatactccaaactctctcttttccagctacctttactccctctccttcaattccactttcctctgcttactttttttttttttctgacagggtctcactttgtcgcccaggcaggagtgcagtggctcaatcttgggctcactgcagcctcaacctcccaggttcaagcgattctcctgcctcagcccctcaagtagctgggactacaagcgcacaccaccacgcctgactaattttttgtatttttttgtagaggcggggtttcaccatgttgcccagactggtcttgaactcctgagcttaagcaatccacctgcctcggcctcccaaagtgttgggatcacaggcgtgagccaccgcatccggcctcatgttctttttcattaaagagagaaatcaactattcaggaccggcccccacctttcctcaggagtcatttctgttccgcacaggcctgctgaactgggtgctttatataggacactgtcatctctcaagtacccatcttggagggtacggaccccacatgagggtgaggctctctgcacactccagagtgaggactttaataatctagtggactgtacatgttgggaggggaagagcggggtgccgagggtctggagggagaagaattgactgccccttttgctcttggagttaagcagaaatctaaagagaaggcaaagaatcttgccttcctggcatcatttcctcctaccatcccaggccatcatttatttattacagccaacagactggcctctttcttccctttgactgggaatgggtcaaaggcggtgcaggaggaggatctggtccagataattcacaagcagggtgcattttcctctcattattgagaactgtgagtgtttatcaagaaggcagagcaggagaagatgaaccagtcttcttcccctcactacccagatctctgcctgccaacaagccccgtgttcaccctggcaaagagtctttacattcagaccaaggagagtgtgactccttctcagcactagctagaaacctcaagcccttgcttaagggcctttttcagagagacccaatgcccagaaggctagatgcgtggggaggagccacatacgagaaactgcctccctgcttcgggtcagaacaagccccaggaagaaagtatttcaaacaacaaggtgcatctgccccaacccatccagcctgcatgttggtgctgagaacagccttttatggggcttgcactgagccatgggcatgtctgaacacaacaaggaagaggccagagcagcaacagcacgcaaagggttgatgggcatttcttttaagacagagcagaaaactcttagatactttgcgtccttcctatttgactcagtctatgaaagccaggttagcttgctttcttcctccctaaatcctccatcctcatgaccaacaaagaaatagttgaatcattttccaggcacatcttggggaggatgtggggccattggaggctgtccttcctagataagtctttaggagtgagaacaaggagtcttaccctcctctgtccacccacccccatgaatgggcctggctccagccaggagttgtggtttttcctgagctcctcacctatctcttctggatttcacattggcaaacggggttgcaaagtgctcttcgtgctctttggacagtgccttgtggagaggaatgcccatgcccctgcattccaaggccttggtaagcaagctcagagtagctggatttttctaaagcaattgcagaacacctgctttttctttgtttcctctagaaaggaccaaccacgccgagctcagttatggcacacacagtgggacctagacaaagggagagggtgaccgacatcccaactaggtaaacacagaggaggttccacatggacttatctgggtggctgttttgaaaacgagaaacagtcaagagtccctggccccacagacccacctccccaactcagcactgtctgtctgtgcagcaggtgcaaggacgtgttgaactagctctctgcagcctccttggaggatgtgatcctatgggaggggtaggagtattcaggtccttgacatctcccaaatgtgtgattccgggatgccaaaggcctttggccaggtaatgcagtgtctacaggctgaggttgacatgcatccccaccctctgagaaaaagatcctcagacaatccatgtgcttctcttgtccttcattccaccggagtctgtctcatacccaaccagatttcagtggagtgaagttcaggaggcatggagctgacaaccatgaggcctcggcagccaccgccaccaccgccgccgccaccaccgtagcagcagcagcagcagcagcagcagcagcagcagcagcaagagtaactctgacttaggaatagagacagccagagagaaatgtgatcaatgaaggagacatctggagtgtgcgtgcttcttcagagggacgggtgatgggcagattggaaaaagcaccgcagatgggaaccttaatctttcttttctaaaattgatgctatgaaaatttgcgttttctgtaacttgtaaaaactaaaagttgcttgtctactgaaaagcctctctgcctctatgttttataccatcggatgccaactcccggccttctaagccacctcccctttaggctaaaactgagacatgaacttgaaaaattgacactggcttcctctctctttagggtccccaggcaggtggctgggacactatttgcaatcagcaaggaaccctgctgcccttagactccccacagagcaagcagaacttgcagaatggggtaaaaacactctattaaagattttttaaacctatttatattgtaataaagtaaatgtaaataaaatttaagtgaaggcagattgcagatatttcc

SEQ ID NO: 463195 - DNA, 1552 bp, Homo sapiens
cagaagagagacgaaaaaaaaactaggctaggacgaggccggggttaccacctccttgaaatgggctgagtccctcttgctcacccttgacttggaaaaaccagtttctcttttattgtctgttactaatctctattctaaaaattcagctcaattctcaaccatactccaaactctctcttttccagctacctttactccctctccttcaattccactttcctctgcttactttttttttttttctgacagggtctcactttgtcgcccaggcaggagtgcagtggctcaatcttgggctcactgcagcctcaacctcccagaggcggggtttcaccatgttgcccagactggtcttgaactcctgagcttaagcaatccacctgcctcggcctcccaaagtgttgggatcacaggcgtgagccaccgcatccggcctcatgttctttttcattaaagagagaaatcaactattcaggaccggcccccacctttcctcaggagtcatttctgttccgcacaggcctgctgaactgggtgctttatataggacactgtcatctctcaagtacccatcttggagggtacggaccccacatgagggtgaggctctctgcacactccagaaaaggaccaaccacgccgagctcagttatggcacacacagtgggacctagacaaagggagagggtgaccgacatcccaactagatttcagtggagtgaagttcaggaggcatggagctgacaaccatgaggcctcggcagccaccgccaccaccgccgccgccaccaccgtagcagcagcagcagcagcagcagcagcagcagcagcagcaagagtaactctgacttaggaatagagacagccagagagaaatgtgatcaatgaaggagacatctggagtgtgcgtgcttcttcagagggacgggtgatgggcagattggaaaaagcaccgcagatgggaaccttaatctttcttttctaaaattgatgctatgaaaatttgcgttttctgtaacttgtaaaaactaaaagttgcttgtctactgaaaaaaaaaaaaaaaaaaaaaaaaaaaaaaaaaaaaaaaaaaaagggggggggccccacacagaaaattacccacccgaggagggccacaacagaatgaaggcagaagcaccgaggcttcgatgtggaacaagaggggcgcccccaataagggggggcgcggcactaagaaagcctaagagcagcggcgccgcaagatgataacacacgggtcggacacgggaaaaaagcggatcaggcgcggtgggaacatcctcgtggcgaaggaacacccccgcactattcgtgcggtgggggcgcccaacaatgtggtgggcgacacagatcatcctcatcgaagagactatatacgagcgcccctcgagccgcgaacaattatgcaaattctcaggaggggctactgcgggcggttaaaccgccaggcggcaagtaacggtgaccccgctggcagaagacttggcgacagcggaaagcgacgtcttagtcaccttttttcgcgga

SEQ ID NO: 463196 - DNA, 1448 bp, Homo sapiens
tgcctccagtggacgtagctgatgaccctggagcaagctgatcatggggaaatgatctggttaaaaatgaatatgagaaacaaaggtagaggcactaaccattatacaaacaagatgcttcttcctcttccctacaagagagaagaaactctcagcagtctttgtattcatctcaagtctccaggtgacatgaagtcttctccatcaggtcctgatgcagctcctgtggagggtgaggatatcatgaaatgtgtggtgaaagaaggaaaccatcattcagccatgaccccaagatcagccggtacctacaccgggcagagagctgcttggcaaagggctgagcagcacacacataagtggtacgtgttgcctccaaaatccaaagatactcaagaccggtatagctacgttattataaaaacaatgagaataggggagtggcatggtttgacttacactgtttttaaagattgctctggctgcaatgtgggtcctggcttcccacaccagggcatgctggtgccattcacggagataagaaatactggaagaccagtgaaatcaggctgatctggacctgagtcacagctccatcaaatgctggattattcaggagaacttgtatgatctcttcaaccttctagatgagctccatttgttaaaattacattaaataatatataaaaagtgcctagaccactccttgacacatagtaactgcttataaatctcagtatcactactacttctctttctgctgcatacaccagcatagatatcaagcgtctgtgctttcaaactatccaggaagaactatactatggaagtgacccacagcatttacagaggaaacacagatatagacaaatataaatcctaagtaagggagtgtgtattagtctgttttcacgatgctgataaagacatacctgagactgggtaatttataaagaaaaagaggtttaatggactcacagttccacgtggctggggaggcctcacaagcatgatggaagatgaaagacatgccttacatggtggcaggcaagagagagaatgagaatgaagcgataggggtttccccgtataaagccatcagatctcatgagacttatttactaccatgagaacagtatgggggaaaccactcccatgattcaattatctctcactgggtccctcccacaacatgtaggaattatgggaactacaattcaaaatgacatttgggtgggaacacagccaaaccatatcaaagtagtaggactaaaggaaagaacacatgaagtgcatattaattatttttctgaagaaacgtgatgagctttgcataaaattataagtgctatataaagtagtattgtatcaatcaacataaatgtgtgactgctgggcaaacatacctctggcttcacatcctcaaccctcacctctaagaattactgacc

SEQ ID NO: 463197 - DNA, 970 bp, Homo sapiens
caacgaaagcagagatttattgaaaatgaaagtacatttcacagggtgggagtggcccgagcagtggctcaaaggccctggttacacagtcttctggggtccaaatccaccattggccacttgatgtacacccggtgcaaatgaagcagtggcccacaatcagaggccaaagtgaagttacaaagttacactcctatgcaaacatctgcttggttgctttctgcaaccaatcagaggtactttcaattttccatctgccatgtagaaagtgttgcaaagggagtagcctctggtccttttgttacttaggtgtggaaaattggggttttccttttgatttagttctaggaagtcagcatgaactggccttaggttccttgcctccacaccctattctcctgcctcaaattcaccagataataggatacctccacacaggtattctctctttcaattctcaaggatatattctggacttgggcaaatgctctgacagtggcctctgttaccaacattaacagcatgttaccagagaggaatctgagaaaactctttatttgggtaacattgatttttaacatggctcaaacctgttatttccacagctggcatagggaaatcattaggtttctctccagatggataatgatttttgtaacttgatttacatttaggaatttaaggttcttaatgaaggttgacatatttgtgaatccaagttattgcgtagttctattgatgatagtagtcatcttatatgcttagaaaatattcctttggatggctatgttaattgctataattttcttctgtcattttaaatcattttttctttgtgaaaacaaaatgttacaaatcaccattttgtactatttagctgtaaattacagtgtattgaactaaaatgtttcagttgtaacaaaggatggagaaaattatcaaaatttacatctatactaaaatagctcaa

SEQ ID NO: 463198 - DNA, 1726 bp, Homo sapiens
gagtgcgcctgtccctgtggtgggagcagtggcgccgagcgtgcccacgggccgccgcttgggtttctctcgtgttcagggtagtatggacgtggacaatggcagtggcccctggctggcccaagagccgggcgtcataaccaacccggggccgcgaggctgggatcaggcaccccggagccgcttgcccgtggccgggctgctctccccctctaagcctaagcaccgccagtcgcggcgctgcgctttccgccgacctcccagagcgtcccgccgtcgccggcggccagcctcgcgcaggaccagtgtggcgccgccctgctgttgctggggggcgcccgaggcctccattccttgcccaggcttccggctctcggggcggcctcccttccgcccacgctccagggcttccccggctcccgagctccgagcttccaccacatcggccggctcaggacagggcttccactgtaaagtcggctgccagacgtgttggagctcaccgaacccagagttgatctctgcagcatgccatcactgctggggatgaggaaacggtgatttcaggactgttttttctgtctcttcagtgcctctttcagtgatctgaggttaaaaccagactatggaggattcatcaacagaccaggaagcaacagcctgggctccagaattgaccagtagtccgtgcacagacgaggagaggtcccatgaaacttcggcgcagtctgggaaccgagctctttttgtaacaagttgtttgtcaggaggcccggtcatgaaagcccttcctgactgggctcaaggaatacaaaaaggacaacttgtttttgccattgtctgttgtttttcaataactagttctccgaaacagcactggatgaatgcctcaaggggctcacacaactcgttccaggacttagtgaccattgtttctgtccctgttcaatagagttcaaatttaatatttaaattttgctccacaatgtgccatattatctgtatccaacctgtcattgggcatttaggttgattccatgtctttactattgtgaataatgctgcaataaacatttacgtgcttgtgtctttatgatagaacaatttatatacctctgggtatatacccagtaatgagattgctgggtcaagtgatagttctgcttttatctctttcgaggagagcactgttgtgctttccacaatggtgggaccaatgtacactcccaagcatctgtcattttttgactttttcataatagccattctgactggtgtgagatggtgtctcactgtgccttggatttgcatttctctaatgatcagtgatactgagctttgtattctatggttgttggtcacatgtatgtattcttttgaaaagcattcatgtcctttgcccactttttaaacatttttttatttccataggttttaggacaacaggtggcatttggttacattagtaagttctttattgatttgtaagattttggtgcatccatcaactcatctgtatacactgaacccaatttgtagccttttatcactcacccccttctcccgtttctccctgagtccccaaagtctattgtgtcattcttaagcttttgcatccttatagcttagctcccaattataagtgagaatatatgatgtttggttttccattcctgagttacttcacttagaataatagtcttcaatcccatccaggttgctgcaa

SEQ ID NO: 463199 - DNA, 1235 bp, Homo sapiens
gtcttgctttactctcacgcccaagaatcagaattcagaacttttaataagaaaagctttcagaactcaggaaggacaaggaagacattctggttctccatgcttaacattggactgtttcttcaactgagactatggaggattcatcaacagaccaggaagcaacagcctgggctccagaattgaccagtagtccgtgcacagacgaggagaggtcccatgaaacttcggcgcagtctgggaaccgagctctttttgtaacaagttgtttgtcaggaggcccggtcatgaaagcccttcctgactgggctcaaggaatacaaaaaggacaacttgtttttgccattgtctgttgtttttcaataactagttctccgaaacagcactggatgaatgcctcaaggggctcacacaactcgttccaggacttagtgaccattgtttctgtccctgttcaatagagttcaaatttaatatttaaattttgctccacaatgtgccatattatctgtatccaacctgtcattgggcatttaggttgattccatgtctttactattgtgaataatgctgcaataaacatttacgtgcttgtgtctttatgatagaacaatttatatacctctgggtatatacccagtaatgagattgctgggtcaagtgatagttctgcttttatctctttcgaggagagcactgttgtgctttccacaatggtgggaccaatgtacactcccaagcatctgtcattttttgactttttcataatagccattctgactggtgtgagatggtgtctcactgtgccttggatttgcatttctctaatgatcagtgatactgagctttgtattctatggttgttggtcacatgtatgtattcttttgaaaagcattcatgtcctttgcccactttttaaacatttttttatttccataggttttaggacaacaggtggcatttggttacattagtaagttctttattgatttgtaagattttggtgcatccatcaactcatctgtatacactgaacccaatttgtagccttttatcactcacccccttctcccgtttctccctgagtccccaaagtctattgtgtcattcttaagcttttgcatccttatagcttagctcccaattataagtgagaatatatgatgtttggttttccattcctgagttacttcacttagaataatagtcttcaatcccatccaggttgctgcaa

SEQ ID NO: 463200 - DNA, 1268 bp, Homo sapiens
ggtgtggttaggaggagcctgatcattgtgggcctggtcagtggtaggtatggggctgggcaaggtcaatcctgctggatatctagaaggtgtaaaccaaggacctaggaaaataccaggaggtagaatgcagcttgagatcaactgtccgatcaaagaacttgaacttgatctggagtgctttggggagccatggaaggtgctggataaaggaggggccagtcagatacgtgttagagatgactgtagaaggctgactggaatgagtgaacaagagcagaccagggagggagcttgtgggggaggtctggagatggcaagggagggatcctgcttggatgaacagtctccagagactgtctcaggaactcatagggagaatctgcagctgaaaggggacgccagaggagacatcactctcttgccctttgactgcgtctggatgcccctactgaccaacactaccatccccttattagactggagaggctgccgggaggggattgtttctgtggactgtaccctgagtgtttccctggtggggtaatgggcaggtgggagtggtggtaccgactctttagaaccagcaatgccaaacagatcccactcggggaaagttcatgctaagtgtcatgtgtcctctggaattttctgaagctttccagcttttttattacccccctaaccagctcatctgatttccagggatctctactaagatgttggcagcccggccagctggtctggccatggatgtgacttcaggggctggttatgcttcatgcacctgcttctagcttcactgttgggccagatttcatccccaccccagctctgcagcgcagctgcttcttgattcctccatggaccctgcgtgaaattaccccatgtttccctttgtgcaccactgaggaaggaagcatgaaggacacacagccattttgcagaccctggtcacagtgaaacattccatgggaactcgggctgtgagaaacatccttcctaaccacatgactgcaggaacatccttatcgcatcctcccaggcaaaggtccaacagcctgactgcagggacatccttgccgtttcctgctgggcagcaagctctaccacccagacccctccctcccatcccatgattacctcagcctgtgagcggcagttggcgctggcactaagctggttcacccctcctcagggttttgttggcaataaaagtgttgctgttgaagccgcaaaaaaaaaaaacaagggcggacgcaatagag

SEQ ID NO: 463201 - DNA, 771 bp, Homo sapiens
ctcatcccaaaccaagggaggggaccctgagtgtttccctggtggggtaatgggcaggtgggagtggtggtaccgactctttagaaccagcaatgccaaacagatcccactcggggaaagttcatgctaagtgtcatgtgtcctctggaattttctgaagctttccagcttttttattacccccctaaccagctcatctgatttccagggatctctactaagatgttggcagcccggccagctggtctggccatggatgtgacttcaggggctggttatgcttcatgcacctgcttctagcttcactgttgggccagatttcatccccaccccagctctgcagcgcagctgcttcttgattcctccatggaccctgcgtgaaattaccccatgtttccctttgtgcaccactgaggaaggaagcatgaaggacacacagccattttgcagaccctggtcacagtgaaacattccatgggaactcgggctgtgagaaacatccttcctaaccacatgactgcaggaacatccttatcgcatcctcccaggcaaaggtccaacagcctgactgcagggacatccttgccgtttcctgctgggcagcaagctctaccacccagacccctccctcccatcccatgattacctcagcctgtgagcggcagttggcgctggcactaagctggttcacccctcctcagggttttgttggcaataaaagtgttgctgttgaagccgcaaaaaaaaaaaacaagggcggacgcaatagag

SEQ ID NO: 463202 - DNA, 1098 bp, Homo sapiens
ggtgtggttaggaggagcctgatcattgtgggcctggtcagtggtaggtatggggctgggcaaggtcaatcctgctggatatctagaaggtgtaaaccaaggacctaggaaaataccaggaggtagaatgcagcttgagatcaactgtccgatcaaagaacttgaacttgatctggagtgctttggggagccatggaaggtgctggataaaggaggggccagtcagatacgtgttagagatgactgtagaaggctgactggaatgagtgaacaagagcagaccagggagggagcttgtgggggaggtctggagatggcaagggagggatcctgcttggatgaacagtctccagagactgtctcaggaactcatagggagaatctgcagctgaaaggggacgccagaggagacatcactctcttgccctttgactgcgtctggatgcccctactgaccaacactaccatccccttattagactggagaggctgccgggagggtttctaagcctcctattgtggctcacctccaacaggatctctactaagatgttggcagcccggccagctggtctggccatggatgtgacttcaggggctggttatgcttcatgcacctgcttctagcttcactgttgggccagatttcatccccaccccagctctgcagcgcagctgcttcttgattcctccatggaccctgcgtgaaattaccccatgtttccctttgtgcaccactgaggaaggaagcatgaaggacacacagccattttgcagaccctggtcacagtgaaacattccatgggaactcgggctgtgagaaacatccttcctaaccacatgactgcaggaacatccttatcgcatcctcccaggcaaaggtccaacagcctgactgcagggacatccttgccgtttcctgctgggcagcaagctctaccacccagacccctccctcccatcccatgattacctcagcctgtgagcggcagttggcgctggcactaagctggttcacccctcctcagggttttgttggcaataaaagtgttgctgttgaagccgcaaaaaaaaaaaacaagggcggacgcaatagag

SEQ ID NO: 463203 - DNA, 7268 bp, Homo sapiens
cgcgcttgggcggcggaggctgcagctacctcggcgccggctcggctctaggacgtgtcgggctgcacgggtcgggggcggctccctgctgcttccgagcctagccgcctggccttcggcatttgcaggcagacacactgccctccagaaacgatgggtgtcgctagatccagctgggactctgccagcctccggcactcagtctaagagaagggccatcttccagccctgctgtccctgcctgtcatggccacattcggctgctgtctgcatgtctggggacacagggcacccagccccagccctgagaagttaagccaggccttctggctcagttccacaggggcactccagaccccaggcccctttcagagcaaaagcaactgatgctatgggagaagcccctgcccacctgtccactcgcctggcactgcccactctgagacccatgcactgggttcccctggaggtgccaaccctgtgagtccctccctgtcccctgacgctgagaaggccctgccaacccccaccatgtgtgaggtgatgcccacaatcaatgaggggggtccccctcatggcgccgatgctgacgccaacttcgagcagctgatggtgaacatgctggacgagcgggagaagttgctggagtctcttcgggagagtcaggagaccttggcggccacacagagccggctccaggatgccatacacgagcgggaccagctccagcgccaccttaactccgccctcccccaggaatttgccaccttaacccgggagctgagcatgtgtcgggagcagcttctagagcgggaggaagagatatcagaactgaaagcagaacggaataacacacggctgcttctggaacatctggagtgcctggtgtcccgccatgaacggtcactgcggatgactgtggtgaagcgccaggcccagtcaccttcgggggtctccagtgaggtggaggtgctgaaggccctcaagtcactgtttgagcaccacaaggccctggatgagaaggtgcgagagcggctccgggcagcgctggagcgagtcaccaccttggaggagcagctggcaggtgcccaccagcaggtgtctgccctgcagcagggggcaggggtgcgggatggagcggcagaagaggaggggactgtggagctggggccgaaacgcctgtggaaggtaggaggatacgggccgggtagaggagctgcaggagctcctggagaagcagaactttgagttgagccaggcccgggagcgactggtcaccctaacaacaaccgtgactgaactcgaggaggacctgggcacggcccgccgggacctcatcaagtcggaggagctgagcagcaagcatcagcgggacctccgggaggctctggcccagaaggaggacatggaagagcggattactacactggagaagcgctacctggctgctcagcgtgaggcaacatccatccatgacctcaatgacaagctggagaatgagctggccaacaaggagtccctgcaccgccagtgtgaggagaaggcccgacacctgcaggagctgctggaggtggcagagcagaagctgcagcagacgatgcgcaaggcagagacgctgccagaggtggaggctgagctggcccagagaattgcagccctcaccaaggcaagtgggccaggggcctgggatctgcctctgtcccccatgttctgagctctcagggagccaggcagggaagggagcgcgtgggaggcgcactgggccaggagccagaaaactgcttcccgccgtgtgattccagggagcacactgccttgtgcctgtcagttggaagagtaatccctgtcctcatcaccctgcagggatgtgacagtctcataagaaggggtgtaaaagtacttgaaggagaagaagctatgttgatgcaaagtgtttttctttttcttttttttttttttttaatcctctacaccgtcgtggtgaacactttctttcacttggggctggagcagaaagattaggactttcatctctggaaaggtgaaaccttagaagagaaatggtatatatatccctgaagggcaaaggggatgttttaaggctaggcctgagcgaggaggaggcaggggagacctggcaggtattgaagtacctgggaagaaaggcaatggggatggtggtcctgctccaagatgataagtggaggctgagcgtcactggtactgggggccatgatccccagggccaccctggcaccagggctgaagaacggcatggcaacattgaggagcacctgcggcagctggagggacagctggaggagaagaaccaggagctggcacgggtgcgccagcgggaaaagatgaatgaggaccacaacaagcggctgtcggacacagtggaccggctgctcagcgagtccaacgagcgtctgcagctccacctgaaggagcgcatggctgccctggaggagaagaacacgttgatccaggagttggagagctcccagcggcagattgaggagcagcaccaccacaagggccgcctgtctgaagagattgagaagctgcgccaagaggtggaccagctgaagggccgaggggggccgtttgtggatggcgtccactccaggtcgcacatgggcagtgcagcagacgtgcggttctccctgggcacaaccacacacgcacccccaggcgtgcatcgccgctactcggcattgagggaagagtctgccaaggactgggagacttctccactgcctgggatgctggccccggcagctggccctgcctttgacagtgaccctgagatctccgacgtggatgaggatgagccagggggtctggtgggctctgcggatgttgtctcccccagcggccactcagatgcccagaccctggccatgatgctgcaggagcagctggatgccatcaatgaggaaatcaggatgattcaggaagagaaggagtccacggagctccgcgcggaggagattgagacgcgtgtaaccagtggcagcatggaagccctaaacctgaagcagctgcgcaagcgtggttccatccccacctctctgacggccctgtccctggccagcgcgtccccaccactcagcggccgctccacacctaagctcacctcccgcagtgctgcccaggacctggaccgaatgggggtcatgaccctgcccagtgacttaagaaagcataggaggaagctgctgtcgccagtgtctcgggaagagaaccgagaggataaagccaccataaaatgtgagacttctcctccttcctcacccaggacgctgcggctagagaagcttggccacccagccctgagccaggaagaaggcaagagtgccttggaggatcagggcagcaaccccagcagcagcaacagcagccaggactccctgcacaagggcgccaagcgcaagggcatcaagtcgtccattggccgcctgtttgggaagaaggagaagggcaggctgatccagctgagtcgggatggagccacaggccatgttctgctaacagactccgaattcagtatgcaggagcctatggtgcctgccaagctggggacccaggcagagaaggaccggcggctaaagaagaaacaccagctgcttgaagatgcccgcaggaaaggaatgccctttgcccagtgggatggtcctactgtggtctcctggttggagctctgggtggggatgcctgcctggtatgtggcagcctgccgggccaacgtcaagagtggtgccatcatgtccgctctgtcggacacagagatccagcgggagatcggcatcagcaatgccctgcaccggctcaagctccgcctggccattcaggagatggtgtcattgaccagcccctctgccccacccacctccaggacttcttctgggaatgtctgggtcacccatgaagagatggaaactctggaaacatctactaaaacagacagtgaggagggcagctgggctcagaccctggcctatggggacatgaaccatgagtggattgggaatgaatggctacccagcctggggctcccgcagtaccgcagctacttcatggagtgcctggtggacgcccgcatgctggaccacctcaccaagaaggacctgcgggtccacctgaagatggtggacagcttccatcgaaccagtcttcagtatggcatcatgtgtctgaagaggctgaattatgaccggaaggagctggagaagaggcgagaggagagccagcatgagatcaaggatgtgttagtctggaccaacgaccaggtggttcattgggtccagtctattgggctccgggactacgcaggaaacctgcatgagagtggtgtgcatggagccttgctggccctggacgagaacttcgaccacaacacactggccctgatcctccagatccccacacagaacacccaggcacgccaagtgatggaaagagagttcaataacctgttggccttgggcacagaccggaagctggatgacggggatgacaaggtgtttcgccgcgcgccctcctggaggaagcgcttccggccgcgggagcaccacggtcgcggcggcatgctcagcgcttccgcggagaccctcccggcgggcttccgtgtgtccaccctggggaccctgcagcccccaccggccccgccaaagaagatcatgcctgaagctcactcccactatctctacggacacatgctctccgccttccgggactagccatggcccccagggctggcttcctccttctgggtttcacaggctcctctggccctgacccctcttgctcgttccccttccttccgcagctcctagtctcgtccgtgactttccggttgccctggatctcagaatatattcgtccaccccctcggcaccccattaccccgagtcccaccgtgtgtccgttgtaagtccggtggatgtggctggggtttcctggtattgtggaggcacccaggttgtccatgcttgggattctgggggaaggagagaagggcagctcagggtggatgtgaagccacccttcctcttctggacccagcctggtctgcactgcaacctccaccaggaccaggatcctgggccacaggctgggatgatccttccaagaaagggtcatttcagacgcagccctgcttgggctattcaatcttagggtgtctatccacgtctggctgtgccaaatggtctggcagctggttttggcatccccagcatcaccactctcccaacccatcaccgtgactgcagttcctgcccccattctcttggggtcagggaggggctgggaagggctactgaaggccccattctcccacaggatggtgaggctgggaggaggaagactgaggtagagattccaggccctggcataagctgaatcccaaatttgggtttgggaagaaccagagagaaatggatccctgagctctgagccaagggtgaggatggggaaactctaagctcccacctaataagaagcataggcagaccagccagagggagagccaatggcctctggtagccttaagcccaaagggcagtgggaatgtcccctgccccaaccatcgggtggagctcctgctgggctatggggaagggaggttgtgcggatcttgactctagggcagaacagatctaaccatgcattgctagctctgctcccagcatcccttccccttctctcctcctctgcctcacttctttagtaatcccaaccctataaaaatgaacctaatgggtggattgaatatacattgagcccaaagtcaagtttggggaaaaggcagactaaggcctcctttctctgacctcccaggaagaaaatagcttctcctacagtgattcatgtcccaggtccaggaaatccaatgttggtgaaggcagccactctcttgcttgtccccaaatcacctaaccctcatccagggctattttggtgggcagggactgcctcctcccggaattcctaagatccgcccagctgccaccattttcattgctttccccagcagcatgatgggaacccaagctgagggatacaggtcctgatttggtaggaatattattcccaagaaatacccgctcctcacctactccctcatcctaccaaggtgcctgaaaatgttcaagacttatgttcagggtgggatgatggaaccgagggcttcatcaaagtgagaggaaaggaaaagcatctggcatgtgtttcttggataggggccagtgcagtgccatcctacaggtggctggagcagctgctttgcaacctgatcaccttgagttctgagcagggactaggcttgcaggtgagataatgggccagggcacccagtccagaaggagcaatggcacctgggcagtgccagggcttaaagcccgctgctccttttcggtagaggagaggcccatcactggtgtggtggggtgggctctcccttaggcttgggcaaggcagccacctgcccttgctctcccttagtgttccctggcctccctgccatcaggttgctgggagtggagatggagggattattgagcagaaaatgagttggatggagataaacagctcccatccctgggtaatggatggtaagatgatggagattcctaagattggtggagttgggcaatgcatagccatctgactccttcagggtgctcttgatgggctggctgtaagggagactcagtcccagcctctcccctctacaactcctgccactgttggccatgtcgtaaggcagcagctgtgccaggatagctgggtccattcagagcaccttgagaagtgttgcagggaggtgttaagaagagaaatctgtgcaaacagtgatggaaggctgttgtcttggtgtatcccttgcctcatagtcaatatattttttttttggcgagtcaccagtgacccgagccctccacaccagcctcctgtatctcatcaggtcccttctcagtactgtatttgctcagtgcatcaggaatgggtgtatgggtgtgtgtgggtgggtgtgagtgtgggtgtgtacgtaccaataaacaacctggttttaagacaatgtacaaatggcctccagtctttttttttttttttttttttttttttaactctgaactcacctgagatttccagcttctttcacagttgtaaaggctgctgtactctggaaggaaatgtcacaattttcagaacttgtagtcaataactatttatttatataagcacaggactgatagatt

SEQ ID NO: 463204 - DNA, 6126 bp, Homo sapiens
cctcatagctgactctagaggatacacggagggccaacgcaaccgggaaggaggatacgggccgggtagaggagctgcaggagctcctggagaagcagaactttgagttgagccaggcccgggagcgactggtcaccctaacaacaaccgtgactgaactcgaggaggacctgggcacggcccgccgggacctcatcaagtcggaggagctgagcagcaagcatcagcgggacctccgggaggctctggcccagaaggaggacatggaagagcggattactacactggagaagcgctacctggctgctcagcgtgaggcaacatccatccatgacctcaatgacaagctggagaatgagctggccaacaaggagtccctgcaccgccagtgtgaggagaaggcccgacacctgcaggagctgctggaggtggcagagcagaagctgcagcagacgatgcgcaaggcagagacgctgccagaggtggaggctgagctggcccagagaattgcagccctcaccaaggcaagtgggccaggggcctgggatctgcctctgtcccccatgttctgagctctcagggagccaggcagggaagggagcgcgtgggaggcgcactgggccaggagccagaaaactgcttcccgccgtgtgattccagggagcacactgccttgtgcctgtcagttggaagagtaatccctgtcctcatcaccctgcagggatgtgacagtctcataagaaggggtgtaaaagtacttgaaggagaagaagctatgttgatgcaaagtgtttttctttttcttttttttttttttttaatcctctacaccgtcgtggtgaacactttctttcacttggggctggagcagaaagattaggactttcatctctggaaaggtgaaaccttagaagagaaatggtatatatatccctgaagggcaaaggggatgttttaaggctaggcctgagcgaggaggaggcaggggagacctggcaggtattgaagtacctgggaagaaaggcaatggggatggtggtcctgctccaagatgataagtggaggctgagcgtcactggtactgggggccatgatccccagggccaccctggcaccagggctgaagaacggcatggcaacattgaggagcacctgcggcagctggagggacagctggaggagaagaaccaggagctggcacgggtgcgccagcgggaaaagatgaatgaggaccacaacaagcggctgtcggacacagtggaccggctgctcagcgagtccaacgagcgtctgcagctccacctgaaggagcgcatggctgccctggaggagaagaacacgttgatccaggagttggagagctcccagcggcagattgaggagcagcaccaccacaagggccgcctgtctgaagagattgagaagctgcgccaagaggtggaccagctgaagggccgaggggggccgtttgtggatggcgtccactccaggtcgcacatgggcagtgcagcagacgtgcggttctccctgggcacaaccacacacgcacccccaggcgtgcatcgccgctactcggcattgagggaagagtctgccaaggactgggagacttctccactgcctgggatgctggccccggcagctggccctgcctttgacagtgaccctgagatctccgacgtggatgaggatgagccagggggtctggtgggctctgcggatgttgtctcccccagcggccactcagatgcccagaccctggccatgatgctgcaggagcagctggatgccatcaatgaggaaatcaggatgattcaggaagagaaggagtccacggagctccgcgcggaggagattgagacgcgtgtaaccagtggcagcatggaagccctaaacctgaagcagctgcgcaagcgtggttccatccccacctctctgacggccctgtccctggccagcgcgtccccaccactcagcggccgctccacacctaagctcacctcccgcagtgctgcccaggacctggaccgaatgggggtcatgaccctgcccagtgacttaagaaagcataggaggaagctgctgtcgccagtgtctcgggaagagaaccgagaggataaagccaccataaaatgtgagacttctcctccttcctcacccaggacgctgcggctagagaagcttggccacccagccctgagccaggaagaaggcaagagtgccttggaggatcagggcagcaaccccagcagcagcaacagcagccaggactccctgcacaagggcgccaagcgcaagggcatcaagtcgtccattggccgcctgtttgggaagaaggagaagggcaggctgatccagctgagtcgggatggagccacaggccatgttctgctaacagactccgaattcagtatgcaggagcctatggtgcctgccaagctggggacccaggcagagaaggaccggcggctaaagaagaaacaccagctgcttgaagatgcccgcaggaaaggaatgccctttgcccagtgggatggtcctactgtggtctcctggttggagctctgggtggggatgcctgcctggtatgtggcagcctgccgggccaacgtcaagagtggtgccatcatgtccgctctgtcggacacagagatccagcgggagatcggcatcagcaatgccctgcaccggctcaagctccgcctggccattcaggagatggtgtcattgaccagcccctctgccccacccacctccaggacttcttctgggaatgtctgggtcacccatgaagagatggaaactctggaaacatctactaaaacagacagtgaggagggcagctgggctcagaccctggcctatggggacatgaaccatgagtggattgggaatgaatggctacccagcctggggctcccgcagtaccgcagctacttcatggagtgcctggtggacgcccgcatgctggaccacctcaccaagaaggacctgcgggtccacctgaagatggtggacagcttccatcgaaccagtcttcagtatggcatcatgtgtctgaagaggctgaattatgaccggaaggagctggagaagaggcgagaggagagccagcatgagatcaaggatgtgttagtctggaccaacgaccaggtggttcattgggtccagtctattgggctccgggactacgcaggaaacctgcatgagagtggtgtgcatggagccttgctggccctggacgagaacttcgaccacaacacactggccctgatcctccagatccccacacagaacacccaggcacgccaagtgatggaaagagagttcaataacctgttggccttgggcacagaccggaagctggatgacggggatgacaaggtgtttcgccgcgcgccctcctggaggaagcgcttccggccgcgggagcaccacggtcgcggcggcatgctcagcgcttccgcggagaccctcccggcgggcttccgtgtgtccaccctggggaccctgcagcccccaccggccccgccaaagaagatcatgcctgaagctcactcccactatctctacggacacatgctctccgccttccgggactagccatggcccccagggctggcttcctccttctgggtttcacaggctcctctggccctgacccctcttgctcgttccccttccttccgcagctcctagtctcgtccgtgactttccggttgccctggatctcagaatatattcgtccaccccctcggcaccccattaccccgagtcccaccgtgtgtccgttgtaagtccggtggatgtggctggggtttcctggtattgtggaggcacccaggttgtccatgcttgggattctgggggaaggagagaagggcagctcagggtggatgtgaagccacccttcctcttctggacccagcctggtctgcactgcaacctccaccaggaccaggatcctgggccacaggctgggatgatccttccaagaaagggtcatttcagacgcagccctgcttgggctattcaatcttagggtgtctatccacgtctggctgtgccaaatggtctggcagctggttttggcatccccagcatcaccactctcccaacccatcaccgtgactgcagttcctgcccccattctcttggggtcagggaggggctgggaagggctactgaaggccccattctcccacaggatggtgaggctgggaggaggaagactgaggtagagattccaggccctggcataagctgaatcccaaatttgggtttgggaagaaccagagagaaatggatccctgagctctgagccaagggtgaggatggggaaactctaagctcccacctaataagaagcataggcagaccagccagagggagagccaatggcctctggtagccttaagcccaaagggcagtgggaatgtcccctgccccaaccatcgggtggagctcctgctgggctatggggaagggaggttgtgcggatcttgactctagggcagaacagatctaaccatgcattgctagctctgctcccagcatcccttccccttctctcctcctctgcctcacttctttagtaatcccaaccctataaaaatgaacctaatgggtggattgaatatacattgagcccaaagtcaagtttggggaaaaggcagactaaggcctcctttctctgacctcccaggaagaaaatagcttctcctacagtgattcatgtcccaggtccaggaaatccaatgttggtgaaggcagccactctcttgcttgtccccaaatcacctaaccctcatccagggctattttggtgggcagggactgcctcctcccggaattcctaagatccgcccagctgccaccattttcattgctttccccagcagcatgatgggaacccaagctgagggatacaggtcctgatttggtaggaatattattcccaagaaatacccgctcctcacctactccctcatcctaccaaggtgcctgaaaatgttcaagacttatgttcagggtgggatgatggaaccgagggcttcatcaaagtgagaggaaaggaaaagcatctggcatgtgtttcttggataggggccagtgcagtgccatcctacaggtggctggagcagctgctttgcaacctgatcaccttgagttctgagcagggactaggcttgcaggtgagataatgggccagggcacccagtccagaaggagcaatggcacctgggcagtgccagggcttaaagcccgctgctccttttcggtagaggagaggcccatcactggtgtggtggggtgggctctcccttaggcttgggcaaggcagccacctgcccttgctctcccttagtgttccctggcctccctgccatcaggttgctgggagtggagatggagggattattgagcagaaaatgagttggatggagataaacagctcccatccctgggtaatggatggtaagatgatggagattcctaagattggtggagttgggcaatgcatagccatctgactccttcagggtgctcttgatgggctggctgtaagggagactcagtcccagcctctcccctctacaactcctgccactgttggccatgtcgtaaggcagcagctgtgccaggatagctgggtccattcagagcaccttgagaagtgttgcagggaggtgttaagaagagaaatctgtgcaaacagtgatggaaggctgttgtcttggtgtatcccttgcctcatagtcaatatattttttttttggcgagtcaccagtgacccgagccctccacaccagcctcctgtatctcatcaggtcccttctcagtactgtatttgctcagtgcatcaggaatgggtgtatgggtgtgtgtgggtgggtgtgagtgtgggtgtgtacgtaccaataaacaacctggttttaagacaatgtacaaatggcctccagtctttttttttttttttttttttttttttaactctgaactcacctgagatttccagcttctttcacagttgtaaaggctgctgtactctggaaggaaatgtcacaattttcagaacttgtagtcaataactatttatttatataagcacaggactgatagatt

SEQ ID NO: 463205 - DNA, 346 bp, Homo sapiens
gacagtgaggagggcagctgggctcaggtaagactccctaccctgtctagaaccagctcccaaaacttcaggacagtgttcttctggtaggttctctccgcagcaggaatctctgagtccttcatatgaaaagccctggacataggttctctgctcccatcagagtgccccccgcccccacccagttccctcaaactgcttgttctggtttctcagggtggcaggtgaggagccctggaggactgtggcccctgcattcctggcccttctcctcagtctcattcttttcctgggaataatcagacctagattagtatgagtcttcttcctctccctgtccctctca

SEQ ID NO: 463206 - DNA, 6180 bp, Homo sapiens
cgcgcttgggcggcggaggctgcagctacctcggcgccggctcggctctaggacgtgtcgggctgcacgggtcgggggcggctccctgctgcttccgagcctagccgcctggccttcggcatttgcaggcagacacactgccctccagaaacgatgggtgtcgctagatccagctgggactctgccagcctccggcactcagtctaagagaagggccatcttccagccctgctgtccctgcctgtcatggccacattcggctgctgtctgcatgtctggggacacagggcacccagccccagccctgagaagttaagccaggccttctggctcagttccacaggggcactccagaccccaggcccctttcagagcaaaagcaactgatgctatgggagaagcccctgcccacctgtccactcgcctggcactgcccactctgagacccatgcactgggttcccctggaggtgccaaccctgtgagtccctccctgtcccctgacgctgagaaggccctgccaacccccaccatgtgtgaggtgatgcccacaatcaatgaggggggtccccctcatggcgccgatgctgacgccaacttcgagcagctgatggtgaacatgctggacgagcgggagaagttgctggagtctcttcgggagagtcaggagaccttggcggccacacagagccggctccaggatgccatacacgagcgggaccagctccagcgccaccttaactccgccctcccccaggaatttgccaccttaacccgggagctgagcatgtgtcgggagcagcttctagagcgggaggaagagatatcagaactgaaagcagaacggaataacacacggctgcttctggaacatctggagtgcctggtgtcccgccatgaacggtcactgcggatgactgtggtgaagcgccaggcccagtcaccttcgggggtctccagtgaggtggaggtgctgaaggccctcaagtcactgtttgagcaccacaaggccctggatgagaaggtgcgagagcggctccgggcagcgctggagcgagtcaccaccttggaggagcagctggcaggtgcccaccagcaggtgtctgccctgcagcagggggcaggggtgcgggatggagcggcagaagaggaggggactgtggagctggggccgaaacgcctgtggaaggtaggaggatacgggccgggtagaggagctgcaggagctcctggagaagcagaactttgagttgagccaggcccgggagcgactggtcaccctaacaacaaccgtgactgaactcgaggaggacctgggcacggcccgccgggacctcatcaagtcggaggagctgagcagcaagcatcagcgggacctccgggaggctctggcccagaaggaggacatggaagagcggattactacactggagaagcgctacctggctgctcagcgtgaggcaacatccatccatgacctcaatgacaagctggagaatgagctggccaacaaggagtccctgcaccgccagtgtgaggagaaggcccgacacctgcaggagctgctggaggtggcagagcagaagctgcagcagacgatgcgcaaggcagagacgctgccagaggtggaggctgagctggcccagagaattgcagccctcaccaaggcaagtgggccaggggcctgggatctgcctctgtcccccatgttctgagctctcagggagccaggcagggaagggagcgcgtgggaggcgcactgggccaggagccagaaaactgcttcccgccgtgtgattccagggagcacactgccttgtgcctgtcagttggaagagtaatccctgtcctcatcaccctgcagggatgtgacagtctcataagaaggggtgtaaaagtacttgaaggagaagaagctatgttgatgcaaagtgtttttctttttcttttttttttttttttaatcctctacaccgtcgtggtgaacactttctttcacttggggctggagcagaaagattaggactttcatctctggaaaggtgaaaccttagaagagaaatggtatatatatccctgaagggcaaaggggatgttttaaggctaggcctgagcgaggaggaggcaggggagacctggcaggtattgaagtacctgggaagaaaggcaatggggatggtggtcctgctccaagatgataagtggaggctgagcgtcactggtactgggggccatgatccccagggccaccctggcaccagggctgaagaacggcatggcaacattgaggagcacctgcggcagctggagggacagctggaggagaagaaccaggagctggcacgggtgcgccagcgggaaaagatgaatgaggaccacaacaagcggctgtcggacacagtggaccggctgctcagcgagtccaacgagcgtctgcagctccacctgaaggagcgcatggctgccctggaggagaagaacacgttgatccaggagttggagagctcccagcggcagattgaggagcagcaccaccacaagggccgcctgtctgaagagattgagaagctgcgccaagaggtggaccagctgaagggccgaggggggccgtttgtggatggcgtccactccaggtcgcacatgggcagtgcagcagacgtgcggttctccctgggcacaaccacacacgcacccccaggcgtgcatcgccgctactcggcattgagggaagagtctgccaaggactgggagacttctccactgcctgggatgctggccccggcagctggccctgcctttgacagtgaccctgagatctccgacgtggatgaggatgagccagggggtctggtgggctctgcggatgttgtctcccccagcggccactcagatgcccagaccctggccatgatgctgcaggagcagctggatgccatcaatgaggaaatcaggatgattcaggaagagaaggagtccacggagctccgcgcggaggagattgagacgcgtgtaaccagtggcagcatggaagccctaaacctgaagcagctgcgcaagcgtggttccatccccacctctctgacggccctgtccctggccagcgcgtccccaccactcagcggccgctccacacctaagctcacctcccgcagtgctgcccaggacctggaccgaatgggggtcatgaccctgcccagtgacttaagaaagcataggaggaagctgctgtcgccagtgtctcgggaagagaaccgagaggataaagccaccataaaatgtgagacttctcctccttcctcacccaggacgctgcggctagagaagcttggccacccagccctgagccaggaagaaggcaagagtgccttggaggatcagggcagcaaccccagcagcagcaacagcagccaggactccctgcacaagggcgccaagcgcaagggcatcaagtcgtccattggccgcctgtttgggaagaaggagaagggcaggctgatccagctgagtcgggatggagccacaggccatgttctgctaacagactccgaattcagtatgcaggagcctatggtgcctgccaagctggggacccaggcagagaaggaccggcggctaaagaagaaacaccagctgcttgaagatgcccgcaggaaaggaatgccctttgcccagtgggatggtcctactgtggtctcctggttggagctctgggtggggatgcctgcctggtatgtggcagcctgccgggccaacgtcaagagtggtgccatcatgtccgctctgtcggacacagagatccagcgggagatcggcatcagcaatgccctgcaccggctcaagctccgcctggccattcaggagatggtgtcattgaccagcccctctgccccacccacctccaggacttcttctgggaatgtctgggtcacccatgaagagatggaaactctggaaacatctactaaaacaaccctggcctatggggacatgaaccatgagtggattgggaatgaatggctacccagcctggggctcccgcagtaccgcagctacttcatggagtgcctggtggacgcccgcatgctggaccacctcaccaagaaggacctgcgggtccacctgaagatggtggacagcttccatcgaaccagtcttcagtatggcatcatgtgtctgaagaggctgaattatgaccggaaggagctggagaagaggcgagaggagagccagcatgagatcaaggatgtgttagtctggaccaacgaccaggtggttcattgggtccagtctattgggctccgggactacgcaggaaacctgcatgagagtggtgtgcatggagccttgctggccctggacgagaacttcgaccacaacacactggccctgatcctccagatccccacacagaacacccaggcacgccaagtgatggaaagagagttcaataacctgttggccttgggcacagaccggaagctggatgacggggatgacaaggtgtttcgccgcgcgccctcctggaggaagcgcttccggccgcgggagcaccacggtcgcggcggcatgctcagcgcttccgcggagaccctcccggcgggcttccgtgtgtccaccctggggaccctgcagcccccaccggccccgccaaagaagatcatgcctgaaggtgagtaacaggcgggctgggcatggccgaggcccagccgagcgcgggcttcttcctggcaccccagggccgggccgggtggagaggggcgaggccgaggctggtgccccgcgctcctgcgctgcagctgcactaacgctccgcggggagcgtgtgtgcgcactaacccgccgctctgtgtgttctcccgcggctgccgacttctcccagctgggacggcggggtcgcagagactggagacctccacggttcggacctactcctgctgaccccccatcctcccgccccgggtctgacgggggagtgcccgtggctcggggtaagtgggccaggcccggggacgcgggcaccttgctgctggccctcggccccacgcacctgcccttggctgccggcctggccctgccgctccagtcccgcttaccagcactgcctggcttgccccttcctgcttcgtctggcctggggcgctttgcgcttggagcacgctgcgttgccgctgtcgcacacatcctacaacctctctccagctgctttgcaacctgatcaccttgagttctgagcagggactaggcttgcaggtgagataatgggccagggcacccagtccagaaggagcaatggcacctgggcagtgccagggcttaaagcccgctgctccttttcggtagaggagaggcccatcactggtgtggtggggtgggctctcccttaggcttgggcaaggcagccacctgcccttgctctcccttagtgttccctggcctccctgccatcaggttgctgggagtggagatggagggattattgagcagaaaatgagttggatggagataaacagctcccatccctgggtaatggatggtaagatgatggagattcctaagattggtggagttgggcaatgcatagccatctgactccttcagggtgctcttgatgggctggctgtaagggagactcagtcccagcctctcccctctacaactcctgccactgttggccatgtcgtaaggcagcagctgtgccaggatagctgggtccattcagagcaccttgagaagtgttgcagggaggtgttaagaagagaaatctgtgcaaacagtgatggaaggctgttgtcttggtgtatcccttgcctcatagtcaatatattttttttttggcgagtcaccagtgacccgagccctccacaccagcctcctgtatctcatcaggtcccttctcagtactgtatttgctcagtgcatcaggaatgggtgtatgggtgtgtgtgggtgggtgtgagtgtgggtgtgtacgtaccaataaacaacctggttttaagacaatgtacaaatggcctccagtctttttttttttttttttttttttttttaactctgaactcacctgagatttccagcttctttcacagttgtaaaggctgctgtactctggaaggaaatgtcacaattttcagaacttgtagtcaataactatttatttatataagcacaggactgatagatt

SEQ ID NO: 463207 - DNA, 3332 bp, Homo sapiens
  misc_feature (4)..(5): n is a, c, g, or t
  misc_feature (12)..(12): n is a, c, g, or t
  misc_feature (14)..(14): n is a, c, g, or t
  misc_feature (17)..(21): n is a, c, g, or t
ctcnncctctcncnctnnnnnatacatgattaaaccactgcaaacaaaggtctgtggaggatgctttgtccatactgcctggttcacttcacattacataaatcacggcgcagagctaccagcctaaaccacctctgttatcttcatttctctacagatttgcctttctttcaaacccactatcccattttcttctgtggccccagacagctgtctttgcagcacaacagacagcagtcactgcagctttgctttgagcatgttctacagaagtccacatcccttgcagttgcctttcctggatcatgggaccccatcacagtgagctcttccctatctgcaggtagaggactaagaattatacatttgctgggggcactgccatgtatactcactttacttcccattttactaaactgtattctaattttattcatttccctgtttagatttaaaacgttcagtaaaagcacagaaagtaaaagtagtataaaggcaagaccagtgaatgaaaaacaactcagaaattgaccacaaattcagtgctactttatatgacaatcccttctatctttaatagtattaatcaaatgtcttaaatcatttataaagaacagtctcttctaactactgtgaaaaacatgtgagggatgcatattaccagattaacctgagttatccaatgtgacattgtcatgagactgtgatttggactgtcatctatatcaacttcttaaggcctccattttttatacagttaaatagacactaacaaaggtagccaatacataaaattttatgtccagaagaattttaatgacaaacagatgctaggaaaacaattcctgccctggttacttttgtgtgaggatataatgtgcttaaaagcaagaaagacaataagctatttgtaaaatataattttttataatttcatggtgttctgattttaataaacacaaataaatttattaatctttgctgtctaatgaaaattattcacatcctgttgtttagtaaaatcattaaatgagaatatagctaatacaaacttttatttgtagaaagagaaaaacatagcagcatagcaaaatatacttgcattttgtataagcttcaaacaccacaaagtccattgaacgtttaataattatgcatatttcatttgttattttcataatgtataacatataaaagtactttactgaatatgagaaagactcagggagagagtctgaataacaaaaagaggaaatataggaaggaaagggaaagacaaagaaggagggtgagacagagaagagagaacaaacatccaggagtagtgatgtgaattatttgcttagttaccacaaaagtaataattacactaactctgtgggaacaatggtaatttcacagtagctcacgttactgttatcaccttatatcctgataactgtgaaattaatttgtggcactactgtatgtgtcggccataagctgttcccttggtaacagtattatgctaccatagagaaggaatgtttggcagtaaaatgggcagcagcaagctgattacacagggaaaagcttctatctaaatacacatagcataacaatcacccctggaaaaactacatggcttaccaaaagaggtctctctgttcactgtccattatctgttgactgaactagttcaaatgaataacaagtaatgatcaaattgccagtttatattttacaacagagtcttatctttaaaaaaatgcaaggaggaaatacaaaaatgtaatacatttatcttgctttcttttctatttcctcccctgaaattattactatgctattggaagccatacaaacacatatatacacaaatatacatatgcttcaatgaaaagcaggcatgcagctgacagctcggcaaccctgagcacagaattttgaagagagaatacactaaaagggaagaacataactacatgacatcataagaagtcctgaattagaagcgtatatttgaaaggtcatgcatcctgagctgccaacagcttaacaaccagaggcagaggccagctttgccagctcactgcttctactcatctttcatgatagtagccaggctgaatatagttccaggatgataatgaattggctgggcatactgtttatattagtatgtatgttcctgtactaaaccaagcatcatgaggccagcactattttgccatttttcagaaaaaaaatatgaacccttcaaaacatagtaagccttttttaaagtatatatttgattttgaaataatcaaaatatatgtagggatatgactgcatcctaagatttatgataagttctgatgagtaatattttctttctacatgcaaggcaaagttaatagtaactagaaagtctttatttggcatatcatagatttctgtcaaccaaaacaactaactctggggaacataacgttctgacaacttcagaagagttaagtcacagacaaaagtttattggatcttagttggctcctacccaccaattctttcttttccaagtggaacataatagattttcaatatttgttaaataattgaaaaaatatcctcaaaattcttttttggccatcttcccaacaagaatatggtcctaacctatatgtagagtcctttgctgtgtcatctatttcttcagaattattctcctaattcatatgtctggatagtctctctgaattgttatagaaaattaaaaatgtgaactatgaaattaatttttaaacttttataaccatctagtcatacacagaataaccacaaatataaacatggtttcaaagaattccctgtgacaatcaagcaaatagtgaaatagtttctgctattatgaatttatcacttactcagtgtatgaccatgggcaaatatcttcacctcaatcctgtgaggcaggtactattattctacccattttaagtatagatttgcaatatttgttaaatattcaatatttgttattataaaatgagtatactaatagtacctacctcacagtattgaggtgaagatatttgtccatgtacgtacaatatgggcataataatagtacctacctcacaggattgttattaagaataaataagataatccatacaaagtatttaacacattattgaaaaattaaatgatcaaaataaagcttgttgttattgttatcttttaataaatgcatctaaagtatttttaaatgtattcacttcagttatttaaagtttcatctgctgtatcacagagcacatatatgttcagaaacatttgttaagtatctatgtaccagataataaaggtgg

SEQ ID NO: 463208 - DNA, 1038 bp, Homo sapiens
agtgggtgcttttccttggcactgacactactgctagaccacggtccgcttaggtcacgggcatcttcccagatgctggcgttactgctagaccaaggagcccttgtcttctgggatgtgtcgtccttcattaaggtagcttatccaaaccagttcccaaatggtataaaaaagcctctaccaaaaggagggaggcttagcctgaaagaagacaggaaaaacaggcaggaaaaaacaagctgtgaaagaaagcaaggagctcaaagggctcaaaggcacatacaatgtgacagctttgaagggcagagggtcttgacattgactctccacaatgatatggagatcagtgtgttggcaacttctagcgtcagtgcagctctccttacctgcacagctagagacacagacaatattggcaatacagtattcttgtgggatttgtttgcttccagcataacagatgaatttttctccagcaaacacaacaattcattttcaacaggcaccagttcctcctaaatatggatgattcaccacgtctcagtgtgggttcccccaggagcagaacttaagacaaagatttcagtgcacgtagtttatttgggacttgatcccaaggagactggaagcattggtcaaggagggacagaatgggacagggaacagggagaagacaaaataaggatgtgttgccaagtgagttacactgcagatgactggtgcttactcccatgacagaactctggggagccacgtcgaacatggacctcagagttacacagccaggggataacggaactgaggcatgcattctccagtccagtcagtagtagaaggcttttctgcggtggggaatggaacccaggccaagtgggttctagctgcagagaaggggatacacaaccttaggtaagagggtgcacatcccagccattggatgtggggctggaggaagtcattcggctgggctcctaccgtttatacttattataccgttacggtcagtaagagacaggtggtgatgacgttgtcagttaa

SEQ ID NO: 463209 - DNA, 1557 bp, Homo sapiens
agtgggtgcttttccttggcactgacactactgctagaccacggtccgcttaggtcacgggcatcttcccagatgctggcgttactgctagaccaaggagcccttgtcttctgggatgtgtcgtccttcattaaggtagcttatccaaaccagttcccaaatggtataaaaaagcctctaccaaaaggagggaggcttagcctgaaagaagacaggaaaaacaggcaggaaaaaacaagctgtgaaagaaagcaaggagctcaaagggctcaaaggcacatacaatgtgacagctttgaagggcagagggtcttgacattgactctccacaatgatatggagatcagtgtgttggcaacttctagcgtcagtgcagctctccttacctgcacagctagagacacagacaatattggcaatacagtattcttgtgggatttgtttgcttccagcataacagatgaatttttctccagcaaacacaacaattcattttcaacaggcaccagttcctcctaaatatggatgattcaccacgtctcagtgtgggttcccccaggagcagaacttaagacaaagatttcagtgcacgtagtttatttgggacttgatcccaaggagactggaagcattggtcaaggagggacagaatgggacagggaacagggagaagacaaaataaggatgtgttgccaagtgagttacactgcagatgactggtgcttactcccatgacagaactctggggagccacgtcgaacatggacctcagagttacacagccaggggataacggaactgaggcatgcattctccagtccagtcagtagtagaaggcttttctgcggtggggaatggaacccaggccaagtgggttctagctgcagagaaggggatacacaaccttagggagatgccatccgcctcagtgtgtgccctaagaaattaaagagatgccaggaaggaaaagtattaatgaggagtacaaaattctactttagaaaacatcttggccggatgcagtggctcatgcctgtaatcccagcactttgggaggctgaggcaggtggatcgcctgaagtcaggagttcgagatcatcctggccaacatgatgaaaccccgtctctactaaaaatacaaaaaatttgctgggcatggtggtgcatgtctgtaatcccagctactcgggaggttgaggcatgataatcacttgaacccgggagaaggaggttgcagtgagctgagatggtgccattgcactccagcctgggcaataagagtaaaactccatctcaaaataataataaataataataataataataaccacggatttttgcaaggctacagagaaaagggaatgcctatacactcttggtaagaatgtaaattagttcagccactgtggaaagcggtttgaagatttctcaaaaaacagaactatcatgagacccagcaatcccattactgggtgtatacccaaaagaaaataaattataattattctacccaaagacacatacactaatatattcacaatagcaaagacatggaat

SEQ ID NO: 463210 - DNA, 3846 bp, Homo sapiens
  misc_feature (1)..(1): n is a, c, g, or t
  misc_feature (4)..(5): n is a, c, g, or t
nccnncccagcggggcagcttctgaggcagatgaggagcagcagggaaagtcgtggcctggtgttccctgtcgcagtgccccaactcattcctgtggatgtctaaacttgcccaaaggcaaaactcaatgtctctggctccagtcgattttgaatgtgtttcagaggaaaatttggttggtaacattgaagagacacttctcacctgcctgaaatgcccttcattatcttttcaggttgcaagggctctggaacagcccttgcagtactcacataaagagctggtttatagtgaggggcagcagcaacttcaagagggggaggatgcgaccatgagtccccgccccagacccaggagccttgaccttggggctgccgtagcagtggatgctcttcagctggatgacctgtcctgggccagtgaccctggacttcagccatatttcagcatctcaaggtacagtatgccaacacctcagctccatgttgagtcaaagcagttaacacagccaaggtattcagaggacactaatgataacagtagctactgactatttcctggccagctggggaaataaagaagtaagtttaataagtcttctaaatttgtccttgccattgtgataaataactttatcttgacaattaattatattatggcaaattaattataacttgccataatgataaataactttatcctgagtagagcagcgacacaagccctttaggacacatgcctgaggcaatgacagtctaactttgaaacagtggaagacctagtttcaaattcaagtttgctttgagtagaaattaactttacctctttttgcatggcaatggggccaatcttccttaagctgctccttaaaagaaaaggaatcatactgctaagaattcagacttcagcagacatggggagcattgggaggagcccgaatcactgatggaattgaacagtgcgtggagacggttcagcaggacaaggtccctggctccacctcttctgccacaaacatcagcatggtggtgtctgccagcccttcatccagtgtgagaagacagagatgaacactggagaaatcaacaagaaattgcgcccccagccggcagagaacaaacagcagttcagaaacataaagagaaatttcttgtaactcaagtggcctaattcctggccaaccagcagaagaaataccagtatgaagaattcaaagacctcataaaatctatgctgagggatgagctgcaattcaaggacgagaagcttgcagagcagcttgggcaagctgaggagctcaggcaatataaagtcctagttcactctcaggcacgagagctggcctggttaaggaagagattacaggaagggagagatgcctcccgctcattgaatcagcatctccaggccctcctcactccggatgagcctgacaactcccaggggcaggatatctgagagcagctggctgagggctgcaggctgacagagaacctcatccacaaactcagcccaggccggcaaattgtctcttgcaagtgtctttagcattcaaatgtgggaacacttaacgactgcttttcaaaatgagatgaagctccttgccgtgtggtgttggagaaggcacttgatgtgggggcatttggtggtaggagtgcttcagactggagtactctccatggagagaatgtccctgaataacacagcagaagccacttggtgggcctgtgaagtcccctgatggacagaggactgtgggacaagtttgtcctctcctaagagaaagaattagtttcgaaatgtgaactgtgacaggacaccaagcctgtgcctgggaatcagatctgtggcaggatggcggagacagctgccaaagtccagagagaggctggacaagtctccagggatatggggaccaaaagatgttttcaatatttggccacatcttgatggtggccctccagatcagaaatgcattgcctgatggattaggaaactgtgccagggcattttgttaaagataaaacatgagagctttcagttgaatggtgacccatgcctagatgttcatgtgtctgcacacattgggctgactatgcttgcagaatgtgaagtgagaaatatctgaatgaacattcctgtatttacagaaaatgatgaagatgtggatgacgatgtttacgttgaggaggctgagaaagtgcgggaatcacgtgcccccaggtaacactgaataatcaggagcaataatgggtggtaacatatgaaaaagatctaggaggcacactctctctggcgtctacattgggccaaaagcctgcattcccctggccacaatatgttaaattcaacccagcttagacacagggtgtggcagctgttatggttctctgtgtgtgctgagtgtcatgtctgtaccatacagggatagctgagtctccatcctcctcagctcctatctgcccagtgcaatgaacaccagctgctgtcttcctctttggctcccatagcagccatgctctgttgcagagagtggaggagtgcctgttccctcttaaagggaacctcctgtttgctttctgggaccactctcttatgcttcctgtcaaaactagctaggactccctgaggtccaatccctctctgtttaatcttctgttatgtctgtgtcacctggctcatcagggaggtgcgaagcctgaagagaaggaattgatgaaatgatcatacagatatgtatattgcatatatctatgcaatatacatattgcatcaatatcccatgatattgccggctcaatgaggacagagtcctctctctattatgatttggatttgaagggaagatgccatgggtcctaaacatcgcagcatgaccagcgtgtgctgcccacgacctgcagtgccatggtcaggtggaagtcattttacttcagtagaggacagtgttctcttctgaccttttcctcagtggctagatctgtatctctctctctcttctcccatctgccctccgttccctgccccgctttgttttttctctctgttcccaccctgctggccccttccacctgttttcttttcttcagctttcatcgttcacccccctctgcccacccatatgccccaggctaagtcccctgcacattcctggggaggggcgtagatgtgtatggttttaggcagtgccctctagatgtgtccatgatggggaaacatggctcagctgccagtataatgctttaaaagagtggccacttttgaaggccttttacatctaggatcctctatgacttaaaatatatgggccacattggaattccttgttccccaggaccttgcagtggatgccttctttcactgagcattcacagggtgcctattaggtgccaggccctgctctgggctaggggctccattgtgagcaatcctcagttcattgccacatggagcccacctctgcaggcatcaagagggtggggccgtcaaccacatctaccagtgctaagcatcaaggacaatgaaggctgagaatagcctgctggatttggctatatggtaggtaaggacttgtttgattctggggaaagcaatttcagcaatggggaggagaaagcagccttgttgcagggagctgaggatgcttagtagtgaggagatgaggagaacggtgagctagcatttatgaagcaacctttgcttcctatgtgataattacacttttcccaactttcagatttgtgtttcttcccttgccagaagttagtctctttacagactggacttgcaactttccggagtcattgtctttgcttgcattcctaccagaatccctagtgactctgc

SEQ ID NO: 463211 - DNA, 4097 bp, Homo sapiens
  misc_feature (1)..(1): n is a, c, g, or t
  misc_feature (4)..(5): n is a, c, g, or t
nccnncccagcggggcagcttctgaggcagatgaggagcagcagggaaagtcgtggcctggtgttccctgtcgcagtgccccaactcattcctgtggatgtctaaacttgcccaaaggcaaaactcaatgtctctggctccagtcgattttgaatgtgtttcagaggaaaatttggttggtaacattgaagagacacttctcacctgcctgaaatgcccttcattatcttttcaggttgcaagggctctggaacagcccttgcagtactcacataaagagctggtttatagtgaggggcagcagcaacttcaagagggggaggatgcgaccatgagtccccgccccagacccaggagccttgaccttggggctgccgtagcagtggatgctcttcagctggatgacctgtcctgggccagtgaccctggacttcagccatatttcagcatctcaaggtacagtatgccaacacctcagctccatgttgagtcaaagcagttaacacagccaaggtattcagaggacactaatgataacagtagctactgactatttcctggccagctggggaaataaagaagtaagtttaataagtcttctaaatttgtccttgccattgtgataaataactttatcttgacaattaattatattatggcaaattaattataacttgccataatgataaataactttatcctgagtagagcagcgacacaagccctttaggacacatgcctgaggcaatgacagtctaactttgaaacagtggaagacctagtttcaaattcaagtttgctttgagtagaaattaactttacctctttttgcatggcaatggggccaatcttccttaagctgctccttaaaagaaaaggaatcatactgctaagaattcagacttcagcagacatggggagcattgggaggagcccgaatcactgatggaattgaacagtgcgtggagacggttcagcaggacaaggggcgcctgtgtttcagcaaagcctgggcaattggaacgcagggctcctaagattccatgacacccccaccttctaattctgttattgcaactgcagaccgttacctggcatgctggctgccacctccctcactcttgtcagagtctgagctacaggcagtgccttcagctctgagctcaggcgtctcaaaccttgtttttgcgattaaggactctcaagtgctgtggggagtgatcacgtttttctcaacatccctggctccacctcttctgccacaaacatcagcatggtggtgtctgccagcccttcatccagtgtgagaagacagagatgaacactggagaaatcaacaagaaattgcgcccccagccggcagagaacaaacagcagttcagaaacataaagagaaatttcttgtaactcaagtggcctaattcctggccaaccagcagaagaaataccagtatgaagaattcaaagacctcataaaatctatgctgagggatgagctgcaattcaaggacgagaagcttgcagagcagcttgggcaagctgaggagctcaggcaatataaagtcctagttcactctcaggcacgagagctggcctggttaaggaagagattacaggaagggagagatgcctcccgctcattgaatcagcatctccaggccctcctcactccggatgagcctgacaactcccaggggcaggatatctgagagcagctggctgagggctgcaggctgacagagaacctcatccacaaactcagcccaggccggcaaattgtctcttgcaagtgtctttagcattcaaatgtgggaacacttaacgactgcttttcaaaatgagatgaagctccttgccgtgtggtgttggagaaggcacttgatgtgggggcatttggtggtaggagtgcttcagactggagtactctccatggagagaatgtccctgaataacacagcagaagccacttggtgggcctgtgaagtcccctgatggacagaggactgtgggacaagtttgtcctctcctaagagaaagaattagtttcgaaatgtgaactgtgacaggacaccaagcctgtgcctgggaatcagatctgtggcaggatggcggagacagctgccaaagtccagagagaggctggacaagtctccagggatatggggaccaaaagatgttttcaatatttggccacatcttgatggtggccctccagatcagaaatgcattgcctgatggattaggaaactgtgccagggcattttgttaaagataaaacatgagagctttcagttgaatggtgacccatgcctagatgttcatgtgtctgcacacattgggctgactatgcttgcagaatgtgaagtgagaaatatctgaatgaacattcctgtatttacagaaaatgatgaagatgtggatgacgatgtttacgttgaggaggctgagaaagtgcgggaatcacgtgcccccaggtaacactgaataatcaggagcaataatgggtggtaacatatgaaaaagatctaggaggcacactctctctggcgtctacattgggccaaaagcctgcattcccctggccacaatatgttaaattcaacccagcttagacacagggtgtggcagctgttatggttctctgtgtgtgctgagtgtcatgtctgtaccatacagggatagctgagtctccatcctcctcagctcctatctgcccagtgcaatgaacaccagctgctgtcttcctctttggctcccatagcagccatgctctgttgcagagagtggaggagtgcctgttccctcttaaagggaacctcctgtttgctttctgggaccactctcttatgcttcctgtcaaaactagctaggactccctgaggtccaatccctctctgtttaatcttctgttatgtctgtgtcacctggctcatcagggaggtgcgaagcctgaagagaaggaattgatgaaatgatcatacagatatgtatattgcatatatctatgcaatatacatattgcatcaatatcccatgatattgccggctcaatgaggacagagtcctctctctattatgatttggatttgaagggaagatgccatgggtcctaaacatcgcagcatgaccagcgtgtgctgcccacgacctgcagtgccatggtcaggtggaagtcattttacttcagtagaggacagtgttctcttctgaccttttcctcagtggctagatctgtatctctctctctcttctcccatctgccctccgttccctgccccgctttgttttttctctctgttcccaccctgctggccccttccacctgttttcttttcttcagctttcatcgttcacccccctctgcccacccatatgccccaggctaagtcccctgcacattcctggggaggggcgtagatgtgtatggttttaggcagtgccctctagatgtgtccatgatggggaaacatggctcagctgccagtataatgctttaaaagagtggccacttttgaaggccttttacatctaggatcctctatgacttaaaatatatgggccacattggaattccttgttccccaggaccttgcagtggatgccttctttcactgagcattcacagggtgcctattaggtgccaggccctgctctgggctaggggctccattgtgagcaatcctcagttcattgccacatggagcccacctctgcaggcatcaagagggtggggccgtcaaccacatctaccagtgctaagcatcaaggacaatgaaggctgagaatagcctgctggatttggctatatggtaggtaaggacttgtttgattctggggaaagcaatttcagcaatggggaggagaaagcagccttgttgcagggagctgaggatgcttagtagtgaggagatgaggagaacggtgagctagcatttatgaagcaacctttgcttcctatgtgataattacacttttcccaactttcagatttgtgtttcttcccttgccagaagttagtctctttacagactggacttgcaactttccggagtcattgtctttgcttgcattcctaccagaatccctagtgactctgc

SEQ ID NO: 463212 - DNA, 1318 bp, Homo sapiens
gattgccacaaggttgcagggaatggggagtgactgctagtgggtactaggtttctttctggggtgatgaaaatattctaaagttgattacgtggtgatgattgtacaactctgtgccttttgggctttaaactctgcatccttccagtgtcctgggaagagtaccagccctgggaggggaggccctgaggactttgtcaatgatgatggtggtaatgatggcagaaataattcagtggttgcatactacgtgccaagcactgttgtaagttctttatatggcacctcatttaatttccccaacaactctgtgaagaaggtccactattctccccagaacttcacagacaacattggaaaggccctggacatcctccatgctgaggttcctcgggcatttgtgaacctggtgacggtgcttgagatcgtcaacctgagggagctgtaccaggagaaaaaagtctactgcccaaggatgatcctcaggtctctgtgtccctgtgtcctgaagtttgatgataactcaacagaacttgctaccctcatcgaattcaacaagaagtttcaggagaagacccaccaactgattgagagtgggcgatatgacacaagggaagattttactgtggttgtgcagccgttctttgaaaacgtggacatgccaaagacctcggaaggattgcctgacaactctttcttcgctcctgactgtttccacttcagcagcaagtctcactcccgagcagccagtgctctctggaacaatatgctggagcctgttggccagaagacgactcgtcataagtttgaaaacaagatcaatatcacatgtccgaaccaggtccagccgtttctgaggacctacaagaacagcatgcagggtcatgggacctggctgccatgcagggacagagccccttctgccttgcaccctacctcagtgcatgccctgagacctgcagacatccaagttgtggctgctctgggggattctctgaccgctggcaatggaattggctccaaaccagacgacctccccgatgtcaccacacagtatcggggactgtcatacagagaaagtaaaccagggttcttatcagactcctgggtcagcaaatccaacaggaaatgcaccagaaaagcaccaaatccctgaatcttcacctccccgcttgcatgtatacgtgtacacgtggtgttcctacgtctctgtttactgtctttatgtgtttattcatgttgtcttgtagtcacacagctgcctttacatatatgtacacatctgcacagaaaacctctgaaacccatcgcacacttc

SEQ ID NO: 463213 - DNA, 2188 bp, Homo sapiens
ccaggcggtgcgcttcggacccagccagggcatgtgctcggaggcccgcctggctcgcaggttgcgggatgcgctgcgggaggaggagccgtgggcagtagaggagctgctgcgctgcggcgcggaccctaatttggtgctagaggacggcgcagcggctgtgcacttggcggccggagcccggcacccgcgcggcctgcgttgcctcggggccctactgcgccaaggcggggaccccaacgttcgatctgtcgaggcactgacgccgctgcatgtggccgccgcgtggggctgccgccgcggcctggagcagctgctgagccaaggagcggacccggcgctgcgcgaccaggacggactccggccgctggacctggccctgcagcagggacacctggagtgcgcgcgagtcctgcaggatctcgacacgcggaccaggacccggacccggatcggggcagagactcaggagcccgagcctgcacctggcaccccaggcctctctggacctaccgatgagacgctggactccatagcactccaaaagcagccatgcagaggtgacaacagggacattggcttggaggctgacccaggaccccccagcctccctgttccccttgaaactgtggacaaacatgggagctcggcgtcccctccagggcactgggattacagctcagacgcctctttcgtcacagcggttgaggtctctggagctgaggacccagcctcggacactcccccctgggctgggtcattgccaccgaccaggcagggacttctgcatgttgtccatgccaaccagagggtacctaggtctcagggcacggaggcagaactgaatgcccgtctgcaggccctgactctgaccccaccaaatgctgctggcttccagtcctccccttcctccatgcctctcctggacaggagtccagctcatagccccccacggacaccaacccctggagcttctgactgccactgcctgtgggagcaccagacatccattgatagtgacatggccacgctctggctgacagaggatgaggcaagctctacaggtggcagggaacctgtcggcccttgccggcacctgccagtctccactgtgtctgacttggagttgctgaagggactccgagcacttggtgagaatcctcaccccatcacacccttcaccaggcagttgtaccaccagcagctggaagaagcccagattgctcctggcccagagttttcagggcacagcctagaactggctgcagccctgcggacgggctgtattccagatgtccaggcagatgaagacgcgctggcccagcagtttgagcagccagatcctgccaggaggtggcgggagggggtcgtgaagtctagcttcacctatctgctgctggaccccagggagactcaggacctgccagcccgagccttctcactgaccccagctgagcgccttcagactttcatccgtgccatcttctacgtgggcaaagggacgagggcccggccatatgtccacctctgggaggcccttggtcaccatgggcggtcaagaaaacaggcctgccccaaggtgcgtcagatcttggacatctgggccagtggttgcggtgttgtgtccctacattgcttccagcacgtggtcgctgtggaggcttatacacgggaggcgtgtattgtggaagccctagggatccagacgctcaccaaccagaagcaagggcactgctatggagtggtggcaggctggccacctgctcgtcgccggcgcttgggggtgcacctgctgcaccgtgccctccttgtcttcctggctgaaggcgagcgacagcttcatccccaggacatccaggcccggggctgagtgctggggagttggccatccagcctggggagaaatgtttgaatgttccagctgccccatgctgacagcagcccccatctctggtttcagaaggggtgtgtgtgtgtgtgtgtgtgtgtgtgtgtgtgtgtgtgtgtgtttgtgtgtgtgtgtgtgtgtgtagggagcacccaggcagatctcccccaggctgagagaggactttgttacagatggtactgctggagaggtagtaagtagtgagctccccatcgtgggaggaggacaagaagggaagcagaaggtgctttggaacagtccggtgcttctgtaagaggc

SEQ ID NO: 463214 - DNA, 462 bp, Homo sapiens
cagcggctgccacggagctcgcagctgcggcttctgaggagtaagcggcgcggtagcgaaggccgccgaacctgcctggctagccggcgacttgagtgacgaggcagtagaggagctgctgcgctgcggcgcggaccctaatttggtgctagaggacggcgcagcggctgtgcacttggcggccggagcccggcacccgcgcggcctgcgttgcctcggggccctactgcgccaaggcggggaccccaacgttcgatctgtcgaggcactgacgccgctgcatgtggccgccgcgtggggctgccgccgcggcctggagcagctgctgagccaaggagcggacccggcgctgcgcgaccaggttgggaggcactgcgcgggcaaagaaaggctgggtgagcccagagggagggaaggaaggtaagagggcctcgggcgccccctgctgaccgcgcccctgta

SEQ ID NO: 463215 - DNA, 2197 bp, Homo sapiens
cagcggctgccacggagctcgcagctgcggcttctgaggagtaagcggcgcggtagcgaaggccgccgaacctgcctggctagccggcgacttgagtgacgaggcagtagaggagctgctgcgctgcggcgcggaccctaatttggtgctagaggacggcgcagcggctgtgcacttggcggccggagcccggcacccgcgcggcctgcgttgcctcggggccctactgcgccaaggcggggaccccaacgttcgatctgtcgaggcactgacgccgctgcatgtggccgccgcgtggggctgccgccgcggcctggagcagctgctgagccaaggagcggacccggcgctgcgcgaccaggacggactccggccgctggacctggccctgcagcagggacacctggagtgcgcgcgagtcctgcaggatctcgacacgcggaccaggacccggacccggatcggggcagagactcaggagcccgagcctgcacctggcaccccaggcctctctggacctaccgatgagacgctggactccatagcactccaaaagcagccatgcagaggtgacaacagggacattggcttggaggctgacccaggaccccccagcctccctgttccccttgaaactgtggacaaacatgggagctcggcgtcccctccagggcactgggattacagctcagacgcctctttcgtcacagcggttgaggtctctggagctgaggacccagcctcggacactcccccctgggctgggtcattgccaccgaccaggcagggacttctgcatgttgtccatgccaaccagagggtacctaggtctcagggcacggaggcagaactgaatgcccgtctgcaggccctgactctgaccccaccaaatgctgctggcttccagtcctccccttcctccatgcctctcctggacaggagtccagctcatagccccccacggacaccaacccctggagcttctgactgccactgcctgtgggagcaccagacatccattgatagtgacatggccacgctctggctgacagaggatgaggcaagctctacaggtggcagggaacctgtcggcccttgccggcacctgccagtctccactgtgtctgacttggagttgctgaagggactccgagcacttggtgagaatcctcaccccatcacacccttcaccaggcagttgtaccaccagcagctggaagaagcccagattgctcctggcccagagttttcagggcacagcctagaactggctgcagccctgcggacgggctgtattccagatgtccaggcagatgaagacgcgctggcccagcagtttgagcagccagatcctgccaggaggtggcgggagggggtcgtgaagtctagcttcacctatctgctgctggaccccagggagactcaggacctgccagcccgagccttctcactgaccccagctgagcgccttcagactttcatccgtgccatcttctacgtgggcaaagggacgagggcccggccatatgtccacctctgggaggcccttggtcaccatgggcggtcaagaaaacaggcctgccccaaggtgcgtcagatcttggacatctgggccagtggttgcggtgttgtgtccctacattgcttccagcacgtggtcgctgtggaggcttatacacgggaggcgtgtattgtggaagccctagggatccagacgctcaccaaccagaagcaagggcactgctatggagtggtggcaggctggccacctgctcgtcgccggcgcttgggggtgcacctgctgcaccgtgccctccttgtcttcctggctgaaggcgagcgacagcttcatccccaggacatccaggcccggggctgagtgctggggagttggccatccagcctggggagaaatgtttgaatgttccagctgccccatgctgacagcagcccccatctctggtttcagaaggggtgtgtgtgtgtgtgtgtgtgtgtgtgtgtgtgtgtgtgtgtgtttgtgtgtgtgtgtgtgtgtgtagggagcacccaggcagatctcccccaggctgagagaggactttgttacagatggtactgctggagaggtagtaagtagtgagctccccatcgtgggaggaggacaagaagggaagcagaaggtgctttggaacagtccggtgcttctgtaagaggc

SEQ ID NO: 463216 - DNA, 208 bp, Homo sapiens
  misc_feature (5)..(5): n is a, c, g, or t
gcggnccggaaggtagctgtactgagagcaccatccgccgcacaagtgaacctcatgggaatggggtttggagcagccctgcccctcgctgtgaacttcctgttggtgctggttcacatgatgctcttatagttggtaagttttatgaagtgtttgctgaggaattctgtcatctttaacagtaacgctaccttacttataatgaatg

SEQ ID NO: 463217 - DNA, 222 bp, Homo sapiens
ctagaggagtccccgcgaaaggtgaagcgtgttatctgagagcaccatccgccgcacaagtgaacctcatgggaatggggtttggagcagccctgcccctcgctgtgaacttcctgttggtgctggttcacatgatgctcttatagttggtaagttttatgaagtgtttgctgaggaattctgtcatctttaacagtaacgctaccttacttataatgaatg

SEQ ID NO: 463218 - DNA, 491 bp, Homo sapiens
cagaagggaagcagtactcaataaaatcaatttggatattttatggtgagtattatggtgaagaacattcaatacctgaggaaactcaagtatccaacaaactcaacccttacagagacacatagagctgaaaataaatatataaataaacttaggaaaaacacaaaaatcttttgtccaaatcctccagctatccttaatgggagacacacaggaactccccctggagatattccctatggaaaagaagtatcttacacatgtgacccccacccagacagagggatgaccttcaacctcattggggagagcaccatccgccgcacaagtgaacctcatgggaatggggtttggagcagccctgcccctcgctgtgaacttcctgttggtgctggttcacatgatgctcttatagttggtaagttttatgaagtgtttgctgaggaattctgtcatctttaacagtaacgctaccttacttataatgaatg

SEQ ID NO: 463219 - DNA, 1001 bp, Homo sapiens
gcacccaaggaagcagctgtgaacagcagaaagaggatgagaggattggggaagacctcggtttctttcctgttgcttcataaaatgtcagggctggacagcactggctacagacaggaatcagagggtccagagcttctaccagggcacctcaggaatcgtgcctgggacatggggacgctctgtccccattctaccagaggagcttctatgttgcctcattttttttttttgtatactgggcattcatgtgagatttcatttggaaagattttgctactgaaaaaaacttaaaaacagtcagcttggttcagagtttctgcagatgaaggagaagggtctggtgagcatccagcgcttggcagcctgtcactcagaggtcctcaccgggaagctgcacgacgtgtgcttggtggtgactggggaggtcaccaacctgcggtccaaggtgtctcacctggccatcagcaccttgggagacctcttccaggccttgaagaagaatatggaccaggaggccgaggagatcgcccgctgcttgctgcagaagatggcggacaccaacgagttcatccagagagcagccggccagtctctgagggctatggtggagaatgtgacccttgcccgctccctggtggtcctcacctcggcgggtgtctattcagttcagcaaacatgcattaagctcctgccaagcaccagggatgtgtcaggcacagcagggcaccaccggaaccccttgatccggaaatacgcggctgagcacctctcagctgtgctggagcagatcggcgctgagaagcttctctcgggcaccagagacagcacagacatgttggtgcacaacctggtgaggctggcacaggactccaaccaggacaccagtgacctggatgagattggagactattactctaagtgaaataactcaggaatggaaaaccaaacatcgtatgttgtcactcataagtgggagctaagctatgaggatgcaaggg

SEQ ID NO: 463220 - DNA, 1853 bp, Homo sapiens
attctccttgctaatctccacacgcagaaactgaggctcagaaaggctgaggcacttgccagggcgcacagccatacctatcctccaactctcctgacccaaggaccacagtcacatgactatctgtgcaggctgcaggattgtccctctggtggtgcaccgggagtcccaggaactccccttacaccccgccctgcgtgcgccttggcggagccttccgcgccagtccaggctgttttatgtatcccaggggccccaggaagaggagacagtggtcttccctgaactccgagacctgccccggggccctgccggtgtgcaccttgccgtccatgttggcaatgctgcagttgcactcggtggcgccgtagaactccccgatttggcgtacgccgaagcgctccgtgaactcctcccagatggcaggacgcagcccgttccccaccgccaggcgcacgcggtgtcgcctctccgcctcgcgcaccggctgcttcagcaggtagcggcagatctccccgatgtactgaaccacctgggggacgggggactttgcacatgctagccttttgcctgaagcagtcttcccccagatgcatttgcctgaactcttcagtctcagctcaaacgtcactgagaggcatcccctgtgcccccagctgtgcccctgagaaggggctgggggtggagggatggggagtaactggggatgggatttcctttggggggcatgagaatgttctggatctagatagacatggtgattgtacattgtgaatgccaccaaattactgactttttttttttttaaagatggaatctcactctgtcacccagactggagtgcagtggcccgatctcagctcactgcagcctccgcttcccaggttcaagcgattctcctgcctcagccttccaggcagctgggattacagattagtaattttcccaagaccctccaaacagaaccaaaactcctcaaaagcgaagccaagcacagctgtggaccttgtggtataccccaagatgctcagcccagagcccccaacccctgctcagctgtgtgacctggcctgaatctctctgggccccatctgtccaatctgcatctgccaacttgccacagtccctggacaacctctcacccaatccttcccagtcagccttgctattccctccgggctccatacctgtttcctgtacctcccgcctgtatttcctgtatcctgccccacattacagcactgaaaccctcagcctggtctcctctcactgtggaggggaaagaagaattcctgttcttaacctctgcctgctctcctctccgggacagcagatgcctccacctccgcctcacgcgttcctcacctggaagccccagactcatcgcccttcccatcccagggtctcaattccctacagtcagcagcagggaagacccacagggcacaaggcatggggaaggcattgccttaaggagctcaggcaccctgggcccaatcctagccgcattacaagccttagtttccccagctgcaaaatgggtccaccctccaaagttataggattgcattgagtttacacgtggagggtttagctctggtctggacacagagcaggtactcaggaaacactacttgccctctctgtccccatcctgaacagccattccttaagccccgctccccaccccacccctagagacgggggagcaggttgcgccagcaggtggacaggagggcgcacataagggagttaagggaatagagcctggtcggggggcggggcctggctgggagaggacgggacctgaccaggaggaggtggggctttgctgggaggtacggggcctcacc

SEQ ID NO: 463221 - DNA, 2685 bp, Homo sapiens
tccggtggacagcggcttttagcttcagcctgaccatactggggaactctgggggtttgtcctgatgggaagcagcagaggtgagcggtcatctccctcactgttcaccctgcagtcatctccctcactgttcacctagagctgtcatctccctcactgttcacctagagctgtcatctccctcactgttcacctacagcggtcatctccctcactgttcacctacagcggtcatctccctcactgttcacctacagcggtcatctccctcactgttcacctacagcggtcatctccctcactgttcacctacagcggtcatctccctcactgttcacctagagcggtcatctccctcactgttcacctagagcggtcatctccctcactgttcacctagagcggtcatctccctcactgttcacctagagcggtcatctccctcactgttcacctagagcggtcatctccctcactgttcacctagagtggtcatctccctcactgttcacctagagcggtcatctccctcactgttcacttagaggagaggtcatctccctcactgttcacctagagctgtcatctccctcactgttcacttagaggagaggtcatctccctcactgttcacctagagctgtcatctccctcactgttcacctacagcggtcatctccctcactgttcacttagaggagaggtcatctccctcactgttcaccctgcggtcatctccctcactgttcacctaaagcggtcatctccctcactgttcacctagagctgtcatctccctcactgttcaccctgcggtcatctctctcactgttcacctagaggagaggtcatctccctcactgttcaccctgcggtcatctccctcactgttcacctagagcggtcatctccctcactgttcatctagaggagaggtcatctccctcactgttcatcctgcggtcatctccctcactgttcacctagagtggtcatctccctcactgttcaccctgcggtcatctccctcaccgttcacctagagcggtcatctccctcactgttcacctagagcggtcatctctctcactgttcacctagaggagaggtcatctccctcactgttcaccctgcggtcatctccctcactgttcacctagagcggtcatctccctcactgttcatctagaggagaggtcatctccctcactgttcaccctgcggtcatctccctcactgttcaccctgcggtcatctccctcactgttcaccctgcggtcatctccctcactgttcaccctgcggtcatctccctcactgttcaccctgcggtcatctccctcactgttcaccctgcggtcatctccctcactgttcacctagagcggtcatctccctcactgttcacctagagcggtcatctccctcactgttcacctagagcggtcatctccctcactgttcatctagaggagaggtcatctccctcactgttcaccctgcggtcatctccctcactgttcaccctgcggtcatctccctcactgttcacctagagcggtcatctcccttactgttcacctagagcggtcatctccctcactgttcacctagagtggtcatctccctcactgttcacctagaggagaggtcatctccctcactgttcacctaggatggttgccgtggggaggaggcggaaagttcgcccaccccttagagtacagaaaaagaaagatttcagagatgtcagtttgggaaggtccttgaaaagtcacttggcaaagaaaagttgtgagaagaaggttgatgttttgtcaaagaaatgcaacgatgacagatgccaacctgccttttcttccagcggcagaggacctcaggccgtggtgtgcatgcccgtgtatcggtgtggacacctcattgcctctgaggattctcttcccttcactctcatcacaaaagaggtgcagaaagcagtctatggattcatgccaaatgagtggtactggaagggaattcggtttgctcagctagaggacgtgttgggaagatgggtctgattggagatgactaaaagacacctataaagatatagaagttaagacaaaagtcacaattatgttgacaactgctgttacagtgttttcaatatatttatccaatagaaaagttttattttactgcacaataatatgttctattaaattaataaaaacgtactcatgagtgacttcttgtcatacagatctctatatctcttagagctgtattttctctgactgtaaaatggagacacaagccagaaaatctttaagttcctgccaagttttaagagtttgaagcttccacgatactctgtgcccaggcccttcctgatgtctgcttttacagcgggacaagcagcaatgctgttgtactctctgcatcttggggcttgttcctctgaacccttgaagacaagggctgagccgcgtcagctctttcccaaaacacaatttaaacccttcggagtggtcagaaatgccactttgggaggcctccctgggttctctgggtgttttgttgaagcagtctcaggttctctaacgttctttttgttgaagatgatatctacaagctttataagctttcttctgatggggagagggaagaggttctcttaaatacagtgttcaactatcaacc

SEQ ID NO: 463222 - DNA, 1938 bp, Homo sapiens
cagccattcagcgtttgggtgaagacggaggcgggttctggacagacgtacgctgtcagggagtgtttacttcgcctccacttctgttcctccccgccctggtgctgctccgggtcacatactcgtcctgagccggcttcagcctctctgcgcagaagtgtcccggagccatggccgagtaatcttatgcgaagtctaccaagcttgtgctcaagggaaccaagacgaagaggcgagatggaaagaaagtatcaaggagtgagctgaagccactgcccttgagaaccctctcgaggagtctggcctcatgaagatgccagaataaacggcagatatatcctgaatgaatgtgagatttttaccctgtgaatttcctgtgaggagtgtaagaagaaaaagagcaaagagaagaagagaaaaagagaagaagatgaagaaacccagtttgatatgttggaatctggtgaacagtaacaaactttgatgaaatttcaggaaccatagccattgaaatggatgagggaacctatatacatgcactcgacaatggtctttttaccctgggagctccacacaaagaaggggaaaatggctttgttggcctcaaatggctgctttattagatgcaatgaagcaggggacatagaagcaaaaagtaaaacagcaggagaagaagaaatgatcaagtcttttatagatggaaatttaggctgtttccagtcttttgctcttataaacagtgctgcggtacataacattgaatatgcatcaatttgtggatgtgcgggtggacctgaagataaatttccggaatcagaattaccaggtggatatgagctcagccttacagacaggaagacagcctctgaccctccttacatcctcattgtttttgtcagtcagttcatggaaatcacagtgatttcaagatgtgcagccctggaactggaatctggccacagagatcccttaagagacatgagtcattaccattgccaattgcctgttctgtgggtgatcctaattgttgaatgcagatcaattaacttatgacatgtgatagtaaacagctatccaaacttaggaggatataagaagcttgtaaaagaggtgggttccaattaattaaaaacaagttgtgtaatgttaaaaatcttaatactttggtaatagtctgtgcaacgtaaaatagctattaagctttcaatctgatcaaatgaacacttgtctactagggataatttgatcctagtgtattcacttggaggacaaaactaaattaatgattgctttattgcctagcaggatctgatgtgtaaaatgtttctgaaataattttttctgtagtgtttctgacacaagggctgcggaggaagcatatgatagcacttactcatatagattatatatatgaattaaaaacacatagccagaacctgtctttttctgaatatagttgctcagttaattttttcttctgcataagaaatcatctcgaatgttcttatgtgatacgtaaagtggggaaagtggaagataaacatataacccattggattctcttttccaatatctagattagatcctgtgctgaaagagaaaccaagaaaaaagatgacattccagaagaagacaaaggaaatgtaaaacaatgtgaaatcaattatgtaaagaaatttcagagcttccaagagcacaaacttaaaataagtaaagaagacagtaaaattcttaaaaaggctcagaaagatggatttttgcaagagacgcttctggacagaggaccaaattgaaagccgacagatactgcaaatgactgggatttttgtttctgccttatctttttgtgtttttttctgaataaaatattcaggggaaatgcttttacagagttcttgagttgttgtgaaattattgtttagctagtagctagtttaa

SEQ ID NO: 463223 - DNA, 917 bp, Homo sapiens
cagccattcagcgtttgggtgaagacggaggcgggttctggacagacgtacgctgtcagggagtgtttacttcgcctccacttctgttcctccccgccctggtgctgctccgggtcacatactcgtcctgagccggcttcagcctctctgcgcagaagtgtcccggagccatggccgagtaatcttatgcgaagtctaccaagcttgtgctcaagggaaccaagacgaagaggtgggtcctgcacctccggcgggagcctcctcagttcttttcggacgcactccacccccctcgaatccggtggaagccgtggcgcggagagccggctttgtggcctcccaggctttgccctggcccctgtccgggctggactgaggccggaccgcggttcctggcgcctgtgcagagaggggcagcctcccgcactgacgaccctggaaacaggatagacgggcgggtgacccgtggccccgtacccacgagtttcggtcctctgaggcatctctgcaggcctctgcctgaagaagagagaggagcgagagagaagaagagaagaaagagaagaacaaaagaaacccagaaagaaaaaaagaaacaaaaaacaagaacaaacaaaaaaaaaaacagaaaccatagccaaagaacaaggagaagagaaaaccaagaaaacagatcactacaacgatgagtctagtgaacccccgagaagagaagctcccacacaaaagaagaggagagaaaaaagagtgtgaggagaagccctacaaaaaaactgggcgatgaataaggaaacaagaaaggcaggaaaaccaaagaaagccaggggaagagaggacgaacaagaagaagaaaaagctgggggcatggatgaaggatccagtagcgaggaagggggaacccgaagaaaaaccgagac

SEQ ID NO: 463224 - DNA, 860 bp, Homo sapiens
atttattattcttcctatgtagataagtaatgtcctagatttataccatagaaaaacaggtagagacgtttagctgtgagtgtacaagtataaatcaattaagtgccagattttgatcatcaccagttgctcattcaagtcctatgttgcaaagttactcttacccttttttacattacttgataaaggcaatgtttaattacatatttcctgttaactagctggtagagtacatacgtaaagtcagtaaataatgttacaaattttttccagctgagtaagtgaatatgtatctagttgtaagaaatcaagaagaggataaaaaatataatcaggatgtggactctaaaacggaataaactctatgtcctgtaacttttctcacttgtaataatacagcattctcaccctgttaaatggaaatttagagcacccttaaattccggaataaaattgctatttggatagaaaaaacccttaggcaacatttattgaatattaggaaataacttttataggattataatccattttttatagaaaccaaatttaaaagtatacatattttaatataagtgttgtgataatacagtaaccaaaattgaacacacagttttatagctttttatatttagtagcagttgaatatatatggcatgttttacatagattaattttactatttttatttgtttaaacaagaggaccaaattgaaagccgacagatactgcaaatgactgggatttttgtttctgccttatctttttgtgtttttttctgaataaaatattcaggggaaatgcttttacagagttcttgagttgttgtgaaattattgtttagctagtagctagtttaa

SEQ ID NO: 463225 - DNA, 1821 bp, Homo sapiens
aagcttgtgcataagggacccaaggcgaagagatttgcctgaggttgactatacatacaaatattgagcatttcctcctggtctccgtgataaacaaaggttttgatattgttcggcgagatggaaagaaagtatcaaggagtgagctgaagccactgcccttgagaaccctctcgaggagtctggcctcatgaagatgccagaataaacggcagatatatcctgaatgaatgtgagatttttaccctgtgaatttcctgtgaggagtgtaagaagaaaaagagcaaagagaagaagagaaaaagagaagaagatgaagaaacccagtttgatatgttggaatctggtgaacagtaacaaactttgatgaaatttcaggaaccatagccattgaaatggatgagggaacctatatacatgcactcgacaatggtctttttaccctgggagctccacacaaagaaggggaaaatggctttgttggcctcaaatggctgctttattagatgcaatgaagcaggggacatagaagcaaaaagtaaaacagcaggagaagaagaaatgatcaagtcttttatagatggaaatttaggctgtttccagtcttttgctcttataaacagtgctgcggtacataacattgaatatgcatcaatttgtggatgtgcgggtggacctgaagataaatttccggaatcagaattaccaggtggatatgagctcagccttacagacaggaagacagcctctgaccctccttacatcctcattgtttttgtcagtcagttcatggaaatcacagtgatttcaagatgtgcagccctggaactggaatctggccacagagatcccttaagagacatgagtcattaccattgccaattgcctgttctgtgggtgatcctaattgttgaatgcagatcaattaacttatgacatgtgatagtaaacagctatccaaacttaggaggatataagaagcttgtaaaagaggtgggttccaattaattaaaaacaagttgtgtaatgttaaaaatcttaatactttggtaatagtctgtgcaacgtaaaatagctattaagctttcaatctgatcaaatgaacacttgtctactagggataatttgatcctagtgtattcacttggaggacaaaactaaattaatgattgctttattgcctagcaggatctgatgtgtaaaatgtttctgaaataattttttctgtagtgtttctgacacaagggctgcggaggaagcatatgatagcacttactcatatagattatatatatgaattaaaaacacatagccagaacctgtctttttctgaatatagttgctcagttaattttttcttctgcataagaaatcatctcgaatgttcttatgtgatacgtaaagtggggaaagtggaagataaacatataacccattggattctcttttccaatatctagattagatcctgtgctgaaagagaaaccaagaaaaaagatgacattccagaagaagacaaaggaaatgtaaaacaatgtgaaatcaattatgtaaagaaatttcagagcttccaagagcacaaacttaaaataagtaaagaagacagtaaaattcttaaaaaggctcagaaagatggatttttgcaagagacgcttctggacagaggaccaaattgaaagccgacagatactgcaaatgactgggatttttgtttctgccttatctttttgtgtttttttctgaataaaatattcaggggaaatgcttttacagagttcttgagttgttgtgaaattattgtttagctagtagctagtttaa

SEQ ID NO: 463226 - DNA, 1084 bp, Homo sapiens
  misc_feature (881)..(881): n is a, c, g, or t
  misc_feature (1084)..(1084): n is a, c, g, or t
cagccattcagcgtttgggtgaagacggaggcgggttctggacagacgtacgctgtcagggagtgtttacttcgcctccacttctgttcctccccgccctggtgctgctccgggtcacatactcgtcctgagccggcttcagcctctctgcgcagaagtgtcccggagccatggccgagtaatcttatgcgaagtctaccaagcttgtgctcaagggaaccaagacgaagaggtgggtcctgcacctccggcgggagcctcctcagttcttttcggacgcactccacccccctcgaatccggtggaagccgtggcgcggagagccggctttgtggcctcccaggctttgccctggcccctgtccgggctggactgaggccggaccgcggttcctggcgcctgtgcagagaggggcagcctcccgcactgacgaccctggaaacaggatagacgggcgggtgacccgtggccccgtacccacgagtttcggtcctctgaggcatctctgcaggcctctgcctgtaagaagaaaaagagcaaagagaagaagagaaaaagagaagaagatgaagaaacccagtttgatatgttggaatctggtgaacagtaacaaactttgatgaaatttcaggaaccatagccattgaaatggatgagggaacctatatacatgcactcgacaatggtctttttaccctgggagctccacacaaagaaggggaaaatggctttgttggcctcaaatggctgctttattagatgcaatgaagcaggggacatagaagcaaaaagtaaaacagcaggagaagaagaaatgatcaagattagatctgtgctgaagagaagcagaaaagatgactccgaagagacaaggactggtncccatgtgactcctttttagcaattcgagcttcagagccaactatagtacgaacgtaatctaaagtccaaatggttgtagacttgggaggccctgaacgcggtgcaacgggtggcgccaccgggtccaatcggggttaaaaggggggttcggccgccttaggcgtattacccgggtgtttggccttgttttatcttttcccgn

SEQ ID NO: 463227 - DNA, 2074 bp, Homo sapiens
cagccattcagcgtttgggtgaagacggaggcgggttctggacagacgtacgctgtcagggagtgtttacttcgcctccacttctgttcctccccgccctggtgctgctccgggtcacatactcgtcctgagccggcttcagcctctctgcgcagaagtgtcccggagccatggccgagtaatcttatgcgaagtctaccaagcttgtgctcaagggaaccaagacgaagaggtgggtcctgcacctccggcgggagcctcctcagttcttttcggacgcactccacccccctcgaatccggtggaagccgtggcgcggagagccggctttgtggcctcccaggctttgccctggcccctgtccgggctggactgaggccggaccgcggttcctggcgcctgtgcagagaggggcagcctcccgcactgacgaccctggaaacaggatagacgggcgggtgacccgtggccccgtacccacgagtttcggtcctctgaggcatctctgcaggcctctgcctgtaagaagaaaaagagcaaagagaagaagagaaaaagagaagaagatgaagaaacccagtttgatatgttggaatctggtgaacagtaacaaactttgatgaaatttcaggaaccatagccattgaaatggatgagggaacctatatacatgcactcgacaatggtctttttaccctgggagctccacacaaagaaggggaaaatggctttgttggcctcaaatggctgctttattagatgcaatgaagcaggggacatagaagcaaaaagtaaaacagcaggagaagaagaaatgatcaagtcttttatagatggaaatttaggctgtttccagtcttttgctcttataaacagtgctgcggtacataacattgaatatgcatcaatttgtggatgtgcgggtggacctgaagataaatttccggaatcagaattaccaggtggatatgagctcagccttacagacaggaagacagcctctgaccctccttacatcctcattgtttttgtcagtcagttcatggaaatcacagtgatttcaagatgtgcagccctggaactggaatctggccacagagatcccttaagagacatgagtcattaccattgccaattgcctgttctgtgggtgatcctaattgttgaatgcagatcaattaacttatgacatgtgatagtaaacagctatccaaacttaggaggatataagaagcttgtaaaagaggtgggttccaattaattaaaaacaagttgtgtaatgttaaaaatcttaatactttggtaatagtctgtgcaacgtaaaatagctattaagctttcaatctgatcaaatgaacacttgtctactagggataatttgatcctagtgtattcacttggaggacaaaactaaattaatgattgctttattgcctagcaggatctgatgtgtaaaatgtttctgaaataattttttctgtagtgtttctgacacaagggctgcggaggaagcatatgatagcacttactcatatagattatatatatgaattaaaaacacatagccagaacctgtctttttctgaatatagttgctcagttaattttttcttctgcataagaaatcatctcgaatgttcttatgtgatacgtaaagtggggaaagtggaagataaacatataacccattggattctcttttccaatatctagattagatcctgtgctgaaagagaaaccaagaaaaaagatgacattccagaagaagacaaaggaaatgtaaaacaatgtgaaatcaattatgtaaagaaatttcagagcttccaagagcacaaacttaaaataagtaaagaagacagtaaaattcttaaaaaggctcagaaagatggatttttgcaagagacgcttctggacagaggaccaaattgaaagccgacagatactgcaaatgactgggatttttgtttctgccttatctttttgtgtttttttctgaataaaatattcaggggaaatgcttttacagagttcttgagttgttgtgaaattattgtttagctagtagctagtttaa

SEQ ID NO: 463228 - DNA, 852 bp, Homo sapiens
cgccaggaggctgcaagtgggtctggagaggcccagctcttcttccctgctgtgtctccaggcccgactctggcctcccaacaacgtctttggactcagctcctgcccagctcccagcggccctggtaggcccacaacttcccaaagccaagctccgcaggcccagctcaggcctcacggtggcctctccaggctcagctcctgctctccgatggcatctgcaggccccaaacagcctccggtcggtgggctcctctaggcccagcttgggcctcctggcagcctctgtaggcccaagtcgtcctcaagtcagcctggaattgggcctggaagagcagcaagtcggcctccccgggcccagctccgtcctctcggcggcctctccaggtgcaaaacttcctcgagtcagcctctccaggcccagctcctcctgcctcccagtggtctctttcagcccagcccagctcatggctctcggcggccttcccaggccccgcttttgacttttggtggcctcttcaggcccagaacttgacctccagtgggcctttgcaggcccggcctcctgcctctcaaaggcctgcatgggcccggcctcgggcctcacagcggactctccacgcccagctagctctcgcctcactgcggcctccccagtccaaagctcctgcctttcggccacttcggcaggtccagctcctgcctgccagtggcctctttaggcccagctcattcctcacaacggccttcccaggccccgtttttcccttccggcagcctcttggcctctaatttgtttatcttttgtgtataaatcccaaaatattaaattttggaatatttccaccatta

SEQ ID NO: 463229 - DNA, 4406 bp, Homo sapiens
  misc_feature (2)..(3): n is a, c, g, or t
  misc_feature (6)..(7): n is a, c, g, or t
  misc_feature (10)..(10): n is a, c, g, or t
tnngtnnctnccgctggatctaccatgaaagacttctgaatccaggaagagagactgactgggcaacatgttattcagggtctccctctgttgtccaaggctggagtgtagtagtgctatcgcagctgactgcagcctcaaccttccaggctgaagcgatcctcccacctcaacctcccacgtggctgagactacaggtgcttgccactatgcccaactaatatttggaattttcgtatacgtggattccagaggggtgacagcgaaacgtgggaccatccagttgcaggaaaacaagcttaacatgcccactgattctacattatgctcctacctcccggcagcctctccaggcccagaactttctccagtcagcctctacagaccaagctcatgactcacaatggcctatttaggcccataccctacctcacggcagtctccgcagatgagcctactgcctcacaacagcctccacaggcacagctccatcgttacaatggcctctttagacccagctcctgcctcccagccttctctccaggccctgaactttctcaagtcgacctcaccaggcccagttcatgcttctttgcagcctctccaggcccagctcctgcatcttggtggcccctccaggcccagcctctgcctcccgtcggcctctacagtcccaacatctgcctcacagcagattcttcaggcccagcatctgcctcactgtggaccccccaagccaagctcccaacctttcagcagcttctacacacccagctcctgccacccagtggcctctctaggccaagctcatgcttcacaagggcctttgcaggcccaacttttgtctcatggcaaccttccctggccagattcctgcttgtctcccagcagcctagacaggcccaggtcttgcctcacactggcctctctacatccagctcatgcctcacgttggcctctccaggcccaactcctgtcccaggacgtcatctccgggcccaaaacttactcaagcacagctcttgcctcctggcagcctctgcaggcccaaattctccaaaagatggcctctcctaactcagctcctgcctcatgtcggcctacacaggcccagactcttaccacacagtagaccctccaggcccaccacttgcctgatcatagcctcctaaggccaagctcctgcctttcggcagcctctacaggccaagctcctgcctcgcaattgcctttgtaggccaagatcatgccgtgaagtggcctttcctagcctaacttttgctttttgatgcatactccagtcccaaaacttcctccagtcagccggtccaggccaagctcttcctcccaaaggcttctgcaggccaaaatcgtcgtgaagtcaccctctgcaggcctagctcctgcgtccgagtgctgtgtaggccaagctaatgcctcacagcacacttttgaggctgagcgtttccttttgtgcatcctctccaagccctgaacttactccagttggcctctccagaccaagctctccctcccagtggcctctacaggccaaaattgtcctcaggtcagcctctccagggccaactcctagctaccggtggcttctgcggccaaaatcgacctcaagtcagcctcttcacacccagctcttgcctctgagtggcctctccaggagcaaaactttctcaagtcggcctctccatgcccagcctcctgcttcccgagggcatgtacaggcccagcctctgcctcacagcagactcttcacacccagctcttccctgtctgcggcctctccagtccaaagctgctcctgccttttggcagcttgtacaggtccagctcctccctcacggtgacctctttcggcccaactcatgcctcttgcaacgtgccgaagtgtcagctcctgcctcacactggcctgttgaggcccagctcatgcctctcgtggcctcaacgggcccatcccctccctgttggcggcctctacaggcccggcctctacctcacagtgggctctccaggcccacctcttcctcaccctggcctcctggggcaatgctcctccctctcgggagcctctgcgggcccagctcctgcctcccagtggcctctgtaggccaagcccgtgcctcagggcagactttccaggcctagcgtttgctgctttgcatcttctccaggccctggacttcctccagtcggcctctccaggcccagctcttcctctcagcgcctctgcaggcccagactgttgtcaagtcggcctccccaggcccagctccggcctctcggcggcctctctggatgcaaaagttcctcgagtcagcctctccaggcccagctcctcctgcctcccagtggcctctttcagcccagcccagctcatgcctcctggcggccttcccaggccctgcttttgacttttggtggcctctgcaggcctcgacaaggcccggcctcctgcctcccgaaggcctgcacaggcccagcctctgcctcacagcagactctccacgcccagctagctctcgcctcactgcggcctcccgagtccaaagctcctgcctctcggccgcttcggcaggcccagctcctgcctgccagtggcctcttcaggcccatggggctcattcctcacaacggcctttccaggcccagtttttcccttccggtggcctctccgggcccagaacctcctcaagtcggcctctccagacccacttgcaccctccgggcgtcctctccggacccagctcttcctcacggctgcgtctccaggcccgactcctgcctctcaacaacctctttggactcagtgcctacccatctcctggcggccttggtcggcccacagcttcctcaagccaagctccccaggcccaggtcaggcctcacggtggcctctccaggatgagctcctgccctccgatggcatctgcaggccccaaatggtctccggtcggtgggctcctccatgccaagcttgggcctcccggcggcctctgcaggcccaagtcgtcctcaagttggcctggaattgggcctggaagagcagcaagtcggcctccccgggcccagctccatcctctcggcggcctctccaggtgcaaaacttcctcgagtcagcctctccaggcccagctcctcctgcctcccagtggcctctttcagcccagcccagctcatggctctcggtggccttcccaggccccgcttttgacttttggcggcctcttcaggtccagaacttgacctccagtgggcctttgcaggcccggcctcctgcctctcaaaggcctgcatgggcccggcctcggcctcggcctcacagcggactctccacgcccagctagctctcacctcactgcggcctcccgagtccaaagctcctgcctctcggccgcttgggcaggcccagctcccgcctgccagtggcctcttcaggcccatggggctcattcctcacaacaacctttccaggcccagtttttcccttccggcggcctctccgggcccagaacctcctcaagtcggcctctccagacccacttgcagcctcctggcgtcctctccaggcccagctcttcttccctgctgtgtctccaggcccgactctggcctcccaacaacgtctttggactcagctcctgcccagctcccagcggccctggtaggcccacaacttcccaaagccaagctccgcaggcccagctcaggcctcacggtggcctctccaggctcagctcctgctctccgatggcatctgcaggccccaaacagcctccggtcggtgggctcctctaggcccagcttgggcctcctggcagcctctgtaggcccaagtcgtcctcaagtcagcctggaattgggcctggaagagcagcaagtcggcctccccgggcccagctccgtcctctcggcggcctctccaggtgcaaaacttcctcgagtcagcctctccaggcccagctcctcctgcctcccagtggtctctttcagcccagcccagctcatggctctcggcggccttcccaggccccgcttttgacttttggtggcctcttcaggcccagaacttgacctccagtgggcctttgcaggcccggcctcctgcctctcaaaggcctgcatgggcccggcctcgggcctcacagcggactctccacgcccagctagctctcgcctcactgcggcctccccagtccaaagctcctgcctttcggccacttcggcaggtccagctcctgcctgccagtggcctctttaggcccagctcattcctcacaacggccttcccaggccccgtttttcccttccggcagcctcttggcctctaatttgtttatcttttgtgtataaatcccaaaatattaaattttggaatatttccaccatta

SEQ ID NO: 463230 - DNA, 764 bp, Homo sapiens
tctgaaatcttcccttgatggtatagttgggacacagaagccacagttcagacctgtcccaggttggttctctgggtaccttttgtaggaatatgaaaacgggggccactgccttggctcaacagccctgacaggatacacgctcctgacttcccagcgagaatatctccgccttttggatgctctctgccctgaatccttgggtaagggtcccggggttcccaggaacaggtttctccaccccagcatcattaacatgtggggccagatcattctctgcggtgggggcgtcccgtgtacagcagggcagtaagcagcatccctggcttccacccactccctgcctgcagcagcccccaccctgggtgcgacaaccaccaatgtctccagcattgccaagtgtctcccgggggcagcgttgctacgggtgagcatccctactctggaaaacaaacaaacaaacaaacaaacaaacacccactcttgcaagggtgagggggagagttaggtcatgggaccagaatcagaatagcaaaggataaaaacagtaaaatctgggatgggtgcactgtctcatgcctgtagtcccagctactcgggaggctgaggcgggaggatcgcttaagcctgggaggtggtggcagtgagccgagattgccccactgcactccagcctgggcaatagactgaaaccccatctccaaaaacaacaacaaaaacaattaaaaacaataggctgggcacggtggctcatgcctataatc

SEQ ID NO: 463231 - DNA, 800 bp, Homo sapiens
  misc_feature (1)..(1): n is a, c, g, or t
  misc_feature (3)..(5): n is a, c, g, or t
ngnnntccaggtgcccctgagccgaggaacgcaggcggtggtcgtggggaagggaagaggagccccgggagacgacagcagcatgggtgggcggccttcgagccctctggacaagcagcagcggcagcacctaagggaagctgccccgagtccgtgagcaccgaggacccctgacccagcttcggggccacccaccccggtggcagccgatcttctgtgttctgcgtggggacggccgcctagagtggttcagccacaaggaggaatatgaaaacgggggccactgccttggctcaacagccctgacaggatacacgctcctgacttcccagcgagaatatctccgccttttggatgctctctgccctgaatccttgggctggtctggaactcctgggcccaagggatcctcccacttcagcctccaaaggtgctgggattacaggcatgagccaccgcggctggtccccaaataaattaaccaaagctgaattcacttattttggactgctgtatgcatttcaggggtattttctcctagtgaatgaacgtctagaagatgcgacctcctgtttgttttcaggagaccatactcaggaagagcctgactccctcttggaagtgcctgtgagcttcccgctgttcctgcagcaccccttccgccggcacctctgcttctctgcagccaccagggaggcacagcatgcctggaggctggccctgcagggtggcatccggcttcagggcataggcctcactttctttacccagaaaatgggtttttaggccaggtgtggtgg

SEQ ID NO: 463232 - DNA, 692 bp, Homo sapiens
tgtacatcatttcattttacaaatggggaaactgaggcttagacaatttaaaatccaggcagcctggctccagcatccatcttcactgctgctgagctgtctcttcagccacccaccctctgaccccatcatccttccacctagcgacattccctggccacccggcctgtgccggcctctgccagccacggggctgctgccatcagcagagcaggattccagctccctaggagctcaccacgcccagatggggcctggtacacagttggtgctcaataagagcagttcgtcttcttctgagcatgggtgcatccctctggctgggggctttggagctagtgtgaccgagtgtgtgcagggcgtggtggctgctcccaggggccctctttgccccaagatggccctcctgtcccccatcctggatgtggtcctcacggtggccctcagcctcctcctcctggggctgatcctgggcctcctttgtttcttcacttgccgcctggccaggccgctcagcacatgacatacccaaataagctctcagttcttgttttgtttattcattttttcctttgtccctgctccctgcctccccactgccattcccacagctcaccgaagtccctatgctaatgtacttaatatggccttggagttgtaagtgtccttgtacgttacacagcattctgtcc

SEQ ID NO: 463233 - DNA, 2570 bp, Homo sapiens
taggagttggcccagtgagagttgagagagaggccacccgcggcgtcttgacttggcttagttttctccttaatctgagaaactttccctgtccgcgccattccagatctcttgttaagaatggggaggagtgaaggaagggaccgattgggcagcgttaaggtgcttgcttttccgccagaaggtactttcaggtgtgtcctgcttaccactgtggccacagacaagccccgaatacctggagaaggtggctagggtgctggcagctgcggctgccccactcctcttcactgtctgtttttgtgggagttggctgttgaaatatcaccacttcctctgcagaagctccgcagcctctgccttctttgaaagctgcagaccagccgccctctcatgctggtatttcttgttccacggccttctgtagcaggcccgtgctcctgcatgctgtgttcttccgtagaagtgcgcgcaaccggtgttgatgagggccagggagtggccgcggtgggcatgatgcggcttttcctgtggccttctctgattattgttcaaccggtcaggaacacggcacatgggaaggcaggcccaagggacctccagctggtgcctggacttggatctgggcatcatgctgcagcctgctgggaggccggtagggttagctggactctgagtagggagtggtctgcagacctctggcaggctgcggtgtggatgcgcggagctaaagctgggcttgcaaagtcacagttagctgtgcactgctttgggggtgggtacattttaaagcatgtgcatttgggctgtagttaagagcttgggaattttcaaaatcattgactctctatagtccttttatactgtcctatattttccaggatgtcattaaggtctcctggccctagacagctgttttcctattggctctttaagaattgtaccagtccacagacctggtttggcagactttatgccgtgagcatctgtgatgtaatttcgatcctggaacatttgagatccaggtccacctgggactgcacagcaagtctctgcgtgtctcagggcgaaatagagaacttgtgctaggtcaagcctagttatgaaaaagaatcctgaatgtgctgatgtgagaaggacatttcatatacatggaatcataatatgtggacttttgtgactggcttctttcagttagtgtaatgttttcaagcttcatccatgttgtcacatgtctcagtatttcagtcctttttcttgttgaataatattccattgagtgtatataccacattttatttattcatcagttgaacatttgggttgttttcacctattggctattatgaataatggcaaaacctttatgtacaggttttcgtgtggacatggttttcatttttcttgggtatatacccaggagtggagttgctgggtcatctgataactctgtattcaacgttttgagaaactaccaggctgttttccaaagtgactgtaccattttacaatcccagtggcagtgtatgaaggttccagtttcttcatattcttgtcagcacttgttaatgcctgttgttttgattccagccttcctggtaggtgtgaagtggaagctcattgaggttttgacttgtgtttcctgaatgactcatgatgttgagcatcttctcatatgccaactgtccatttgcatatcccatttggagaactgtctatcaaagtcttttgcccatttttaaattgagtcatttgtctttttattgagttgtaagagttctttatatattccgaatattccttatatagtcttatcagatatatgacttccaagttttttcttccatttagtgggttgtcttttcactctcttcatgatgtccttggaagcacaaaagttgtacattttgtgacatcccatgtatctatttttctctggttgcttgtttttggtgtcctagctaagaaaccactgacaagtttgaaatcactgagatttaaccctatgctttcttctaagagcttgatcattttatgcttgcatttacatctttggtctattttgagtttttttggtatatgatgtaaggtttccattttttcttttgcatgtggatattcagttgcttcagcaccattaattgaaaaaaactgcttttcccccattgaattattttgacacctatggtcaaaaatcaatcgattgtaatttattttctattttaataactgtccctttcttcttgactacttcgcaataaaatatgtattgctctacagtcatttgaaaacagtatgctatttccccaggtctcaggatgcaccctcacagtctcatagcttgacgccttccacccggcatcttccactctgttctttcctggtcttgatcttctgagtgagtaactcaagaatcctatgtgcccacctttcttctctttgaagagttgtttagttgggaaatcatgttttctagttacaggaaatctttttttttcctcctctgtatgttgcagtagaatcctcttgagcactataattattttaattaaaattcaagttgtatgtat

SEQ ID NO: 463234 - DNA, 1533 bp, Homo sapiens
aacagtgttcttagaggtagccacacctcagcaagggctttctaacttggaacagcaaagttcaaatgaacgaatagacacaaactgtgaaagagtcctgaacccattacaaggtgaatctttacagcacaattgccttctgaagctacttgaaacagggcatgggacttaaaggagaaaaaaaaaggaaatggaccatctcttctaacacctggaatgtgatccaagcctggagacaaattgatggtttgcagctagaagacagtaaatctagcaatggagcccatatatgaggagtacctagcaaatcatggaacaatagtaaaaccatattactggctaagcttctctctcgattgctctaattgtccttaccatattcgaacaggtgaagaagcaagagtttccctcacagaattttgtcagatttttggattcccttatgggacaacatttcctcaaacaaaacacctcacattttatgaactaaaaacttcttctggtagcctggtgcaaaagggccatgctagcagttgcactgggaattatatccatccagaatcaatgctctttgaaatgaatggttatcttgactcagccatatacaataatgacagcatcaggcatatcattctgtattccaacaactccccttgtaatgaagctaaccactgctgcatcagcaaaatgtataatttcctgattacgtatccaggcatcactcttagtatttatttttctcagctctatcatactgagatggactttcctgcctcagcatggaaccgcgaagctctccggagcctggccagcttatggccgcgggttgttttgagtccaataagtggtgggatctggcattctgttctccacagctttataagtggtgtctcaggatcacatgtttttcagcccattttaactgggagagcactggctgacaggcacaacgcatatgaaatcaatgccataacaggcgtaaaaccttacttcactgatgttcttctccagacaaaaaggaatccaaacacaaaagctcaggaggctttagagagctaccccttaaacaatgcctttcctggacagttttttcaaatgccgagtggacaactccaacccaacctacctccagacctcagggctcctgttgtttttgtgctagtgcctctcagggacttaccaccaatgcatatgggccaaaacccaaataaacccaggaatatcgtaaggcacttaaatatgcctcaaatgtcattccaggaaaccaaggaccttggaaggcttcccactggaagtttaacacagaaccagttgatgtagatattcataggagtattaaatcataagatagtctatggacaacatgctaaacatctttttatatttcagtaattatgttgccagagaaccctggtattaaagcatccttaccagaactgaaattcacttatttatatttataatacattttacatatttgattaacattgattttgcacttctatttcaaataataaaaataaataatgtcac

SEQ ID NO: 463235 - DNA, 6348 bp, Homo sapiens
ccgccgccgcctgactctcccgggagactccctaggcccggacctggggccgaggagggccgggatggcctgagtgcccgcggcgcggcggcgcagcagcgggattgcaccatggggaaccaggatgggaagctgaagaggagcgcaggtgatgctttgcacgaaggcggcggtggcgccgaggatgcgctggggcccagggatgtggaagccacaaagaaggggagcgggggcaagaaggcgctaggcaagcacggcaaggggggagggggcggcggcggcggcggggagtcgggcaagaagaagagcaagtccgactccagagcctcggtgttttccaacctgcggatcaggaagaatctgtccaaggggaaaggcgccggcggctcccgcgaagatgtactggattcccaggccctgcagaccggggagctggacagcgctcactccctgctcaccaagactccagacctcagcctctcggcggacgaggccggcctgtcggataccgagtgtgcggacccttttgaggtgaccggtccagggggtcctgggcctgccgaggctagggtcgggggccggccgatcgccgaggatgtggaaactgcagcaggggcgcaggatggacaaaggaccagctcgggctcggacacggacatctatagcttccattcggctacggagcaagaggatttgctttcagacatccagcaggcgatccgcctgcagcagcagcagcagcagcagctccagctccagctccagcaacagcagcagcagcagcagctccagggcgccgaggagcctgcagcgccccccactgccgtctcccctcagcccggggccttcctgggcctggaccggttcctgctggggccgagcggcggggctggggaggccccgggcagtccggacaccgagcaggcgctgtccgcgctctccgacctgcccgagagcctggccgccgagccccgggagccccagcaaccgccgtcccccggcggcctcccggtctccgaggcgcccagtctcccggcagcgcaacccgcggccaaagactcgccctcctccacggctttcccatttcccgaggccgggccgggggaggaagcggccggagcccccgtgcgaggggctggggacacggatgaggagggtgaggaggatgcttttgaggatgcgccccggggctctccgggggaggagtgggccccggaggtgggagaggacgccccgcagaggctgggggaagagccggaggaggaggcgcaaggacctgacgcccccgcggccgcttccctgcccggcagccccgcgcctagccagcgctgtttcaagccctacccgctcatcaccccctgctacatcaagaccaccacccggcagctcagctcgcccaatcactccccgtctcagtcccctaatcagagccccaggatcaagaggcggccggaaccctccctgagccgagggtccagaactgccctggcctccgtagccgccccggccaagaagcaccgggccgacggcggccttgcggccggcctgagccgctcggctgactggacggaggagctaggcgcccgcacgccccgggtgggaggctccgcgcacctgctggagcgcggggtggcgagtgacagcggcggtggggtgtccccagcactggccgccaaggcgtctggggcccccgcggctgcggatggcttccagaacgtgttcacaggtgagcgcgccctgctgctggcctccgggtctcaagtcgcctgtcagtcagggccttcccctgccacccgccctccctgggctctggaaggcggtgacctggtagtggcacatctcttctccgtagggaatccttttccgcccagcgagctcaccccccacggtgaaatgacttggacatacttgttggttttctgtgttcttacaagatcttaaagggaacaacttagttgtgtctgtcctaagttgctctgcccatttcaccaaaatacctgctattcacaaagtttcgggtcacgccagggagataaactcctttttcgtctcgttagctaaaccatcattcttctctttcatttttcatcaccacagcattaaaaagaaaaaaaattgttcatggttctttcgcaagagtcggttttggaggcacaaatcatttattccggtacgatccaaaggcagtctctgaccgctctcatagctgtgtgtatttgtccacgtttggtatgtatgtgatatgtagtttctatcttgcagcagtctgggttccgctgcttagtgaagttaagcggtcactcactgctgtttgctgctgcaagaaaatccgatacatgctattagaaaattaataaataaatagaatagtagggataattttcattcagtttcatggtccagcccagaacagcctgtagtttggagacagtgaaggtggaaaggtcaaaagcacgtctagtccaactggtacctcccctccctagcatatgttatagactcatacccagggcggcataaagcacagccagagtatgtttgctctggtcagtgtcaagcagtccaatgagtttatcctagcttacaggcttacagggcccaaggccttaccttaagagcccaacatgtttacctaacctctattcttaattattaaatgaaatagagtgttagaatttaatgaatcgaaaaatatgaaaagttacatgactactgataggtttatgataaatatttgaaggattaaacatttcaaatgcaatctgaaaattttaaaatcttatgttctattattttaataaatacattatctgtaaaacattgcttagatgaaatttctcggcacagacagcgacttcttagttgactaaatgctggtaatattggggtagctacttttattgaccacattttaattttcatctgtgggccaccttttattttgcccttatagggtcttacccttaaaagtagcttcttccattcatttcacatactcttatttttcttcttttccaccttctctttattgtgtagattgttaaaaagaatgtttgtagttttatacccactagataaattgtaaaaaaacaaaaacaaaatgcaaaacaaataaaaaagaaagatcacttttgatagaagaagattggaaagtttttgcattaatttttgtgaatttaatgttggtaagaaatcacatattttctctttatctaagtgacattcacgtatatagtttttgaaaagtgaaaataattcaccataatgattatcaatcattaatattaatgatagctattcctactagcataagactttggaaatttatttatttcattcatttagcaaatatatatatgtatatacatttgtaagcatatatgtgcatacacacacacacacacacacacacattgagcagccacattgtgctaggcagtattctaaatagtagcacactgtgctaggcagtattctagatgtaggtgatacatagaccattaaatcatgattttgcctttctaaggctcgctgactagtgaggaggagacatgacataagtgcagtgcacagaaatatctgtatagatatagacatgcaaatcactgctgggaacatcacggatgcagtggcttatctgcttggtggcaaggggtgagggaagaggacttgagagaggaggattgaacagagtcctggaagatcacaagaccctaaataggttgaatgtttgttttcctttaaaaaaacaagtgtcttcttggaacttgcattttagtttaatttgctaagtattcccaaatttgaaatttgggactcttaaaagagtcctgtataggaaccacctgggttttgttgacctctccaggtgatttgttttttaaattgtgcaaagtaaaattgcagagctagtcgtttttataaggacatcacctattttgtatttgatggttggatacagctggttggtaatcagcaaatatatttttgtgtagcagcttccgtatgtttatgtcattcactcagcattgttcaggaaaagaggatcagtaggttttacctaactttgtaactggtgggaaaatgtagatagagaaagaggtgaaataactttctcaaggtcacactgtgattcattcagaggcagatccagaaatagaaactgagtcaatgaatcaagtctaatgtcattattatttctgtttggatatacaatgttttaaggccatatagagagtaaaaactgtttataaaaaatgtgatcagatttagggcctttctttaattagattttccagttcctgtttttaataaggtgtcctcctttaatggttgaacatctggccttccttgagctggatgaagggtgattgttggccagagtgaaccagattttctctaagcagctctcatggaaactgttcttatggtggtcaaatgaatccagattgacacaggcccttgtgtctcagctgtcaactcttcatgtcatctgccactacgtttgcttctttactctcctctgctatttttttacgggtgtcttggaaattaccagaggcttggggaacactggcattgtccttagggaaatttctttttggccttaattttgcatgtatttggatcaattaattgccagctgcctttgaagcaggtgatcattatatctataagcttccataagcatcttttatttttaaaccatagaatgagggttgtcagcattacaggaagaaacagatgtttttcgctttttaccgccttccaaatgtagggagaaaatacaagtgaaaagggatttctatggcacatgtctgtgtctctttggtagatctaaaaacatttagcaatgagggagaccaaactttatcttgttttagctattaagaaactgatgatgccttaggccattgcatttaagtatttcataattaatgtgtttgaaatacatctttttcagtgtttagtagaaaaaatggcgtctgaaattcgggaggttcctttacatattaagtataacagaagcttggtactggagttttgcagttaattaaagtttagatatccaacgtgttaaatttgtgatgctaaatcgcttttgataggaatctttcccaagtcaattatgtgcttatctttttttttaaacacatggaataaaagtttaatctgttttaaagggcttaatgtcatcttcaggcacatcattgttacatcttataaaaacattagtgatgtcctcaacagctattgaaatatctcttccgtgccttgctctgtgcctgtcaatatgtgtaaagcaccgactgtactgaggtcttgatgaatacttgctcattcaccatttttggcagtgatatagacaagttgagtatccaggcttcctactggcaattaaaactagttgaattgaagctggaaaattgctaacctttctgggcagtcaaaattaattattttcaatgaggtgtgattgaatcaatgatactttatagaacttatgttgatagaagaatagctattcttgtttctgcaggttaatgttaaaatagtaatgacattacagcaactgaccttccaaatataaatgttattgtaatgaaagaagaggtaaagggaatagagaaaattgtattcctctgttcattcctgttttgtattctaagtactaacctaatgctaataaaagttagcattaaggaaccattaggaagaaacaaaaatgtactgcctgtgacttgatagttattagatatcattttagtgacagtagaaactttctaaggcttttttatcttaaaatatatggaaaatatgacctcagtcagttcggaatggtagtaaagcaaggtagtcataacatcaaaattctaagaatgagtaacaattatttctggatgctataataagatgctaaccacactagagatttattatccttttgatacctactgctccactatgggtgagaaggagggaagaatttatgtcttcttcctttgtaaagatgtacttggaagtgttgattggataggaaaattactgcctctattctgtgatccagtcaggctccaacctaccaggaacccactggaagctttattatctgttaccctagagctgcaatggactgaaaacagtcctattgttttcaggaggaatggaatactttcttgagaaaatcaagcctatattatgtttcaaaattatgcttaaaaaggcttaggcactactcagttgagtctttttttgtacttcatgcagaagggttctttgttgtagtacctggtgatagagtggacacatacaggaagaaattctgtgtcatttaaatggttgttttag

SEQ ID NO: 463236 - DNA, 1619 bp, Homo sapiens
ctccttatttaggtgatgaaagatgtggtgccccaactttaagttccacttgacgcagaatttcctgattgaggatggagcctggggctaccttgaggatggccagagccagaggaagaccacgaagccagagggtgccccgacagaggaaaagcggccggtgggttttagatcctcatttggccagagggaggcagctggatcggcttctccagagcctgctggctggaggttggctgtccgtggtggtctggttctaacccaatggcctcaggagacagtgactcacgctgtgtccacctgtgtcatcctgtggacagctggaggtccacgggaacagctgctatggcggcggacacagccccgtccagggcccatggcagccccagctggctgcccgctccctcctgtgggcagtgcttcacagcggcagcgggagcactgggtgcagcctctggaaggtctggaaggtgcttgctttggggactcggccctggtggatccccttagcctgtgcagacgggatctgaatggaaggtccgagggtctgcagatgtcagagctgtccatggctttgcctggtgtctgtctgagcgatctggcctttgtggagccccctgagccaacgctctgctcttcggaatcattgatctgtctggggatgagcaatgctgttgtcttcatcatcctcgtcttcagcagcatcaacagcaagtcacagcaccaacagtgccaacacggccgtgcacatccaaatggcttcattatgctcaacagcctggagataaccaaaattagcctcctacatacttttatgggtacctacatctctttgtaggtaggagtatatatatagtaaagtacaataccgtatattttgtatgctttaaaattatttaatatgatgaggataaaacgatgttttcttgttttgagatggaacatcttttcatagttttattgaccatgggagttttctcttttaagaattgcctattcattttctttgcccgtgttttttctcattgtattgtcttatttgtgtccattattgtaattgaattttaggatatttgaatgtaaatcttttgtttggaactgtatacctttcaggagcatggcttatgacatagcaattccattttcttaacaaaaacgaaccctatttttactttaaaagtaaacattccctctgctgtggtttgaatgtgtccctgaaagttcacatgttggaaacttcatcctccgtaacagtgttaagagccctgaagagtggattgctgatgccttctgcttcaccctctgcttgtgctccttcttccaagctgttaatttctctgaaatcttgtgtttctttacgcaggggttcacatcctgattgcttgttccactcggaagggaaggcagagggcttgcatctgaagccatgcctccttcatcggtgctgtatcgagctctaggtttgggttcttggcacttcggtgcttcccttctcactcagtagtcataatgttagcacggttgatgcattgacacgctctagtgagcagtttgcaggcatctatcatgaattgttcaaagaagaaacgcaactacctgagaagaaacgcaactacctg

SEQ ID NO: 463237 - DNA, 1783 bp, Homo sapiens
ggaaaatataatgcatgttcagaagctcctcctggaatgtttgtgaaaattgccaatttcctgtccctgcatactgattgggaaggtctgaatgaggtcgctgagccctaccccagagtctctgattctgtaggtctgtcgtgggtcctgagaatctgcattcccaatgaggccctaggggaggctgacgctgctggtccagggatcacatttttaaaaccactggtgcagggagactccaaggactactggacctcagaagagagagactgcttccagtttgaagggaacaagagttatatacggcgttactgctgggagctgagcatgtggattgcttttggccagtcccatggaagcttttccgtctctgcagctgagatggaacccctcagttcctcctccagaccaaaaggaagagcaggctccggttccagttccattctgttgcagtcttattaggcaatgccatcttgaagcccgtccatgacatcatagttgctcattcaatgaacattctgatatcttatttcctaaacattaagtagtgtgtacatatctacaaactgccctgcttcctatggttcctttgatgctgatttgcttctttaagccttccttccttccaaaccatgaatcaggtccttccagaggctaagaattaagttcacaattaaggcgactccctcactgtttcctctgctttcagagaggggaaaatacttccaggacaagtcaagaatttatcagatgctctgctttcagcagcctgaaactttcagcaggaacacgatagccgaaatcccatgccacttcttctattgaggcttccgtttaaatcagattagggtgagccacaagaaaaattcttcagagatacgagtcgtgggcgtaaaacagcagctgttgtgtagctcacacaagttcttgctaatctgctggtttttaaactcgtgatctgacttgtctgagagcatgccttgtggacttcaagccccagcatgagatccagtgataacagccttgcagagactacttccaacctccacaattgtataagccaggtccccgtaacaaatctcatactggttctgcttccctggttgaaatttgaatacagtcactctattgaccaggacgaccctgttgcagtacatggttgtctgcagtcacctggctggtagattcctccaaatctagggggaaggactaaagggcccccaagaggctatagtgatgatgtgataattaattttatgtgtcaacttgagtgggctgaaggatgcccagaaaggtggtaaaacattatttgggagggtatctatgaaggtgtttcaagaagaaattagcatcaaaatctgtagacagagtaaagaagatctgccctccccagtgtgggtaggcatcattccatcacttgatggtgcagaaaaggtaaaaaggtggaagaagggcaaattctctctctttttcagctgagacatccaccttctgcagaaaggcataggagctcccggctctcaagccttcagactctggaacttttaccagtggcctcccagttctcaggactgtggacttgatctgaattacaccactggctttcctggttttccagctgcagatggcagatcatgggacttattcccatgtgagccaattcccatattaaacctcctctcctgcctctctatatatcctatagtttctgtttttctgaagaatcctgactataccaacaacttggaaacttagaagtaacaggtaataacaatgatgctgc

SEQ ID NO: 463238 - DNA, 1013 bp, Homo sapiens
atcagaattcctgtgggggtgccccgagtagcagtcacagagaggggccttcgctaagctgctttcaatccagattagggtgagccacaagaaaaattcttcagagatacgagtcgtgggcgtaaaacagcagctgttgtgtagctcacacaagttcttgctaatctgctggtttttaaactcgtgatctgacttgtctgagagcatgccttgtggacttcaagccccagcatgagatccagtgataacagccttgcagagactacttccaacctccacaattgtataagccaggtccccgtaacaaatctcatactggttctgcttccctggttgaaatttgaatacagtcactctattgaccaggacgaccctgttgcagtacatggttgtctgcagtcacctggctggtagattcctccaaatctagggggaaggactaaagggcccccaagaggctatagtgatgatgtgataattaattttatgtgtcaacttgagtgggctgaaggatgcccagaaaggtggtaaaacattatttgggagggtatctatgaaggtgtttcaagaagaaattagcatcaaaatctgtagacagagtaaagaagatctgccctccccagtgtgggtaggcatcattccatcacttgatggtgcagaaaaggtaaaaaggtggaagaagggcaaattctctctctttttcagctgagacatccaccttctgcagaaaggcataggagctcccggctctcaagccttcagactctggaacttttaccagtggcctcccagttctcaggactgtggacttgatctgaattacaccactggctttcctggttttccagctgcagatggcagatcatgggacttattcccatgtgagccaattcccatattaaacctcctctcctgcctctctatatatcctatagtttctgtttttctgaagaatcctgactataccaacaacttggaaacttagaagtaacaggtaataacaatgatgctgc

SEQ ID NO: 463239 - DNA, 914 bp, Homo sapiens
  misc_feature (855)..(855): n is a, c, g, or t
ttgagtcggcacgagggtggagcagagctgcactgactctttcttatccatgggtagcacaagcgaaaaataaacttctgtggtgcaaagtcactgagattcaggagttgttgccaaagcggagccgagctcagtggttcccagtctggtcccagccaccacgtaagatgttcctttgctcttccttcatcttccaccatgattgtgaggcctccccagccatgctgaactgggtaaccaccacaggcccacaggctaaaattgagctggagtaagtggcaacagagagtatttattgtcccctaagagccctggcccttgtaggacatgtgaatgccagtgctcatggagaaaggtggaggaagagagccagagtgcagttcacctctgggagagcagaccagagtggcttccgtgggcacatgctggattgaagtgagaagacgtgactactaaagttgaggccccaagtctcagcttcttccccctccaaagcatgagtggaggattcacttaaggccactttgaagcccatattggaggagcattactcactctgaggatcctggcataggcagatgcatcacttgtattgaagtatattatctgctgtgatatttatgatgaaatgagtttgccagccatcgtctatcaggggatcaaacataggcacctgcctgtccaagggggtctaagtcacagtacagaagtggtttgcaaaggctggtgggatggtgtggcaggcctgtggagttgaataaaaatcctgatgtccttcctggcatgaagaatggagctgcaagctgccccaggagaagcgtgctgcctatgctttcactggactctgtgtccganactttggcgcttggaccccctcgctcccacccgctgttttcgacaaacacaatcttcca

SEQ ID NO: 463240 - DNA, 1241 bp, Homo sapiens
agttgggaaatcatatctgatttccattttaaaacaatagctgtatgagggaggggcagaggtgggatttgaacctaggcttcaccagattctctctcctaccctctctgtctccctgcctggctggcacagagttgaggctcaataattgttcattaggagggagaaggatggccggtttggcaggagaagtgaaatctgatattggaatatctcaagattatttcatggtcttgttgcatattttacacttgatggaaattactgtgcaggtaatgtggaatcccactctttggtgccaaactgtcaactgcctaagcacaggatatcctcttaataactgtgaaattgaatttgttatgaatgaagggctagggtttaatagcaccacaggggagaaagtttgaggctactgcaagggacatgagcattgagtgtggggtggcattttccaagaaatgtatataagcacagacatttcccagggatgctgaccagcttggcaaggggacctggaaaccaaatcagttaaggaatggaggaagatattgagagtgctgagtctggggcctaggtatttcttgggaccaggaactgggtaaggggtaaccaccacaggcccacaggctaaaattgagctggagtaagtggcaacagagagtatttattgtcccctaagagccctggtaagcttctgagaaattaagtgctcatttcctagcagataaaaatccactgactcacacctgcctctctgcttgtccagagaggtacagagaagtaatgacttggacttgaggaaggcccttgtaggacatgtgaatgccagtgctcatggagaaaggtggaggaagagagccagagtgcagttcacctctgggagagcagaccagagtggcttccgtgggcacatgctggattgaagtgagaagacgtgactactaaagttgaggccccaagtctcagcttcttccccctccaaagcatgagtggaggattcacttaaggccactttggggatcaaacataggcacctgcctgtccaagggggtctaagtcacagtacagaagtggtttgcaaaggctggtgggatggtgtggcaggcctgtggagttgaataaaaatcctgatgtccttcctggcatgaagaatggagctgcaagctgccccaggagaagcgtgctgcctatgctttcactggactctgtgtacagaagaaatattggtggtttgaccaaac

SEQ ID NO: 463241 - DNA, 2250 bp, Homo sapiens
cctttcttctccccagtccctggccccacctcttctgccacaaacgtcagcatggtggtatcagccggccctttgtccagcgagaaggcagagatgaacattctggaaatcaatgagaaattgcgcccccagctggcagagaagaaacagcagttcagaaacctcaaagagaaatgttttctaactcaactgtccggcttcctggccaaccagcagaacaaatacaagtatgaagagtgtaaagacctcataaaatttatgctgaggaatgagcgacagttcaaggaggagaagcttgcagagcagctgaagcaagctgaggagctcaggcaatataaagtcctggttcacgctcaggaacgagagctgacccagttaagggagaagttgcgggaagggagagatgcctcccgctcattgaatgagcatctccaggccctcctcactccggatgagccggacaagtcccaggggcaggacctccaagaacagctggctgaggggtgtagactggcacagcaccttgtccaaaagctcagcccagaaaatgacaacgatgacaatgaagatgttcaagttgaggtggctgagaaagtgcagaaatcgtctgcccccagggagatgcagaaggctgaagaaaaggaagtccctgaggactcactggaggaatgtgccatcacttattcaaatagccatggcccttatgactccaaccagccacataggaaaaccaaaatcacatttgaggaagacaaagtcgactcaactctcattggctcatcctctcatgttgaacgggaagatgctgtacacattattccagaaaatgaaagtgatgatgaggaagaggaagaaaaagggccagtgtctcccagctcagagaagtttgttattaccgactttctgaagcctacttctgtcagctcatcaaagtcattctccatcctgctttgttccattgctggcgaggagctgcgatcctttggaggagaagggatgaatctgcaggagtctgaagaggaggaagtcccccaggagtcctgggatgaaggttattcgactccctcaattcctcctgaaatgttggcctcgtacaagtcttacagcagcacatttcactcattagaggaacagcaagtctgcatggctgttgacataggcagtgagtactccattgtgaaggtgataaagctccagttcatggcccagtctcaggccatgcccgtgccaacctggactgactgtcacgacattgaactcaaggcaggacatcggtgggatcaagtgaaaaaggaggaccaagaggcaacaggtcccaggctcagcagggagctgctggatgagaaagggcctgaagtcttgcaggactcactgtatagatgttattcaactccttcaggttgtcttgaactgactgactcatgccagccctacagaagtgccttttacgtattggagcaacagcgtgttggcttggctgttgacatggatgaaattgaaaagtaccaagaagtggaagaagaccaagacccatcatgccccaggctcagcagggagctgctggatgagaaagagcctgaagtcttgcaggactcactgggtagatggtattcgactccttcaggttatcttgaactgcctgacttaggccagccctacagcagtgctgtttactcattggaggaacagtaccttggcttggctcttgacttggacagaattaaaaaggaccaagaagaggaagaagaccaaggcccaccatgccccaggctcagcagggagctgctggaggtagtagagcctgaagtcttgcaggactcactggatagatgttattcaactccttccagttgtcttgaacagcctgactcctgccagccctatggaagttccttttatgcattggaggaaaaacatgttggcttttctcttgacgtgggagtggccattactgagctgagagatgtcattgccacagggaggacctataggcacatgctcaacggcgtgctgatggaagtggaagagcctgaagtcttgcaggactcactggatggatgttattctactcctgtctgctgttgcaaaaagaagaaaacattctctgcctgagttttaatttttgtccaaagttaattttaatctatacaattaaaaccttttgcctatcactctggacttttggattgttttttacattcagtgttataatatttgattatgctgattggttttggtgggtactgatgc

SEQ ID NO: 463242 - DNA, 2236 bp, Homo sapiens
catcatctctctctcttgatcatgcatctacctttggattggcgcttggcagtttcgtgggactctctgagtagacacacggagatttgcaaagatctgttttacttagatgagtcctcagtccagtggagaatccagatgcacaaacaaacattgatgatgaaatataagtgtagtaaagaagaatgtggcaaattgtgtaggggtgaagggaaagcttccccttcactctcagaaggttccgtgaaaaattcagttcacaaaaggcagattaataggagaaaaaggatactaaaagaaactgaccaaacttacttgatcatagtttatttgatcatagtttcccatgacacaggagccttcagaatgaagattcaactccccagtggggtacaggagcttgtatatcaccttgagattacagaaagaacaggagcttggagcatggccaaaaccaggttatggtggtaaatcagattttagtgaagagacaggttatgggagggagagaaggggaggcttggctattaaaagtggtcttggtatggagataaaacctcacaggtagcagccctcagagaggataaatggacaatgtttctttcggatatttaaatgtgtcagactcttggttaatctttcctagatctggattagggaaggcctggttgcgttaatgcagattgctaatgatgcaaatttcccccacaaaagacagctttgcaggaccagttctgtttactgaccccctgacagccatcccaaaatatgtcaaagaaatatatttggggctgaaatatttttatttcctttagctgccatgggagcgtggatgagaaagcaattcatctcgaaatggagattagtaaatgggcacctatgtactatttaaaaaaatgataaagaatgtgaggaagaaaatgtccatgaacactattttaaatgccatgtcttaatatcagtttcccttgttattttcctagccagtctttgtcagggaaatagcagtcattttcctaagcctaaatttaacagacacctgataactctgtatagtacttgctgataggaaccgaagtaaacaagagtgacgcatagcaatgttgtcatttctactctaccgagtccatgtgggtatggagatagaaagaatgtgacttgattgaaaaggaatttgttgttgaatgagaggttaaactatgttcttaacttttaatcctatgtgcaaagccttttaaataatttggaaataatattacaaaaggaacaatttaacctaagttagttgtactctaccatttctttttcagagagaagaatcagtagagctacattttcttggcactccaaaatgtggatttcaaaactgttagttcagaagtgttcaacttttgctgcccactggaattatctggagagctgcaaaaggacactgatgcctgggctgcacctcctagaggtcttgatttgatcaatccaaaggaaggcctgggcagtaaatttttaaaagttccacagcatttctgatggcctcacggatcaggagtctgcaagaccaccctcaggcttcatgcactaaaaggactcacaggactcagaaaaagctgtcatactcatgtttgtggtttattagagtgaaagactacagattagagtcagcaaaaggaaaaggtgggtagggcagagtctaggagaaacaggacacaagcttccagttggcttctcccaaaggtgttgcatgaacagcacttaattatcttagcaacaatgtaacacacatgtaaatttttgcatcctatgaatctcatctgagccttggtgtccaaggatttttattggggttagtgacaaaggcatgcagcggctatgggacaacattaactactcagtctccagcccccagaggtcagtgtggttcaacaactgatgcagtgcggttcaacaacttagacgacaaaaacactcctggcaggcaggagatttcaagagagctcagaggtcacctcctggatgtcagccaaggaccagtccttttttttttgaatgtgcagggtttgagtaacccaagactgctgtgttaacctttttctggacacctatatacatatatttgtctgttctttggattctccattgaactgggtattgctgttactgtttttgccttcctagttcctcattaatgggctaaaataaatctttgacacgtttatgtttgcatatgagtcatgatttt

SEQ ID NO: 463243 - DNA, 954 bp, Homo sapiens
agcttcctcaccagctgtgaactctttgagagaagaatcagtagagctacattttcttggcactccaaaatgtggatttcaaaactgttagttcagaagtgttcaacttttgctgcccactggaattatctggagagctgcaaaaggacactgatgcctgggctgcacctcctagaggtcttgatttgatcaatccaaaggaaggcctgggcagtaaatttttaaaagttccacagcatttctgatggcctcacggatcaggagtctgcaagaccaccctcaggcttcatgcactaaaaggactcacaggactcagaaaaagctgtcatactcatgtttgtggtttattagagtgaaagactacagattagagtcagcaaaaggaaaaggtgggtagggcagagtctaggagaaacaggacacaagcttccagttggcttctcccaaaggtgttgcatgaacagcacttaattatcttagcaacaatgtaacacacatgtaaatttttgcatcctatgaatctcatctgagccttggtgtccaaggatttttattggggttagtgacaaaggcatgcagcggctatgggacaacattaactactcagtctccagcccccagaggtcagtgtggttcaacaactgatgcagtgcggttcaacaacttagacgacaaaaacactcctggcaggcaggagatttcaagagagctcagaggtcacctcctggatgtcagccaaggaccagtccttttttttttgaatgtgcagggtttgagtaacccaagactgctgtgttaacctttttctggacacctatatacatatatttgtctgttctttggattctccattgaactgggtattgctgttactgtttttgccttcctagttcctcattaatgggctaaaataaatctttgacacgtttatgtttgcatatgagtcatgatttt

SEQ ID NO: 463244 - DNA, 1505 bp, Homo sapiens
gctgccgccgcaccacctctccttctctgcctctgaccctccttctcgctgctccccctgcccagctgctcctcccacctggccatgaccaaagcccctgctggcaccctggcccagctctgagtcctgggaccctcggtcctctctcctgggccatggccaactcaggcctccagctcctgggctacttcttggccctgggtggctgggtgggcatcattgctagcacagccctgccacagtggaagcagtcttcctacgcaggcgacgccatcatcactgccgtgggcctctatgaagggctctggatgtcctgcgcctcccagagcactgggcaagtgcagtgcaagctctacgactcgctgctcgccctggacggtcacatccaatcagcgcgggccctgatggtggtggccgtgctcctgggcttcgtggccatggtcctcagcgtagttggcatgaagtgtacgcgggtgggagacagcaaccccattgccaagggccgtgttgccatcgccgggggagccctcttcatcctggcaggcctctgcactttgactgctgtctcgtggtatgccaccctggtgacccaggagttcttcaacccaagcacacctgtcaatgccaggtatgaatttggcccagccctgttcgtgggctgggcctcagctggcctggccgtgctgggcggctccttcctctgctgcacatgcccggagccagagagacccaacagcagcccacagccctatcggcctggaccctctgctgctgcccgagagtacgtctgagctccgcctgccctggccagccccccacccagtggcccccttgcccagcatccagccagcctcgcagcaccctgggcagggccactggggcataggatgggcataggtgctctgagcagcttgtcctcaacacaagcacccaccctgcaatctgagacccagatcctcagagagacaccagaggcaggacccagcccccaggcatacacacagatgcaggtccaggcacggtcttgtctgcacagcctggtgggcaccagcatgcatccctggagacaggccctcaggcaccagcccggctgtttactcactgaagagctgcttgggtgggacatttaaaaatctaagcacacttaaatatctcctagaatggggaaagaagggaaagccctggttcacctacagtgggggatctatcagatcctccagacattaaatttagataccaaatgttatacccttaaagttgctttccaagtttctctcatgtgaggacaccgtgaggtggtggtgaaggtggctttgtgcaatccatgtcagaagaggaccctcaccggaaccaaatctactgttaccttgacctggacttgccagtctccagaaccatgagaaataaatatctactgcttaagccacttagtctctggtattttgctacagcagcccaagcaggctaagacatggttccacagtccctttctagcagcagccctc

SEQ ID NO: 463245 - DNA, 760 bp, Homo sapiens
gtgagtttggggattgttgtgtccactaaccggactcagaagggacttccctgctcggctggctttcggtttctctgctcacctccggataaatcacggggtctcccgcgccgctcatggcgcctcccgtccgtctcgagcgtccctttccttcccggcgctttcctgggttgcttctggcggccctggtgttgctgctgtcctccttctccgatcaatgcaatgtcccggaatggcttccatttgccaggcctaccaacctaactgatgactttgagtttcccattgggacatatctgaactatgaatgccgccctggttattccggaagaccgttttctatcatctgcctaaaaaactcagtctggacaagtgctaaggacaagtgcaaacgtaaatcatgtcgtaatcctccagatcctgtgaatggcatggcacatgtgatcaaagacatccagttcggatcccaaattaaatattcttgtcctaaaggataccgactcattggttcctcgtctgccacatgcatcatctcaggcaacactgtcatttgggataataaaacacctgtttgtgacagtgatgacattagggagtgaggcctttggaaggtgatgagatcatgagagcagagctgtcacgaatgggattagcgtcctaataaaagaggcccagaagagctcctttgcccctcctgccatgggaagaaatgctgaatctgccagagaggttggtcctgaactccttagcctccacaact

SEQ ID NO: 463246 - DNA, 1058 bp, Homo sapiens
gtgagtttggggattgttgtgtccactaaccggactcagaagggacttccctgctcggctggctttcggtttctctgctcacctccggataaatcacggggtctcccgcgccgctcatggcgcctcccgtccgtctcgagcgtccctttccttcccggcgctttcctgggttgcttctggcggccctggtgttgctgctgtcctccttctccgatcaatgcaatgtcccggaatggcttccatttgccaggcctaccaacctaactgatgactttgagtttcccattgggacatatctgaactatgaatgccgccctggttattccggaagaccgttttctatcatctgcctaaaaaactcagtctggacaagtgctaaggacaagtgcaaacgtaaatcatgtcgtaatcctccagatcctgtgaatggcatggcacatgtgatcaaagacatccagttcggatcccaaattaaatattcttgtcctaaaggataccgactcattggttcctcgtctgccacatgcatcatctcaggcaacactgtcatttgggataataaaacacctgtttgtgacagtgagttgaaatatgcattcctatttcttttaccgatacattctaatttttctctggaataataaaaatcttaaccgaattccttctgtgcaatctgtacttcacatggctgaagacagccataatgttctcagatattcctatggggttcctggcaactctttctttaagttctttcttatcctgggatgtgtcttttctaattctaggggcctaaatacgtaaaaggcttcaaacttgattttacttcaataaacttgaaattatgttggttctaccacctccagtataataatcatcctgcttggcaaatcagtaaagattttaaaaattgatactcttcaagagaaaatgtgccttagagaaatcggataactttctaagatattaacttgcagactgaagactgaaacgcaagtccacccgactccagagacttggctttgctagtcagcatccagtcaggaaatcaaaactta

SEQ ID NO: 463247 - DNA, 426 bp, Homo sapiens
tcatctgcctaaaaaactcagtctggacaagtgctaaggacaagtgcaaacgtaagtaactctggagtgggaacccctctgttagtcaaacatctgtaagatctgattcaatttgttcaaattttgtaactgagttgcatacaacaattagtttgctaaggtgcaatacatatgagaattattcttgtagatcataccttgttactgctttgagttcctggcaccttcattacaagtttatttcatgagaaaccgtcattgcaggacatgattgagggaaaacccccattcactgggggtctcccattttcatgactaaaattaagtaatgaatgacttgggacaagaaagagaagtggattaaataactaaaagatgcgacaatcttgggccttgagatctttggattatatcagttgaattgaa

SEQ ID NO: 463248 - DNA, 365 bp, Homo sapiens
agtataattcatgtatcataaaagttaccttttcaaattacacaattcagtggtatttagtatattcataaagttgtatattacggtctgaatgtttgagtccaccccaaatccatatgttgaaatctttacccctaaggtgatgacattagggagtgaggcctttggaaggtgatgagatcatgagagcagagctgtcacgaatgggattagcgtcctaataaaagaggcccagaagagctcctttgcccctcctgccatgggaagaaatgctgaatctgccagagaggttggtcctgaactccttagcctccacaactatgagaaataaatttttgttgtgtatgagctaaccagtttatagt

SEQ ID NO: 463249 - DNA, 1012 bp, Homo sapiens
ctcactactaaccttaagaaaggaagtaaccaaaatccaatacatgagcaactgtgagttgccatcatccaccgcctttgtctggaaggaagcgcagggcctcacacgcgggatccatcggaagcccaagcattgtcaagctctgctgctgcacctgggtcagcaagatcaatgcaatgtcccggaatggcttccatttgccaggcctaccaacctaactgatgactttgagtttcccattgggacatatctgaactatgaatgccgccctggttattccggaagaccgttttctatcatctgcctaaaaaactcagtctggacaagtgctaaggacaagtgcaaacgtaaatcatgtcgtaatcctccagatcctgtgaatggcatggcacatgtgatcaaagacatccagttcggatcccaaattaaatattcttgtcctaaaggataccgactcattggttcctcgtctgccacatgcatcatctcaggcaacactgtcatttgggataataaaacacctgtttgtgacagtgagttgaaatatgcattcctatttcttttaccgatacattctaatttttctctggaataataaaaatcttaaccgaattccttctgtgcaatctgtacttcacatggctgaagacagccataatgttctcagatattcctatggggttcctggcaactctttctttaagttctttcttatcctgggatgtgtcttttctaattctaggggcctaaatacgtaaaaggcttcaaacttgattttacttcaataaacttgaaattatgttggttctaccacctccagtataataatcatcctgcttggcaaatcagtaaagattttaaaaattgatactcttcaagagaaaatgtgccttagagaaatcggataactttctaagatattaacttgcagactgaagactgaaacgcaagtccacccgactccagagacttggctttgctagtcagcatccagtcaggaaatcaaaactta

SEQ ID NO: 463250 - DNA, 1373 bp, Homo sapiens
gcagagcacttgggtatggcgggctgcaggtcccgagccgtgccctttagggaggcggctgaggcccagcgagaattcaagaactgtgcaggtaggccagtagtgctgggagacctggcgcaccctctgcagctgctggcctgggtgctaagcccctcattgcctggggccagtggcatgggctggcctctccgagtgcggggcctaccaagcctgcacccacccacccggaacttgctctggcccgcgagcgctgtgcgcagccccggttcctgccagtgcctctccctccacacctccccacaagcagagggagccagctccagcctcggccagcccagagaggggctcccacagtgcagcggcgggctgaagggctcctcaagcgctgccagagtggacaccgaggccaaggaggcacagagaggaaaatgtgttagcagccactaagaggagaggcaggggcaagcacattccaccctcattgcaacaataaaatctgaacagaacacatggcgtgcctatctgaggactctgaaaagtaaatggtagcagatggattaagaaagaagaccagaactcaaactgtcagtgaatcaacaatgttctgatgcacagatttcagtcctagcactgctgcagccatgtcaaacccagcttgagggtggagccaatacacaaaagagtacacagccaagagtattgcagggacctgggcctctggcccctggctgaagccaatcctgaagtctactctacctatagacttctggttataggagcctattaatttccttattgttcaagatagtttaagggatagctggttttggcataccacagcagctaattggcaccactctgtaaaggtgctagggaagcccagagaaagacacacctcatgaagctgagtcaagaaataaaaaaggacagaagataggtccggaagtctacagtcgacaggctgctttcccatgacaccttgaatcctaacactagcctggaaaaatggactattatcctcattgtatgtctcagaagagttcatggtttgtccatggtcacaaggcaaggaagagtcaagattgaaacccaggccttccagtgccacatcgcatgatttcccccatattctcctgaaccaggacttcttttctgtcatccttttgctcaaaaatatttaacatacgcccttgtctctggagcatgttcaaactttctagctgaggatttgaagttttccgcaaagccgctctactccaaaagatttaagctcatcattccagctcattcctccaattggaccttcgcttagacttcccttatctgtactttcttgccatttcttctccatgtgtttgagttcattcttt

SEQ ID NO: 463251 - DNA, 746 bp, Homo sapiens
agctcacattgcttcagctcatgctcggttcactgcacccactgtcctgcacccactgtccaacaagccccagtgagatgaacccggtacctcagttggaaatgcagaaatcacatgtcttctgcgtcactcacactgagagctgtagactggagctgttcctatttggccatcttggaacctgccaagtgttttttctaaagaagtggtatttatgggtggtatgtcctctttcttcatgtcaccagatgggatggctactttgtggaaaaatggagagaagagaagactacagtgatgggaccaggaaacaggatatctgtggtcagaagttgcctcttaggactaaaccagtgaaagatgggaaaatccatgatggaagcttgcttgaactctgaagaaacactggcttctttgtaatccaatttccatattaaatgacagtccagccagtaccatgaaagttgaaaatcaccatgacaatgacaagaagagaccaaaaaagggcagaaaaggggctccttgattccagggaaatcttcaaccctccttgattccaggaaaatctttatcccttcctaagaaaagcgtaagtattcctgcctttgctttcaattcccaaccccttcattaaagctatcctacatctgtaacttcctggttctcaggagccaagaagttgattggtgggccactctcccacttctccattttatgaccatcaaataaagcctgcacttctcaat

SEQ ID NO: 463252 - DNA, 859 bp, Homo sapiens
agctcacattgcttcagctcatgctcggttcactgcacccactgtcctgcacccactgtccaacaagccccagtgagatgaacccggtacctcagttggaaatgcagaaatcacatgtcttctgcgtcactcacactgagagctgtagactggagctgttcctatttggccatcttggaacctgccaagtgttttttctaaagaagtggtatttatgggtggtatgtcctctttcttcatgtcaccagatgggatggctactttgtggaaaaatggagagaagagaagactacagtgatgggaccaggaaacaggatatctgtggtcagaagttgcctcttaggactaaaccagtgaaagatgggaaaatccatgatggaagcttgcttgaactctgaagaaacactggcttctttgtaatccaatttccatattaaatgacagtccagccagtaccatgaaagttgaaaatcaccatgacaatgacaagaagagaccaaaaaagggcagaaaaggggctccttgattccagggaaatcttcaaccctccttgattccaggaaaatctttatcccttcctaagaaaagcgaggtacaagttcaatctctgaagatgatggaggaatatatctacgcttgaatccatctggagttacaactttacacctctctcttcaaagtcctctttcccaagacaggcgcccctttctagggtcattcattctaaaatctatgtgtaattccagcctatttgaactggaataggagtaatcaaccaaatcagtgttgttttcaacagtaagctctaaagatgagatatattttaataaacatgtatcttttttattatactttaagt

SEQ ID NO: 463253 - DNA, 1639 bp, Homo sapiens
acctggcaaaagtatagctcaaatgtgcctcagctaccatttcctggtggcagtcctcaaccaatgggtgccgggaattggtgaacaacgccccagccccccagcctccagagaaacaattctaagtgacatggatgatgataaccagtctatgcccacagtgattatcagctcagcaatgtaccctttactggcttttctccttccatatgtcactattcctgctccctcactcctgcttcctggaattaccttcccagaaaaacttcattcagcagcactggagccagactcagttcccggatcttgcagccgaggagcctctcaagcatccacagcccccaccagtgtggggacggtggatcctgtggtggacatccccggggatctcttcacaataaatcttgctggtgctaactctctgggtccgtgacatcttcaagagctgtaacactcatcacaaaagtccgcagctccattcttgaagtcagcgagaccaagaacccaccagaaggaaccaactccagacacaccctgacgtgggataccccatttcctgaggcatggagaggcatcaccccaaccaccctggcctgccacgctcccatcctgtgcctataaaaaccccagaccctagcaggcagacatccaggcagctggacatcaagaggagtgcatcagcagaagaacacatgggcagctggacgtcgagaggaatgcaccgacgagtaccagcacgccggcaggccaccaaccactgcagcaggccacagaccacccctgcagaatgacacggagtttggctggggcagtctgaggagagcccaggctgctgagctccagggaaaaccatctcccttctggctcccccatctgctgagagctacttcaactcaataaaaccttgcactcattctctgagcctatgtgtgatccaattcttctggtacaccaacccaagaaccccaggatacagaaagccctctgcccttgtgataaggcaggggtttaattgagctaacacaagcagcctatggatggctaaactaaaagagcaccgtgtaacacacgcccattggggcttcaggagctgtaaacattcacccctagacactgccatggggctccctgcccgtctgtagactcccctacaggcttgtgcagcggggcactgaagaagcaagtcacaccctcatctcacgccctgcgagggggacaagggaacttttcccgcttcaactgtatgcttatacttaccttgctctaaattgtctttatctgttagaatttaatggtatttaaacattggtaatagttgataacaagtataatatgttcatcaactaatgtacttgatgttgccaacatatgaaaatttgagtccttcaaatgtcatatgagtatttgcttcatggtctgaaaaacaagtttctcaggtagggagataaagggaaacattattacatttcagcctggtaatgtggcattacatgaccccggctgcctttttaggggaagtcagcaaattgttttacttcttcgtgatctgtttctcatttataaactggggctaatatgatgggtacctaagctctaatttattcctagatattgatcacaagctaagcttccataagtt

SEQ ID NO: 463254 - DNA, 1314 bp, Homo sapiens
acctggcaaaagtatagctcaaatgtgcctcagctaccatttcctggtggcagtcctcaaccaatgggtgccgggaattggtgaacaacgccccagccccccagcctccagagaaacaattctaagtgacatggatgatgataaccagtctatgcccacagtgattatcagctcagcaatgtaccctttactggcttttctccttccatatgtcactattcctgctccctcactcctgcttcctggaattaccttcccagaaaaacttcattcagcagcactggagccagactcagttcccggatcttgcagccgaggagcctctcaagcatccacagcccccaccagtgtggggacggtggatcctgtggtggacatccccggggatctcttcacaataaatcttgctggtgctaactctctgggtccgtgacatcttcaagagctgtaacactcatcacaaaagtccgcagctccattcttgaagtcagcgagaccaagaacccaccagaaggaaccaactccagacacaccctgacgtgggataccccatttcctgaggcatggagaggcatcaccccagtaagttgcccatgccctgtgctggcagcctcccttttacccccaaccatcctttgctctagcttctggccccaaatttgtccaaggagccccccattcaaatcctttccctgctgccacgtggccttccctgtcccacagcttgctctgcaagcctccaatgtctgaagatcttccagtgtcactcatggcccctttagtctcagcccagccataaacttcaatgcaaaggataagtctagattgatttcacagttcttttaacaagtggacttaaaagctagtggcaatacattccttctcctcagagttgaaggcaagttctccctgaagcctgggtgacacatgtccttttcctaagactggggaagagaattgggagtggcagccagttcggcaggaaatttgttagcaggggaagaaactcagatgggagtgaggaacttcacaggaaaagtctggaggagcatccaaggatgatcaacatttattttatgtgtgggaagcaatgcgactttactgttattgaccctttacaatatcccctgtaaatgtatgtttagggttttcttctgaaaaagaaagaaattgttactcagccagtaaatgatacttaaagagagaaagagggggaaaaaaggaaggaagggagagagaaagtgggagtagatgaaagtgagggcgagagaaagaaaaagaaaggaattgttattcagccagtaaaagatactt

SEQ ID NO: 463255 - DNA, 1116 bp, Homo sapiens
ctcgaggccactggtgcttgggggtgggaaaagagtgaccgggggcaactgagcaaaacatagaacagaaactccctctcgaatagagacccacgcacggaaggatgatacactgtgattccccgacgtgggcctgcagcaagagacgggtgctaacagcgtccgagccaatccgtgcttatcacacatgcagtcaatgaacacctcacaaatgcaaggttcacatgcagtcttcgatgaacacatcgatcgcatccagcagtatgtctgtattggaaaagtccttccatagcacccagccagcaattggcttctttcagacactattgactgcaacaaaccctagcacaaggagagggtctaacgagaaacttgttcagaggatgctgacccatccatcagtgagcacagccaacccaaaaaggcggggacgcggcagagcaggggctgagggcacacttgctgcagtgttcacggagcacacacagaaagatctgcccgagagagtccccaaaaggcacaattctacaaggtcaaccaagtggaggggaatggcagtgaaacgccaaactcctactgaaaggttgatgggtacagccttccagagacagggctgggtggcgggaacgcgggcacccagaggtccagatcagcaaaagaggccagtgactctgtctccatcagataaaattcagccacagcgggagggagcgtgtgagacccacgaaggccttgccctggacctacacctcaccctgttccagagagaattcagtggccggcaacactgccagttcccctttatttcccttgaggtcaacattttggaattttctactcacatccaccgagcgaccctcctcggccacctccacacccacactccaggcccaccactgcccttgggcatgagcaagcctgacgctgtctctcatcctggtaacaccttcttccccgcacacacctcggccacaggctaggggcagcggaaaggccctgctggaaatttccatccagggtctgtgcagggcgggtaccccagagccgcagggcagggcagatggctcctcagatcgggctggagagacatccaggaggaggatgccagttgttggg

SEQ ID NO: 463256 - DNA, 1308 bp, Homo sapiens
ctcggaagcatcagggtaacaatgggacaaatgtgggctgtggttcgttctaccttggaactttttcacactgataatgaggaggaaggagagtataacaaagtaacagtagaggttacagaccaggtttatttgccacctaaagctaaagcagaaaaggagggagaagttcatccctatccttctgcaccccctcattattattttgaagaaaatgaccctccagatctttcttttctggaggacactggagggaaagcacatttagttgattataacaaggcctgtgatgatatcagagataatctacataaagctactttgttggcacaggcgacggcaggactgagagtggataaaggaaatactctatttcctggagcttgttttaactgtgggaagcatggtcatactaaaaagaatttaaaaaaaaaatcagcaagtcaggccaccagataggtgaaaaaagaaaactgctcatcctgaaatatgtctaatgtaaaaaaggaaaactttgggctaatcagtgtcactctaagtttgataaagaagggaacccgattttgggaaactccctgaagggcccatcccaggccctgttctaaaccaggacatttccagctcaggccattccctcacccccatacattatctgtcccccaccatagcccatagtgccgcagtagatttatgctgcacaaaagctctatttttaactcacaatacattagataaactacattgtgaacaaaaatttgagccatttatctgtctctctaactgattactccagaattcagaagccattagtgagcattcttaaattatgacaatataattatttgcataattttaatgtgaatctgtttttgataacaggattcaattggagacactgtttgttttatcaaggctttaactcgaatggcagctacaaccagaccactttaaggaattgaggttgactttatagcaccaatacaaagccccttataatgactggcttggtgtcttgtctacaagggtcctttatattcactgtccttctggtaagaagtaaagaatgtcactttctgacgggcctaggaacctcaagatatttggggaccttgagaagagaggactacacccattcataaaagtattacaggagagctggcaagatgtctgagtaggaagagctctgacctgcagcacctagtgagatcaacacagaaggcaggtggttcatgcatttccaactgagcctccactggtgatacccaggcaaacagggtctggagtggacctccagcaaactcgagcaaa

SEQ ID NO: 463257 - DNA, 1472 bp, Homo sapiens
agcaacgatccagatggtggctgtgctctgtctgcgtgggtcccagagtgagaagctgaggtgccggccttgttgaacagggagggctgctctctgctctggagatggcactgtgctctcatgtccacattgtggaaggcggaagggcgagagaggctgggtgacacctcttcttgccttagaaacacgagcgagtggttctgaacagccgcggtcttgcatgcctgcccctcagcaacggccctgctccaaaccggtgttacagtgatctgattattgtaattgatgacattaggaataaggaatccacacagaataatacaggtgcctgtcatgccagagtggttttattcattgttagagaagttcataaagttgaaagaaagcatctacatgggctagaacagcaaaaagcatgttttagtcctttcttaatttgtgaataaaatgatgaattccagaagcctattttcactgacaattgaaatcagccctgtacacccctgcacctgctctctacccctgggagttctgctctgtcttccagtctctgcgggaagctcccgccctggccagccctaggctccctgctgtccccaggccccagcttctgtttattcttccatgctggcctcatgcaatttctcccttggaccctctccccagtctggctgcagagccagtcccttttgggtgtgaccactgataatagacatagggatctggaaactgtcattcatctttctagaaaccagattctctttttagggggtagctgtaaactctatggatttctgctgtccattttacaattaaatataggatatctatcatttcttgagtgtgacaatgtgcagaagccagcattgcccttggagggccccagcagcgtgttcggtgcatgtctgccccagaacttgggtgatgattcccagtgtcaatggtcaatgagcattgtcagggatggaggcagagatcatcctactcagtctgactgaggtgggcatgtgcaggaaaaagacccaggccaactcactacctcccagaagtgggacaatgatgggctggggttctggaggcaaaggatgctggtatgaacagtccctttggaaagcccttcctggcttctgttttataactccaaacaataggccctgccaaatatatttttctaacatcacaagcttgttgcaaagtcagttttatggatgcactaaacctgccttttaaattatcatcaagtataataaaatggcagaaaatcatcaattttccgagaatgtgagtaaagtgaaagttagttacatgttggcatgtgggctgcagtccagctgtgtctataatcggaattaagccctgcaagctttgtgggaacagctgttttctgatggaacagccaggcttatattttatttggaggaggccccagtgcctgtcgtttccctctttgtgttcatgagttctcatcattt

SEQ ID NO: 463258 - DNA, 853 bp, Homo sapiens
aagagcatccttactgattcagaatgcttggtaaactgaatacagaagaagaatccaactgccagatgagaacattggacagtgggatcggaacctttccactcccagactcgggaaatcgctcgacaggacgctacctatgccagccagactccccagaggacgctgagcctctcctgcctctccagtcagccctttctgcagtttcttccatgagagcccaaacccttgaacgtgaagtgccttcctccacagacggccagcgccctgcagatagcgccattgttcattccacatccgaccccatcatgaccgccagagggatgaggcctcttcagagccgcctccccaaaccagcttcctcaggaaaagtcagttcccaaaagcagaatgaagcagagccaaggcctcagacatgctcatcattcggatatgctgaagacccaatggcaagccagccgcttccagactgggggagtgaagttgctgccaccgggacccaggacaaggcacccagaatgtgtacgtactctgccagcggtggcagtaatagtgacagtgacctggactatggagataatggttttggagctggaaggggacagttagtgaaagcactgaagagcgctgccccagaaattgagacaacttgaagaaacaaaagacgatcccgagaatagattatcgaaaatttccctagagtcattcaataaatttaacagcaatactgtgattttattagaaaaagagaagaactctctgaacaaggttgaaggacagaaggaagaaaaagaaaaaaatgaagagacatctttgagtagttcagataggcctggggtagacaacttggaat

SEQ ID NO: 463259 - DNA, 1025 bp, Homo sapiens
aagagcatccttactgattcagaatgcttggtaaactgaatacagaagaagaatccaactgccagatgagaacattggacagtgggatcggaacctttccactcccagactcgggaaatcgctcgacaggacgctacctatgccagccagactccccagaggacgctgagcctctcctgcctctccagtcagccctttctgcagtttcttccatgagagcccaaacccttgaacgtgaagtgccttcctccacagacggccagcgccctgcagatagcgccattgttcattccacatccgaccccatcatgaccgccagagggatgaggcctcttcagagccgcctccccaaaccagcttcctcaggaaaagtcagttcccaaaagcagaatgaagcagagccaaggcctcagacatgctcatcattcggatatgctgaagacccaatggcaagccagccgcttccagactgggggagtgaagttgctgccaccgggacccaggacaaggcacccagaatgtgtacgtactctgccagcggtggcagtaatagtgacagtgacctggactatggagataatggttttggagctggaaggggacagttagtgaaagcactgaagagcgctgccccaggtaacaaccagcgaacttgctggccctgcaggttcctctctctgggaagccgctgattatacctttcactgtgctcggcccccaccctctttgattttatgttttttcttcatgtctctcctgagatctaattttctggtacatacagaagattgtctatgcacatccatttgttttctggtgtaatcttcatgacattgcagtgcagtctgtaaggattttatttctgaatccagcatgtctaaaacagcctccaattgagttatctcaataatgaaggaatgactataaagataactgttcttaattatatactctggcaagttaaatcatccagtgagctgtggatggagttttccaggctctctgctaacgtcatgctgtgtagc

SEQ ID NO: 463260 - DNA, 2779 bp, Homo sapiens
acagaccaggtgcagtttgagaagtgtggcaagagggtggatcggctggatcagcgtcgttccaagctgcgcgtggctgggggccatccgggcaactcaccctggacagtcagcttggggaatcggtgaggcacaactgcctgtctcccacagagaggagctgaggttgtgtcctctgtggttatgccactgggggctgggaatctatccctgcccccagaggtcctagccagaagatggcaggtctagcatctgtcccaggagtctgttccctgtcctaattccccactcctctaggcagggccagcatttctgcggggggtctctagtgaaggagcagtggatactgactgcccggcagtgcttctcctcctggtgagcctcccttgtgtttggggacccagtctcatcccaccttcccctttccccaggcaagctaacaagtgagccttggggcaatggactgagagtcacaaatgacctagcagagcttctctcccagccatatgcctctcacgggctatgaggtatggttgggcaccctgttccagaacccacaacatggagagccaggcctacagcgggtcccagtagccaagatgctgtgtgggccctcaggctcccagcttgtcctgctcaagctggagagatctgtgaccctgaaccagcgtgtggccctgatctgcctgccgcctgaatgatatgtggtgcctccagggaccaagtgtgagattgcaggccggggtgagaccaaaggtacgggtaatgacacagtcctaaatgtggccttgctgaatgtcatctccaaccaggagtgtaacatcaagcaccgaggacatgtgcgggagagcgagatgtgcactgagggactgttggcccctgtgggggcctgtgagggtgactacgggggcccacttgcctgctttacccacaactgctgggtcctgaaaggaattagaatccccaaccgagtatgcgcaaggtcgcgctggccagccgtcttcacacgtgtctctgtgtttgtggactggattcacaaggtcatgagactgggttaggcccagccttgacgccatatgctttggggaggacaaaacttgtaagtacagtcaaggacaagacttgtactcaaggctgagatttaataaaattcatatttttactacttcaccaaggactttcttaaatgaaaatggtttttccccctacaagtaaacagtaataaagaagagaattattcctatattgagaagtgcaaacattattggaaaagagagtctcactagcataattgtgcattatcttcctcttatatcgccggcctccctgcacccccatgcccacctcctcctcgcgcctccatgccgcctcccaccgctccagctccttgcagctgcgagtccagtcactggtcacctttcgtatctcctcactcagagcctggctggccaaacctgcctggtccagctgttctcagagcatggcattcacctgggccaggctggcactcctgaatggggcacaggggatcagtaggcgctcgcccagggggccatgctgcgagccctggccctccctgctgctcctcctccagccagatgagggcactctccaggtcttggctgtgctctgcgtcctgggtgacagagaggttaaagcatcaggctgggcaggtggagggcagggcctgcctctgccccaccctggcacccaccctcagctgctgctgctccagctctccggatctctccaacagctgctccagctccgagaacctcttcttgtactggagaatctggggattgggagctgatggtgagccccaggggtgggggcagggcaaagtgaacacgtgggagggaaagagcaggaatgggtggccctgaccttgccctgcagccgctgcacaagctgggcctgccgctgctggccctccaggtaggcctgcagcttgcgccactaggaggcctgctcctcctgcagctgcctccgcaactccacgctctggagtaccagccccctgggctcttgcatctccagctcaccagattccagccacagagcctgctccagctgcagggaagggccctggggcatttccgccaagacaggtgagactgcggttctgacctgcgggcctccgtgcatatgcgctagggcacctgggggccggcagagccgttcccctacgcaaagtaagcgtgttttgtctacaacccaacggggacactgagagccccaaaggccctgctttcttcccagagaacagcgcccatctgcataatttctacctggctctatgaggtaagtatgagagcttgggcctctgccccgacacagcctcatacgcctcactctttacacacacggtcacttgccccgcgcactcccgagccctttccagccctgacacacagctgggattctcacttccgatcagcggtcctgaacccgctcccagggcacgggaactccttcgtggtgaagcagcaagtggcgaagcagcagcctctgcgctgcctcatctacatagaagtcgccctgtccgtgatgtcaccgacagtgccttgcccagtccccgtctgcctttctgccactcaaccgaccaatctgctgccagagccgccaaggggaagtgacgtctgcctctccctttttccctcccgcccctgcgtctgttctctcccaaagaagctggtccttagcctgtgttaaggagcaacctttcggtggccagatggagccggggcatccttcttcaaataatggcttttaattc

SEQ ID NO: 463261 - DNA, 2652 bp, Homo sapiens
acagaccaggtgcagtttgagaagtgtggcaagagggtggatcggctggatcagcgtcgttccaagctgcgcgtggctgggggccatccgggcaactcaccctggacagtcagcttggggaatcggtgaggcacaactgcctgtctcccacagagaggagctgaggttgtgtcctctgtggttatgccactgggggctgggaatctatccctgcccccagaggtcctagccagaagatggcaggtctagcatctgtcccaggagtctgttccctgtcctaattccccactcctctaggcagggccagcatttctgcggggggtctctagtgaaggagcagtggatactgactgcccggcagtgcttctcctcctgccatatgcctctcacgggctatgaggtatggttgggcaccctgttccagaacccacaacatggagagccaggcctacagcgggtcccagtagccaagatgctgtgtgggccctcaggctcccagcttgtcctgctcaagctggagagatctgtgaccctgaaccagcgtgtggccctgatctgcctgccgcctgaatgatatgtggtgcctccagggaccaagtgtgagattgcaggccggggtgagaccaaaggtacgggtaatgacacagtcctaaatgtggccttgctgaatgtcatctccaaccaggagtgtaacatcaagcaccgaggacatgtgcgggagagcgagatgtgcactgagggactgttggcccctgtgggggcctgtgagggtgactacgggggcccacttgcctgctttacccacaactgctgggtcctgaaaggaattagaatccccaaccgagtatgcgcaaggtcgcgctggccagccgtcttcacacgtgtctctgtgtttgtggactggattcacaaggtcatgagactgggttaggcccagccttgacgccatatgctttggggaggacaaaacttgtaagtacagtcaaggacaagacttgtactcaaggctgagatttaataaaattcatatttttactacttcaccaaggactttcttaaatgaaaatggtttttccccctacaagtaaacagtaataaagaagagaattattcctatattgagaagtgcaaacattattggaaaagagagtctcactagcataattgtgcattatcttcctcttatatcgccggcctccctgcacccccatgcccacctcctcctcgcgcctccatgccgcctcccaccgctccagctccttgcagctgcgagtccagtcactggtcacctttcgtatctcctcactcagagcctggctggccaaacctgcctggtccagctgttctcagagcatggcattcacctgggccaggctggcactcctgaatggggcacaggggatcagtaggcgctcgcccagggggccatgctgcgagccctggccctccctgctgctcctcctccagccagatgagggcactctccaggtcttggctgtgctctgcgtcctgggtgacagagaggttaaagcatcaggctgggcaggtggagggcagggcctgcctctgccccaccctggcacccaccctcagctgctgctgctccagctctccggatctctccaacagctgctccagctccgagaacctcttcttgtactggagaatctggggattgggagctgatggtgagccccaggggtgggggcagggcaaagtgaacacgtgggagggaaagagcaggaatgggtggccctgaccttgccctgcagccgctgcacaagctgggcctgccgctgctggccctccaggtaggcctgcagcttgcgccactaggaggcctgctcctcctgcagctgcctccgcaactccacgctctggagtaccagccccctgggctcttgcatctccagctcaccagattccagccacagagcctgctccagctgcagggaagggccctggggcatttccgccaagacaggtgagactgcggttctgacctgcgggcctccgtgcatatgcgctagggcacctgggggccggcagagccgttcccctacgcaaagtaagcgtgttttgtctacaacccaacggggacactgagagccccaaaggccctgctttcttcccagagaacagcgcccatctgcataatttctacctggctctatgaggtaagtatgagagcttgggcctctgccccgacacagcctcatacgcctcactctttacacacacggtcacttgccccgcgcactcccgagccctttccagccctgacacacagctgggattctcacttccgatcagcggtcctgaacccgctcccagggcacgggaactccttcgtggtgaagcagcaagtggcgaagcagcagcctctgcgctgcctcatctacatagaagtcgccctgtccgtgatgtcaccgacagtgccttgcccagtccccgtctgcctttctgccactcaaccgaccaatctgctgccagagccgccaaggggaagtgacgtctgcctctccctttttccctcccgcccctgcgtctgttctctcccaaagaagctggtccttagcctgtgttaaggagcaacctttcggtggccagatggagccggggcatccttcttcaaataatggcttttaattc

SEQ ID NO: 463262 - DNA, 2603 bp, Homo sapiens
acagaccaggtgcagtttgagaagtgtggcaagagggtggatcggctggatcagcgtcgttccaagctgcgcgtggctgggggccatccgggcaactcaccctggacagtcagcttggggaatcggtgaggcacaactgcctgtctcccacagagaggagctgaggttgtgtcctctgtggttatgccactgggggctgggaatctatccctgcccccagaggtcctagccagaagatggcaggtctagcatctgtcccaggagtctgttccctgtcctaattccccactcctctaggcagggccagcatttctgcggggggtctctagtgaaggagcagtggatactgactgcccggcagtgcttctcctcctgaacccacaacatggagagccaggcctacagcgggtcccagtagccaagatgctgtgtgggccctcaggctcccagcttgtcctgctcaagctggagagatctgtgaccctgaaccagcgtgtggccctgatctgcctgccgcctgaatgatatgtggtgcctccagggaccaagtgtgagattgcaggccggggtgagaccaaaggtacgggtaatgacacagtcctaaatgtggccttgctgaatgtcatctccaaccaggagtgtaacatcaagcaccgaggacatgtgcgggagagcgagatgtgcactgagggactgttggcccctgtgggggcctgtgagggtgactacgggggcccacttgcctgctttacccacaactgctgggtcctgaaaggaattagaatccccaaccgagtatgcgcaaggtcgcgctggccagccgtcttcacacgtgtctctgtgtttgtggactggattcacaaggtcatgagactgggttaggcccagccttgacgccatatgctttggggaggacaaaacttgtaagtacagtcaaggacaagacttgtactcaaggctgagatttaataaaattcatatttttactacttcaccaaggactttcttaaatgaaaatggtttttccccctacaagtaaacagtaataaagaagagaattattcctatattgagaagtgcaaacattattggaaaagagagtctcactagcataattgtgcattatcttcctcttatatcgccggcctccctgcacccccatgcccacctcctcctcgcgcctccatgccgcctcccaccgctccagctccttgcagctgcgagtccagtcactggtcacctttcgtatctcctcactcagagcctggctggccaaacctgcctggtccagctgttctcagagcatggcattcacctgggccaggctggcactcctgaatggggcacaggggatcagtaggcgctcgcccagggggccatgctgcgagccctggccctccctgctgctcctcctccagccagatgagggcactctccaggtcttggctgtgctctgcgtcctgggtgacagagaggttaaagcatcaggctgggcaggtggagggcagggcctgcctctgccccaccctggcacccaccctcagctgctgctgctccagctctccggatctctccaacagctgctccagctccgagaacctcttcttgtactggagaatctggggattgggagctgatggtgagccccaggggtgggggcagggcaaagtgaacacgtgggagggaaagagcaggaatgggtggccctgaccttgccctgcagccgctgcacaagctgggcctgccgctgctggccctccaggtaggcctgcagcttgcgccactaggaggcctgctcctcctgcagctgcctccgcaactccacgctctggagtaccagccccctgggctcttgcatctccagctcaccagattccagccacagagcctgctccagctgcagggaagggccctggggcatttccgccaagacaggtgagactgcggttctgacctgcgggcctccgtgcatatgcgctagggcacctgggggccggcagagccgttcccctacgcaaagtaagcgtgttttgtctacaacccaacggggacactgagagccccaaaggccctgctttcttcccagagaacagcgcccatctgcataatttctacctggctctatgaggtaagtatgagagcttgggcctctgccccgacacagcctcatacgcctcactctttacacacacggtcacttgccccgcgcactcccgagccctttccagccctgacacacagctgggattctcacttccgatcagcggtcctgaacccgctcccagggcacgggaactccttcgtggtgaagcagcaagtggcgaagcagcagcctctgcgctgcctcatctacatagaagtcgccctgtccgtgatgtcaccgacagtgccttgcccagtccccgtctgcctttctgccactcaaccgaccaatctgctgccagagccgccaaggggaagtgacgtctgcctctccctttttccctcccgcccctgcgtctgttctctcccaaagaagctggtccttagcctgtgttaaggagcaacctttcggtggccagatggagccggggcatccttcttcaaataatggcttttaattc

SEQ ID NO: 463263 - DNA, 1538 bp, Homo sapiens
acagaccaggtgcagtttgagaagtgtggcaagagggtggatcggctggatcagcgtcgttccaagctgcgcgtggctgggggccatccgggcaactcaccctggacagtcagcttggggaatcggtgaggcacaactgcctgtctcccacagagaggagctgaggttgtgtcctctgtggttatgccactgggggctgggaatctatccctgcccccagaggtcctagccagaagatggcaggtctagcatctgtcccaggagtctgttccctgtcctaattccccactcctctaggcagggccagcatttctgcggggggtctctagtgaaggagcagtggatactgactgcccggcagtgcttctcctcctggtgagcctcccttgtgtttggggacccagtctcatcccaccttcccctttccccaggcaagctaacaagtgagccttggggcaatggactgagagtcacaaatgacctagcagagcttctctcccagccatatgcctctcacgggctatgaggtatggttgggcaccctgttccagaacccacaacatggagagccaggcctacagcgggtcccagtagccaagatgctgtgtgggccctcaggctcccagcttgtcctgctcaagctggagagatctgtgaccctgaaccagcgtgtggccctgatctgcctgccgcctgaatgatatgtggtgcctccagggaccaagtgtgagattgcaggccggggtgagaccaaaggtacgggtaatgacacagtcctaaatgtggccttgctgaatgtcatctccaaccaggagtgtaacatcaagcaccgaggacatgtgcgggagagcgagatgtgcactgagggactgttggcccctgtgggggcctgtgagggtgactacgggggcccacttgcctgctttacccacaactgctgggtcctgaaaggaattagaatccccaaccgagtatgcgcaaggtcgcgctggccagccgtcttcacacgtgtctctgtgtttgtggactggattcacaaggtcatgagactgggttaggcccagccttgacgccatatgctttggggaggacaaaacttgtaagtacagtcaaggacaagacttgtactcaaggctgagatttaataaaattcatatttttactacttcaccaaaaaaaaaaaaaaaaaaaaaaaaaaaaaaaaaaacaaacaaacagaaaaaaaaaaacgacacgaccaaaaaaagacaagaaagaacaaaacaaaaaagcaaacaagtgaaagaaaaaaacagacagacacagcgaccgaaaaggaagaagaaaacaagaacagaaaaaaaagggtggagagaggcacgcggagcaggagaggaaggggatgaaaaacaaacgaagaagaagaggagaggggggcgcgcagagaagagaagaagcacaaagaggaggaggcgaggccgagagagggagcaacggggcgaagagtgaaagtggggagagacgcaacaaaaaaaggagcgggggggggaggagagaag

SEQ ID NO: 463264 - DNA, 1150 bp, Homo sapiens
tgggcccaggtagatgaggcctggagcctggctggccgggccatgctgctggaggtgcagggcacaccccctgggttctgcactgacttccacagccacctctttcttgcctgcttcatgcttgtgctcacacagagctccatcttcagcctcctgtccatggccatcaacaggtacctggccagccacagtcggctcaggcataaaagtttagtcactgggacccaaacaagaggggttactgctgtcctctgggtccttgcctttggcactggactgaccccattcctggagtggaacagtaaagacagtacctctaataactgcatggagccctgggatggaaccatgaatgaaagctgctgccttgtgaagtgtctctttcagaatgcggtacccatgagttacatggtatatttcagttttggggggaccaccctccagtgggagatatacacagccaagtcgctggctgtgatggtggggatgtttgctctgtgctcgctaccagtgcgcaccatggactgtgtcactctttttcagctagctcaggctaaagataagcccaagtgggcaaggaagatgaccattctcttgtcacatgcaaatttgattgtcaatcccattgtctataaccactggaacagagaatcctgctatacttttcataaaattatttacagaaaactacctgaggggaagaaattggaaggatgagatccgtcttctaccaaattcccctttccagagctagggagtgaatttcgcttctctccagcgttcaagtttggccaagttcttggaacctaaaacatgaacttttcactaagcaaaattatataactatgtgtacatattaggtgaaataaaaataaaacattttaaaaattaaattaaattaattaaatagaaattccaatattctgcccatcctagcagttctcctgcacgtccccttttggaggctatggctctaaagttgtattagagaaagaagtcagcatatgttatgcttttaattagtcctttgggacgtgagttatgggacaaaccttcccttggcttagggtgagctccagtaagtcagatacagaaagaaaaatattgcattatctcacttaaaaaaaaaaaagaaaaacttgaatatata

SEQ ID NO: 463265 - DNA, 719 bp, Homo sapiens
aaactattttactctgaaacactgtgaactattataaagcaaatatgttttaacttagaggcaatgaaacaataaaagttgcctgtactaaaaatgtgtatttgtttctaagaaggcagccaggaaaattaaaagtataattcttcaatcaagaaactgccacattaatttgaggaaatgatagtctcctaagttcttaagtagaattgtcaacacgtaataattttaagctccgttcttttccatatacagaaaactacctgaggggaagaaattggaaggatgagatccgtcttctaccaaattcccctttccagagctagggagtgaatttcgcttctctccagcgttcaagtttggccaagttcttggaacctaaaacatgaacttttcactaagcaaaattatataactatgtgtacatattaggtgaaataaaaataaaacattttaaaaattaaattaaattaattaaatagaaattccaatattctgcccatcctagcagttctcctgcacgtccccttttggaggctatggctctaaagttgtattagagaaagaagtcagcatatgttatgcttttaattagtcctttgggacgtgagttatgggacaaaccttcccttggcttagggtgagctccagtaagtcagatacagaaagaaaaatattgcattatctcacttaaaaaaaaaaaagaaaaacttgaatatata

SEQ ID NO: 463266 - DNA, 1571 bp, Homo sapiens
attgacaaaagattaaaaatttgtttatatactgttggtgaagcatggatttacagtaccattgtgcctggaaggtgtttgtgtcccccattaaacctattggaacagcaggcccgcggggttcactctggaatggctgcaatgctgacgttggaggacatgttaaagctcacctagctctacctcatcttacagaagcaaggcccagtggcttgcttcaggccccgcattttgatagcctcggagccaggaagtttgtggtgattttttgcggcagctgcaggaaacagaaaatgcactgcctagatggaccctctgactccccaccacccaggctggagcggcagaggctgccaggaagagccagaaaacaggtcactgaccagctaatacaggccaaggctgctgggaggccaggaatatggccatgaggagcacagcacgatgttccctctatcacgtgtgcatattctagtggaggaagactgacagtaagtaggaacactctactggtaaggggagaaatgcctcaaatgagcatgtgcacaacttcagtaaacatgctgtgcatgtggcccctcccaagtgcccgcaggccaccacacaagtggacagccctggacagcccgcccctagggaagaatcaagggaggagaaacagaagccctggaactgtgctagcatataaaaccccaagtcaagggctgaatggcacacttggatctctcaagtcacctgcttggcccccttccaagtgtatttacttccatttgttcctgctctaaaactttttaataaactttcactcctgctctaaaacttgcctcggtctctccctctgccttaaaactacttctgcccccgcagccgaattctttcctctgagagggcaagaatcaagttgctgcgcacccctgcagattcactgctgctaacaatggggctggttttctggcctgtggaacgtgggctaaagggatgagcagccctgcctggctcggtcctaaaacctgccataccatcctccccctgttttcttcccgtctgcttgttggatgcaggggacccagggtggtactccaaggccctgaaagacagtggagctacttgggaggagcccaggtcccgaatgccttagtggagcagaatgtctgctacactcaactcgtattggactctgaaggcaaaactcacctttgttgtgttgagccactaagttttgggggacatctgaaacaggctgtgctgattaatacggagcggccaggagggcatgggaaatgatcagttttgtgggctgggggagaggcagtgggatttggtggaagtgtttccatgagggggcagagaagagcctcctggagatagaaaggtgaagtggaaagtgctatcctaaattgagaaaagggagccagtgtgtgtgcaccctcttatatttgtaaattagagttaacacttctggtggggccctctgtaaactgtaaatacggataataatgaaggtttgtattgcatacacacttttctaagtgcttcagatggatgatctcatttaaccttcataacatccc

SEQ ID NO: 463267 - DNA, 1530 bp, Homo sapiens
cagtttttaattccctctccccacaattcgtcggtagcccccagcaaaagctgattctgtagtccttataattactacttcctgtcagcctttcagatgcctgagatatttcacctcccaataaatttccttcagttggtatcctgtgcccacttcgtggttggtgaaagttttaataattgcactactgcttatgtggggggctatccatacttccacctaccatcagaaaatccaggtgacaccaagacacacttggagtttttgcaccagagatttaggtacttcagccacgtctatttccaaaccagaaataactcagacgtagcctcagcagcactagagatccacattagttacactggcttaggatttaaatgttcacaggcatcaatcatcatattaatgtttcagtgccgttcaatcccctgtcaatcattgagtaacttgcccaaaatcctgtgtggaaactcattactgttaaaggtgttatttttggatggaagcaaatgattgtagcacctctaatgctgtatgcacagcctctcaggcaggtggtgttccacgtccgtgttctcccttccagttcactgtgccttgaaaaatttttttacataaattatcctatatccaaaagcttatgtttaacagttttaatatttctatggttatatgttatgcatttttcagtattccattcctattgattagttaataaccataggcattttatagaaataagagtaggaattcataaacaactgtcctcatagtgggcttaattttctgatgaaaatatggcatttatatgctttcagcatacaatttaagatttcattttaagtccattctaattcagtgaatagtcaggggaaggtaatgtctgcttttccaaagaattgaaaggttcattacatttctcaatttgtcacaatttttattaaaatcctattacttgtttcttctttatcacttgatgaattgacgaaaatacaaattcagtaggcaaatatgatatccagtatttttgataatcttattagagtagtaagcaataaaataatgagtgacaggaacatcgccgagaccacaaagaaggtatgtgataactcaggccagtctgaaatactttcattctctatgttttatttcttgttatgccaaataaagacctgctattttacatttatccttaacttattaaatgtaatactacccagaaatttgattcctaggtatttaccagagcgtagagtgtattgaaaacttatgtatggactggagacaattttagcataagattgaagaaagtataaaaaataataggttattgaattagaacagtgattgaagaatttgaaaaatgttctattttctggtgttaataatatagttctaatggaaaaaaaatgcagtttttttttggcaagatggcggactggaggcatcgttagcatgccttttccacttcgaaagacaaaactgtgtgtaaaggttcatgctgtgaacttttttccaagaagcaacacc

SEQ ID NO: 463268 - DNA, 686 bp, Homo sapiens
gtgggcagacatcagctgagtttgacccagttctcctttctgctctaacaggacaacactgagttcaatgcctcagaattgctgggttctccctgccccagcacccaaagaggctctctgcaccaggccactgctgccaggggtgggagaggggtggcgtcagcaactcaggactgtttctttctacctcttcagtgcctttttcagcactttctacctttctacctttttcagcactaagaagttaaaaccaggagagcacctgcatctcatctggaccaaaaggaatggacacaactgtctggatgagctgtggcacaggcattctgccaagaagaggaagctggcagaagaggccttgcaagccaaatggactaagacaccccacccttgtgaaggcgacagaggactagaaataatgaacaaatctgcactgagcataacccatgatgcatagtactgcagaacagtgctgtacagtgctcttcagggcctcacaggaggtgcagatgggtgccgttgacaacacagagagaagagagaacctaaacaatgaaacaagtcccctgcccacgtgctgtcagacactggagaaaagaacaaaaccaaagaaaagccactgagcaaacacaatggccttgtcttctacctttcttgtggcacaatgcaggactggacagcactgt

SEQ ID NO: 463269 - DNA, 2179 bp, Homo sapiens
actgcatatgtcttggaatccttgacccagttccgaggactggagaggggatagaaccttgtgtccaaggaggtccttcaggagacctgggatgagtggtgcttccccaaaacagactcatggacattaaacatcatcagaatggcacaagagggcaaagaagaaaacagcctcataccacggtgcagaggctcctgacctgggggctgccagtctcctgtagctggttcctgtggcgccagccgggcgagtttcctgtcactgctctcctgctgggggcaggcgctggggggctcctggccataggtctctttcagctcctggtgaaccccatgaacatctacgaagaacagaagattatgttcttgtacagcttggtgggttagtgctgggcaaaagccaggaacactcaagcggcctgtggaacacagcgccgtcctgcatgcccaggaaggaaagggagattagaagaattagaggaaaagggacaaaagtcttaagtcactaatgctattataattccactgtggatgcctgcgtgtagcaggcactcacaccctggctgtcccagcttgggggccatgggctgggggacctcccctcacatccgctgtgccagcctcctactagtacccaagatgctgggcaaggaaggcaggctctttgtcctgggatacgccttggctgccatctatgtgggtgagtatgtgggggccaggccagtagccaatctgcgacacaatctcaacaacgtgatcgcatcgctgggctgcaccgtggagctgcagatcaacaacacccgcgcagcttggcgcatctccacagcccccttacgggccatgttcaaggacctgctgagtagcaaagaattgctgagagcagagactcggaacatctccgccacttttgaggacctggatgcccaggtgaatagtgagacgggctacacgcctgaggataccatggactcaggggagacagcccagggcagggaggcccgccaagccccagcctccagactccacctgtcgacacagaagatgtatgagctgaagaccaagctgcgttgctcctatgtggtgaaccaggccatactcagctgccgtcgttggtttgaccgcaagcatgaacagtgcatgaagcacatctgggtcccactcctcacccacctgctctgcctgcctatgaagttcaagttcttctgtggcattgccaaggtgatggaggtttggtgccgcaatcgcatcccagtggaaggcaactttgggcagacctacgactccctcaaccagtctattcgtggcctggatggggaattttcagccaatattgacttcaaggaagagaagcaggctggggtgctggggctcaacacaagctgggagcgcgtgagcaccgaggtgcgggactacgtgtaccgccaggaggcccggctggagtgggccctggggctgctgcacgtgctgctctcctgcactttcctgctggtcctgcatgcgtgagccatagtccccaccccagcagcccctcctctgccccggactggagccctgccctgagggaggctgtaaggatggaaccctagcacctatcctcacctctgaatctgaatattatttacctttgtctttgtttacacaaagttaaaggaaaagtggacattttgtcagaagaacattacccatgttcccactgccttaaaaggccaaccgtcttcattcatccacctccttccagcctttatcccaatactgattttttttttttacgtttagctttgacttttgattttttcttgcccttcatattccccttggctctgactttgtgccatttttatctttccattttgctttcattttctcctgcctgctgcgttggcagcgactttccctccatttagaacaaagtcctcaaccccacccagcccagtgtccagctgggctgccccgggccttgctctgctctagctcccctgctggtctctggaccctctatttcccatctccactcccaaacacctgagatgggcagggcttgggtgagggctgccacagggctgttgctctgtctgcccctatgtggggggcctagagtgactgcaagtgagtgggtatgtgtgtatctagggccccatgggaagacaaagatgaaggagctctattcctgcccccaataa

SEQ ID NO: 463270 - DNA, 1163 bp, Homo sapiens
caccagccagtcagcggagcctcctcacctccgttgccagcgaaggcgctcgttaggccttgggaagaggcgaccggaggcgatgcccgcgaatttgttaggggggggagagaccgtggtcacgaagggggttctcccagagtgaagcttcttcatcgcactctagagttgctgattcctgtgatttcctccatgtgggaaacggtgtttgtgctagaagaggctgcgctctttacctgacataagggggttcaagactgacatcgcctcacgcccacccgaaaacgtttacatggcttgtctctttttttttctgtcctaaagtcgcctcatcttcacatcccctcattttttcttccacactcgagagtgtctctctctctcattaaaagctccaccaaatatttgaaatatctcaaccagaaagactgcaataaatacattatttcattcgtggaagctacagaccagctaggttgagagttgcttgatattttctgctaaacgagtcacgcaatgcacgcgtttctaacgtgcagcaagacgattagtcgactcagcctctccgggactgttctaaactataaaaagggttaccactcaggaagccaccccatacccccatccctgcttaaacctgtacaacaccaaggaacataccatggtgaagactggcagacagacttaacccagatgccaccttacagggaactacaagatttgctagtatttataggcactttcaacaggtggatagaagctttccccacaaggacaggaaaagtactggaagtgtctaaattcttaaagaaatcattccaagatttggattaccaaaaggtttgcaaggtgacaactgacctcacttcacagctaagaagtcacaagattggcagcttccccaattactgctgtgaagaacatcactattgtagaacctaagattggcctcttgagatgtcttttcaggcttttgcatttctgactgctggaaggcaccatctggcccgaaaatcaaccagtcccttagcccccacccagaagctgactccatgcaggaggaccattttccacgcccctgtgatttcatccccaacaatcagcaccacgcaagccctagccccctccccaccaaactatctttgaaaaaccccttacctcca

SEQ ID NO: 463271 - DNA, 3795 bp, Homo sapiens
ttataaagattgcatgaactcgaatgaaggaatatattctcctggaattaaaagtagcagcctcaaggagtatcccccctgcaaaacagctgacctggggagcccctgcaaggaaccccacaagacatttgtttatgatctagattcccacgttgatgcggacgatgacccttccaccttagcattgctccaagcagttccaaaccagagctgcaggccacatggcagtaaattaacccacagtgtttccgacagtctgtttggctgggagacaaacagaaaacactttctggaaggcacatcctcagtttatcccaaggaaaggcctgaaaagctgacaagttgcgccagcagctgtcccttagagatgaagctgtgcccaagtgtgcagacgcctcaggtacagagggagaggggcccacagggccaaggccatggccgcatggctctcaacctccagctttcagacactgatgacaatgaaacgtttgatgagctgcacatagagagcagtgatgagaaaagtccttcagacgtgtcattggctgccgacaccgataagtccgtggagaacctggatgtccttgtggggtttggaaaatctctatgtgggtctcctgaagaggaggaaaaacaagtgcccatcccttcagagactaggccaaagacttttagtttcattaagcagcaaagagttgtaaaaaggacttcttcagaagaatgtgtgactgtgatatttgatgcggaagacggtgagcccattgaattcagctctcaccagactggggttgtcactgttaccagaaatgagatttccatcaattcaactcctgctggacccaaggcagaacatactgagcttttacctcagggaattgcttgtttacagccaagagctgctgcaagagactatactttctttaaaaggtctgaagaggacactgagaaaaacattccaaaagataatgtagataatgttcccagggtgtccactgaatctttcagctccaggacagtgacacaaaatcctcagcagcaaaagctggtcaaaccaacacacaatatatcatgccagagtaattccaggtcttcggcacccatgggcatctatcaaaagcaaaatctgacaaaaatacctcccaggggcaagtcttcacctcagaaatcaaaactaatggagcccgaagccaccacactactcccttcatctggcctggtgactcttgaaaaatcaccagccttagctcctgggaaactctcacgattcatgaagactgagagctcagggcccctctttgaattacgatcagatccacacattccaaaacattccgcccaacttccgcacagctccaggatgcccagcaggagggactgggtccagtgccccaagagtcagactccagggtcacggtcaaggcctgccattgagtctagtgacagtggagagccccccacgagggatgaacactgtggctctgggccggaggcaggggtgaaatccccttcccctccgccccctccaggcaggtccgtctccctgctggccaggcccagctatgactattcaccagcaccttcatccaccaagtccgaaaccagggtccccagtgaaacagcaaggaccccattcaaatccccgctgctgaaaggaatttctgctccagttatttcttctaatccggccacgacagaagtgcagaggaagaaaccttctgtggccttcaaaaagcctatcttcactcaccctatgccctccccagaagcagtcattcaaacccgatgccctgctcatgccccctccagctccttcaccgtaatggctctggggcctccaaaggtctctccgaagagaggtgtccccaaaacctctcctcgccaaacacttgggaccccacaaagggacataggattacagactcccaggatctctccttcaacccatgagccactggaaatgacgtcctccaaaagtgtatctccagggagaaaaggacaattgaatgatagcgcctccacaccccccaagccttccttcttaggggtaaatgagtcaccatcatctcaggtcagcagttcctcatcatcctcatcacccgccaaaagccataacagccctcatggttgtcaaagtgctcatgagaaaggactgaaaactcgccttccagtgggactcaaagtgctcatgaagtctccccagctgctcaggaaaagttccaccgtgccagggaaacatgaaaaagacagtttaaatgaagcctccaaaagttccgtggctgtgaacaagtctaagccagaggactccaagaatccagcaagcatggagatcacagcgggtgaaagaaatgtgaccctaccggattcacaagcacagggcagtttagctgatgggcttcccctggaaacagcactacaagagccattggaaagtagcatccctgggagtgatggaagggatggggtagataatagatccatgagaagatccctttcctccagcaaaccacacctaaaaccagctctgggtatgaatggcgccaaagcccgcagccacagcttcagtacacactcaggagacaagccttctacgccccccatcgaagggtcaggcaaagtccgcactcagatcattaccaataccgccgagagaggcaattctcttacccggcagaactcttccacggaaagctctcccaacaaggccccttctgctcccatgttggagagtctccccagtgttgggaggccctcggggcacccctcctccgggaagggctccctggggagctcaggcagcttcagcagtcagcatgggagcccaagtaagttgcctttgaggatccctccaaagtctgagggactcctcatcccacctggaaaggaagaccagcaggccttcacccagggagagtgccccagtgccaatgtggctgtacttggggaaccaggcagtgaccgccgcagttgcccacccaccccaacagactgccctgaagccctgcagagcccagggaggactcagcatccaagcacttttgaaacaagcagtacatccaagctagaaacttctggaaggcatccagatgcctctgcaaccgcgactgatgctgtgagttcagaagcccccctctcacccacaatcgaagaaaaggtcatgttgtgcattcaggaaaatgtggaaaagggccaagtgcaaacaaagcccacctctgtggaagcaaagcagaagcctgggccttcttttgccagctggtttggttttcggaagagtagacttccagctctgagtagcaggaaaatggacatctccaaaaccaaagtagaaaagaaagatgcaaaagtcttggggtttggaaacagacaactaaaatcagaaagaaaaaaagagaaaaagaagcctgaactacagtgtgagacagaaaatgagcttatcaaggacaccaagtcagcagataatccagatggcggtttacaaagcaaaaataatcggagaacaccacaagacatttacaaccaactgaagattgaaccaaggaatagacacagccctgttgcatggctcctgtctcatcggcagctctatcagtactcaaggaaaccacaagaaaaacatgaaaatcaaagccgatatggaagtaccaaaagactccctgatgtcccctgcattataaaaccacaaattgtaagcatatctaaggctgcccttgtggtgtcactgaaaggaggaagagagaatgaatgtgtgaaaatgtgcaatatgctggaaattcaatccagctgatggaaaactttgat

SEQ ID NO: 463272 - DNA, 1522 bp, Homo sapiens
ccaactggctgatgactgagcaggcacaggacctgtctgctaaccccacttccctgcagcccccagtgaatttggatccatttgcctgtttcccggggcagggccctaggctggttcctctgcacaaagggaagtcgctgaggagggccctgaaggagcgcaggctcctggaggacttcctgaggaatcaccattatgcagtcagcaggaagcactccagctctggggtggtggccagcgagtctctgaccaactacctggattgtcagtactttgggaagatctacatcgggacccttccccagaagttcaccttggtgtttgatacaggctccccggatatctgggtgccctctgtctactgcaacagtgatgcctgtcgtgaaaaaccaccaacgcttcgatccgtccaagtcctccacccacagaacatgggcaagtccctgtccatccagtatggcacaggcagcatgcggggcttgctgggctatgacactgtcaccgacctagtggaggtcatgattctcttgcaggtctccaacattgtggacccccaccagactgtgggtctgagcacccaggaacctggcgacgtcttcacctactccgagtttgatgggatcctggggctggcctatccctctcttgcctctgagtacgcgctgcgccttggtttcaggaatgaccaggggagcatgctcacgctgagggccattgatctgtcgtactacacaggctccctgcactggatacccatgactgcaagaatactggcagttcactgtggacagtttgacatcgactgcgggcgcctgagcagcattcccacggctgtcttcgagatccacggcaagaagtaccccctgccaccctccgcctataccagccaggaccagggcttctgcaccagtggtttccagggtgactatagttcccagcagtggatcctggggaatgtcttcatctgggagtattacagtgtctttgacaggaccaataaccgtgtggggctggcgaaggctgtctgattgcatcactggccacggacctcaatgtgaccaaacacacacgcgcacatagatgagatgtgcaggcagatggttcccaataaacaccgcatttctgcaaagcctgacttcccttgttgtcactggggctgaagctctgcgccgttgtgggggtggatgtgactgccaggtggtgtgtgggcacagcaggaactacatggtgggaagggttggtgggtggaggctacctggagggcaatgactatttcaagctcaggtcagggaagaccaaggcgtgccttacctacctgtccttcactctagagctttctgggcaaagggcacaagaggggagaccctcgcacgataagacccatttgttcctggggaatgagagatgggggagggacagagtggaggcttctttccctgtcctttggggaatcccaattctactccctcattctgggagtttggaggactgagcagcctcctttcctaggagggcagtcctt

SEQ ID NO: 463273 - DNA, 788 bp, Homo sapiens
ggcaacatcctcaacatccagcaggccattggagccactgcgggccagtacaatgagtttgacatcgactgcgggcgcctgagcagcattcccacggctgtcttcgagatccacggcaagaagtaccccctgccaccctccgcctataccagccaggaccagggcttctgcaccagtggtttccagggtgactatagttcccagcagtggatcctggggaatgtcttcatctgggagtattacagtgtctttgacaggaccaataaccgtgtggggctggcgaaggctgtctgattgcatcactggccacggacctcaatgtgaccaaacacacacgcgcacatagatgagatgtgcaggcagatggttcccaataaacaccgcatttctgcaaagcctgacttcccttgttgtcactggggctgaagctctgcgccgttgtgggggtggatgtgactgccaggtggtgtgtgggcacagcaggaactacatggtgggaagggttggtgggtggaggctacctggagggcaatgactatttcaagctcaggtcagggaagaccaaggcgtgccttacctacctgtccttcactctagagctttctgggcaaagggcacaagaggggagaccctcgcacgataagacccatttgttcctggggaatgagagatgggggagggacagagtggaggcttctttccctgtcctttggggaatcccaattctactccctcattctgggagtttggaggactgagcagcctcctttcctaggagggcagtcctt

SEQ ID NO: 463274 - DNA, 3110 bp, Homo sapiens
ctgggaatacaggtgtgagccaccgtaactggctgacacacaaaaaaattggaaatgccgttgggagatttctgagactcttcaatcaaacccaggccttcagggagcacccaggttgcaagtgaacagagtgaaattgttctctgaagtttcctaatctgcctgaagtctggacccactgaagaagaaaacaatggctcctggtcctttccctgagttttcattaactgaactcatatggcaggaagaccgaagtctgtcaacacacctgggcaagcttttgtcacaaactattgtctgctctgcaggctcaacagactctgttccaggccattgtgtgttcttcaagaccactgaattcccctaaagatcacttagcacccctctgaaatcattcatacttctccatctccctctcccctagaaagaagtgtacagaaccatctgtaccccatcgtgtggtggggtgaccactctgtgattcacccccttgcatgctaatacatttcagtgccacaactccttttgcaagttgacttttcagtaaaccttcagagggtaagagaagtttttccttgacccctacaccagaaatccagaatttagcataaaatcctctactttttttttttttttaactaaaaacacttcgaggccgggcatggtggctcatgcctgtaatcccaacaccttggccctcgtcgccgtcccagccctcgaggaatctgcgccccaggcgaagctgtcctcggaggttcgggagcgtcggagtgacttcccgatcctttcccctgggacccgagggatccctccccccaagtgccgggtcctccccgcggctccccaggggctcctccggccgccctcgctgactcagcgtaatccgagccgcggagggcggcggggttggcggagcccgcccggggttaatcgccgagctttgaacgccccctcccgccccgcccgcctccagcagccgccccgcccctgcggagaagtcccgggctggcgccggcggccacagcggagcagctggagcgatcgaggctgcagcgcggccgccgggcgcagcatgactgccgtcggcgtgcaggtagccggcgcctggcggggcgctgacccggggtgctgccccgccgtgggaggttgggggtgggaggacggagggaggggcgtacccaccgcgagcgccggcgtcgggctgggggtgcgagcgccccccgtgcccgccccctgttgcaaacctgggtccggaggaggctgggcggggagcaacctcggggggcctgcctgcctcacatagctgctcccgaggcgcggactccggctgcttctgctcgcggccttgcaagcacccgaggctcccaaacttcatttggaaagatttttcttctctttggtgtcaccagtgacttactggcccagaggcctttgggccaaaggcagccccgccggtccttctttgaatccttcatccggaccctcatcatcacgtgtgtggccctggctgtggtcctgtcctcggtctccatttgtgatgggcactggctcctggctgaggaccgcctcttcgggctctggcacttctgcaccaccaccaaccagacgatctgcttcagagacctgggccaggcccatgtgcccgggctggccgtgggcatgggcctggtacgcagcgtgggcgccttggccgtggtggccgccatttttggcctggagttcctcatggtgtcccagttgtgcgaggacaaacactcacagtgcaagtgggtcatgggttccatcctcctcctggtgtctttcgtcctctcctccggcgggctcctgggttttgtgatcctcctcaggaaccaagtcacactcatcggcttcaccctaatgttttggtgcgaattcactgcctccttcctcctcttcctgaacgccatcagcggccttcacatcaacagcatcacccatccctgggaatgaccgtggaaattttaggccccctccagggacatcagattccacaagaaaatatggtcaaaatgggacttttccagcatgtggcctctggtggggctgggttggacaagggccttgaaacggctgcctgtttgccgataacttgtgggtggtcagccagaaatggcccgggggcctctgcacctggtctgcagggccagaggccaggagggtgcctcagtgccaccaactgcacaggcttagccagatgttgattttagaggaagaaaaaaacattttaaaactccttcttgaattttcttccctggactggaatacagttggaagcacaggggtaactggtacctgagctagctgcacagccaaggatagttcatgcctgtttcattgacacgtgctgggataggggctgcagaatccctggggctcccagggttgttaagaatggatcattcttccagctaagggtccaatcagtgcctaggactttcttccaccagctcaaagggccttcgtatgtatgtccctggcttcagctttggtcatgccaaagaggcagagttcaggattccctcagaatgccctgcacacagtaggtttccaaaccatttgactcggtttgcctccctgcccgttgtttaaaccttacaaaccctggataaccccatcttctagcagctggctgtgcctctgggagctctgcctatcagaaccctaccttaaggtgggtttccttccgagaagagttcttgagcaagctctcccaggagggcccacctgactgctaatacacagccctccccaaggcccgtgtgtgcatgtgtctgtcttttgtgagggttagacagcctcagggcaccatttttaatcccagaacacatttcaaagagcacgtatctagacctgctggactctgcagggggtgagggggaacagcgagagcttgggtaatgattaacacccatgctggggatgcatggaggtgaagggggccaggaaccagtggagatttccatccttgccagcacgtctgtacttctgttcattaaagtgctccctttctagtcctttttctgcccagaagtaggtgatgttattgccctcagcccatttcattctacactgactccttcccattccct

SEQ ID NO: 463275 - DNA, 1112 bp, Homo sapiens
aatcatggcagacgccgcgagcgaaatagaaagtgggtgctgagaccgtatatgggagcagggccactggattgtggccaggaagggctctctcaaagagctcttggtgatcaattggagggacactcacgaaatcatctcaagcacagacaggagacagtggactacatgataaagcagcgggaagattttgaaccctttgtagaagatgacattccttttgagaagcatgtggccagtttggcaaagcctggtacttttgctggcaatgatgcaattgtagcctttgcaagaaatcatcagttgaatgtagtgattcatcaacttaatgcccctttgtggcagattcgtggtacagagaaaagcagcgtgagggagttacacatcgcatatcggtatggagagcactacgacagtgttcggaggatcaatgacaactcagaggcacctgcacatctccagacggatgtgagtgaggcctcggatttctcccgtattccccgccctacaggaaacagattgagagctgtatatctggcgctaaaaaccagtaatgtttttgtagaaagttggcattgagaatctgtgggcctgattttaaaaatattttttatttcttagtttaggttctcagttttaatgaaatgtctttctttggaagatgcagaagagaatcttgagcccagtggtcgagtgctgaagcagtgtggccctttgtgggaggagggtggcagtggtgccagaatctttggaaatcagggcttaaatgaaggcaggaccgaaaacaataaggcacaggccagccctagtgaagaaaacaaagcaaataaaaaccagctcgcaaagtgtggaaaatctggggaatgcataaagctacatcaagaagcagaatgacctcacttatcctgtttggtgtatgccgtgacagttggaaggaaatacaccctgaaattgtcctcagtgtacaaatgaaaagcctccttttcccacctaacattactgtacatgtgggctcttcccatgtttatccatgttttttataaatgccatgatctgcaatgaacacctttgtgtataaatctttggtttttgcattattttcttgaataaag

SEQ ID NO: 463276 - DNA, 1085 bp, Homo sapiens
ctctctgttttccagttgaagaaatagaagaacatagaggctgaatgttctattcagaggcatccagccaaacagctgcagagccaagagcagcatcccagggccagaggggcaaggccagtgaggtgaaaaggcagggctgtacacaggaggagagacggaacagctggccgagagcagcccgtggggagggggtggacaggctggctgctgcccagatccaggggcctcttcagagacatggtgcacagatgattgcttgtgggaccctcctggatagcacctctagtcttggcttggggagcttcagagggggtgtcgagtgcctggacctaagtcatactcaacttccctccaacacgcagctcccaccctccagctctcgttctactcagctcttcctccaggtgcattctgtgcctggcagcaccagagcagggggcagcaagagagaccatggtgggagcccctggcccgtccaccgcctggagtgcaaactggacacccagaagctagctgggcctgagctggacatttagtgccagaagattctcaaaggggtccctgattcagaaaaataagaaccactccacagagggactgctgagattctgagcgtcgcaagccttctggagttctaaatggtgctcctggcagtcccctctgtgggtctctatgctgcagaggcaaagccatgtgtcctcatcccgccctgcacctggcagtgtgactgagaggggaagccaggatggggttcctgttggatcccacatgtgtttcctccctggcttgtggaagaaaatgtgttctccaaagtgctgtgctcttcctgagtaattggaggcagatgctctgttagaatcgtttcctttggctcgctgtccagaggctctgggtgtctccgaggatggatgctagctggctcaacatctccagcatcccgttactggggcatctggctggcccaccactgttcctccagaaggttgtatggacatgagtaagtattcctctctctgcgcctgttctaccttctttcaaagacaacattagaattcctgaatttataaagtgaggaaatgaag

SEQ ID NO: 463277 - DNA, 3199 bp, Homo sapiens
cagctcacagacaggctcacaggaatatgtgatgcaagaagggggttgagcgagttgactgggctgaccagagctgggtacagttttaactgtgaagattttctggaggaggcggatctgcagcagattatcccctgaggaggaaggggctgggaggtgaaggggctggggagagaatcccttgggagcagtctctctgtctcttactctgtgagctgtgtcgttccctcctgtccttcccttccctctgtcctcttctgattgccctgcagggtgtctgccctggtgccctgctctttgagctcggcaggttcaaggatgcccctactctgaccccacaacagtcacattcccctggcatcccttttggcccttccaggtcccgggcctcctccgagagtgaattggatgatgaaggcccctgtggtggtgatggggacccaggcctgttccccttccccatgccccggggtgggacccaggcctccagcgaagagagtgaggaggaggggacatctgacgacctccacccaccccctgactgccattatgcaacccggcccccacggccacaggcgttctgcacctttgggagccggctggtgagcccaggatgctatgtgtttagccgccggctggaccggttctgctcagcactcagctccatgctggaacggcacctcagcacacacatgtggaagaagatcccaccggcagctgaacctccagctcaccttgtcaactccccgttatctgctcccctgagcccatcctctacaggcacctgcccccgccttccaggtccaaccctgagacctgcctgcccagcctccatgccccccaccaaggacaaccttgtccccagctaccctgcaggctcccccagcgtggcggctgcctgtagccaggcagagtgcatgggcgggagccaggctatcacctcaccactgcctgccaacacgccatccccgtccttcagcaagctgccgccttccaaggccagcaagtcatccaaaggcaaggacggggtggaggtggaggccccttctcgaaagcggaagttatcccctggccctaccactcttaaacggacctgcatcctggagcccactggaaaagggaaaccctctggctgtaggggcctctcggccaaaactaaaacagccctgagcatggggcttaatgggacaatggggccaagagtgaagcgggcagggcccctggactgtcgtggctcccctcatcagctccccacaccagtcaaggcttctcagctggagaaccggggagcagctggacacccagccaaggccctgccaaccaactgcctctctgaggaggaggtggccaagaagcggaaaaacctggccacttattgccggccagtgaaggccaagcactgtcaggctggtgcccctgctgatgtggcctgctctgtgcgccgcaagaagccaggcccggccctggcctttgaggagaagtgctctacactgaaggtactggagctacctctgttccctgaaggaaagggagtttgagtccctgggtcacagcctaacatgccgagcagcaagtcaaaagcccattaacgagaaagtgcctgcccactgcaacggagccgccagcacctcctcccctccagatccgggccccaggctgctgccgctttttataactttatattatttttttttaagaaaaaaagctctttaaaatacctcaagactgtctccctgttctgttgctgctatgaaaatataaaaacagaaacatagaaaaggaaggaaaaaaaataacaaaatgagtgtccttactgtccccagccctaccctgggaggctgagatgataggcagccagactccagctcccatagcttgcctgcaaaagtctcttatgctcattattattattattgtcatcttgtcattttcaatagtgtgaaaaatgtttgtgtcactggggtagtctttccagacaggatgatgaggcgtgtggctctgaatgagtaaggcttcctgagtcttgacaccagagacgactatggtcccattgggaagagaaactcgagagggggagctgcacttctggctctttctaggatccttgccccgagggtctgggaattggcttgtgacccttttctggtccttcagcaaccctaggcatccatccctccctgaattattgcctgcttttcttcagctgttcctgcagcctcattttctcagccacttagggagcttgagctgggttggtcattgctgttgggatattcctgttttctattggacagccttccttccctgcctgtgggtttgcctttaaggaaggggtagaacctttcccagggaggcctccttgggttgaaccaccccttttttggaggcaggaagggaaaaggcatcatcacttgcagaactggtggtgtgggaggccacaggagtgtgggaggccttggtccttcaggatcacctggctcctcagggctgagcagctgctgaggaggcggcagggctgggagtgccctagtttttccatttatctcgctggggaccactcccgtgcagatgcgagaggagacttgcatttccctcctttggtccaccaggttcaaggcactatattttggcgatgtcctttcctattctccttgctcttaggcatggaggaagcttgttccctgaacaagacaaaatgaggtgacaggagacagtgcacagccagggaaatccagtactactagaaatcggctccaaacacttgtttcacagtcttggttcagcgtaccaagtgtgtgatttggggtttcactgaaatcgtttgccacaaaagtaatttccacaggctgcttgggatttaggcccttgtagacagacacacagatacaaatgaaggtgggctgggaactgttcggtccccttctgcctccgggctctcgcgggagcgggcctctccggggcactcgcgtttcccccccagcccccagagggcgctgtgggccactccgccgcactgccggcggcgtccccggggaggagcctctcctgcagccgccaccgcctccgcgatcgcaaacccggaagacgtgttcgggcagctggagtgtacgggcccgcgggccacggccatgcagcccctggaggctcgtggaataggatcagtcccctcctcctccaagtgctttattggcattcacat

SEQ ID NO: 463278 - DNA, 567 bp, Homo sapiens
cagctcacagacaggctcacaggaatatgtgatgcaagaagggggttgagcgagttgactgggctgaccagagctgggtacagttttaactgtgaagattttctggaggaggcggatctgcagcagattatcccctgaggaggaaggggctgggaggtgaaggggctggggagagaatcccttgggagcagtctctctgtctcttactctgtgagctgtgtcgttccctcctgtccttcccttccctctgtcctcttctgattgccctgcagggtgtctgccctggtgccctgctctttgagctcggcaggttcaaggatgcccctactctgaccccacaacagtcacattcccctggcatcccttttggcccttccaggtcccgggcctcctccgagagtgaattggatgatgaaggcccctgtggtggtgatggggacccaggcctgttccccttccccatgccccggggtgggacccaggcctccagcgaagagagtgaggaggaggggacatctgacgacctccacccacccccttttccagagcaagcgatcctctagagta

SEQ ID NO: 463279 - DNA, 1955 bp, Homo sapiens
gaatttgccttcgaggccaagaattcggcacgaggagtgaagcgggcagggcccctggactgtcgtggctcccctcatcagctccccacaccagtcaaggcttctcagctggagaaccggggagcagctggacacccagccaaggccctgccaaccaactgcctctctgaggaggaggtggccaagaagcggaaaaacctggccacttattgccggccagtgaaggccaagcactgtcaggctggtgcccctgctgatgtggcctgctctgtgcgccgcaagaagccaggcccggccctggcctttgaggagaagtgctctacactgaagtcaaaagcccattaacgagaaagtgcctgcccactgcaacggagccgccagcacctcctcccctccagatccgggccccaggctgctgccgctttttataactttatattatttttttttaagaaaaaaagctctttaaaatacctcaagactgtctccctgttctgttgctgctatgaaaatataaaaacagaaacatagaaaaggaaggaaaaaaaataacaaaatgagtgtccttactgtccccagccctaccctgggaggctgagatgataggcagccagactccagctcccatagcttgcctgcaaaagtctcttatgctcattattattattattgtcatcttgtcattttcaatagtgtgaaaaatgtttgtgtcactggggtagtctttccagacaggatgatgaggcgtgtggctctgaatgagtaaggcttcctgagtcttgacaccagagacgactatggtcccattgggaagagaaactcgagagggggagctgcacttctggctctttctaggatccttgccccgagggtctgggaattggcttgtgacccttttctggtccttcagcaaccctaggcatccatccctccctgaattattgcctgcttttcttcagctgttcctgcagcctcattttctcagccacttagggagcttgagctgggttggtcattgctgttgggatattcctgttttctattggacagccttccttccctgcctgtgggtttgcctttaaggaaggggtagaacctttcccagggaggcctccttgggttgaaccaccccttttttggaggcaggaagggaaaaggcatcatcacttgcagaactggtggtgtgggaggccacaggagtgtgggaggccttggtccttcaggatcacctggctcctcagggctgagcagctgctgaggaggcggcagggctgggagtgccctagtttttccatttatctcgctggggaccactcccgtgcagatgcgagaggagacttgcatttccctcctttggtccaccaggttcaaggcactatattttggcgatgtcctttcctattctccttgctcttaggcatggaggaagcttgttccctgaacaagacaaaatgaggtgacaggagacagtgcacagccagggaaatccagtactactagaaatcggctccaaacacttgtttcacagtcttggttcagcgtaccaagtgtgtgatttggggtttcactgaaatcgtttgccacaaaagtaatttccacaggctgcttgggatttaggcccttgtagacagacacacagatacaaatgaaggtgggctgggaactgttcggtccccttctgcctccgggctctcgcgggagcgggcctctccggggcactcgcgtttcccccccagcccccagagggcgctgtgggccactccgccgcactgccggcggcgtccccggggaggagcctctcctgcagccgccaccgcctccgcgatcgcaaacccggaagacgtgttcgggcagctggagtgtacgggcccgcgggccacggccatgcagcccctggaggctcgtggaataggatcagtcccctcctcctccaagtgctttattggcattcacat

SEQ ID NO: 463280 - DNA, 2574 bp, Homo sapiens
gcgtccgcggcggtgatggcggtgcgtgaacgcgcggcggcagcaatggccgctctggagcggcgggtgccgagtctcgatgacttcgcgggacagagctggagctcgtgggtggagcgggccgacctgcccgcggctgacggggctgagctggaggagagtagcaaaaacacgaagaagttggatgccatgaccctcattaaagaagacatgtccatcttcgggcactgccctgcccatgatgacttctacttggttgtgtgtaaccactgcagccaagtggtgaagcctcaagctttccagaagcactgcgaaagaagacatgggcccctcagcaagctttatggccgggccccaccccacctccagcccctgccagctctcagaaatgccatgtagtgaatgggcagggcccagcttgtagggccccaggttccacgaaaacctcctccagggagaagggccaggggtcccggagccgtggccaccagcctcctgagaagacccagaaggacaacctctgccttttcgtgcctgtggtgaatctggagaagatgtccagtctcccgaagcctgatggacatggaatcagggtggccccaccctctgcttttctcagccagccagggggcctcaccaaggactcccctggaaaaactcccatggctcccccttctaaagaacctcctggcagagagaacatcgagatcatccccagtgaggggtccagtcactgggctgaaggcagccctcctgaaaaggagcccagtgggaccaggctgccccctaaaacccaccggaagatggctcggaaggagtgcgacctcaacaggcagtgtggggtaataaatccagagaccaaaaagatctgtacccgcctgttgacctgcaaggtaacccccttcccagcccggccctggcctttgaggagaagtgctctacactgaagtcaaaagcccattaacgagaaagtgcctgcccactgcaacggagccgccagcacctcctcccctccagatccgggccccaggctgctgccgctttttataactttatattatttttttttaagaaaaaaagctctttaaaatacctcaagactgtctccctgttctgttgctgctatgaaaatataaaaacagaaacatagaaaaggaaggaaaaaaaataacaaaatgagtgtccttactgtccccagccctaccctgggaggctgagatgataggcagccagactccagctcccatagcttgcctgcaaaagtctcttatgctcattattattattattgtcatcttgtcattttcaatagtgtgaaaaatgtttgtgtcactggggtagtctttccagacaggatgatgaggcgtgtggctctgaatgagtaaggcttcctgagtcttgacaccagagacgactatggtcccattgggaagagaaactcgagagggggagctgcacttctggctctttctaggatccttgccccgagggtctgggaattggcttgtgacccttttctggtccttcagcaaccctaggcatccatccctccctgaattattgcctgcttttcttcagctgttcctgcagcctcattttctcagccacttagggagcttgagctgggttggtcattgctgttgggatattcctgttttctattggacagccttccttccctgcctgtgggtttgcctttaaggaaggggtagaacctttcccagggaggcctccttgggttgaaccaccccttttttggaggcaggaagggaaaaggcatcatcacttgcagaactggtggtgtgggaggccacaggagtgtgggaggccttggtccttcaggatcacctggctcctcagggctgagcagctgctgaggaggcggcagggctgggagtgccctagtttttccatttatctcgctggggaccactcccgtgcagatgcgagaggagacttgcatttccctcctttggtccaccaggttcaaggcactatattttggcgatgtcctttcctattctccttgctcttaggcatggaggaagcttgttccctgaacaagacaaaatgaggtgacaggagacagtgcacagccagggaaatccagtactactagaaatcggctccaaacacttgtttcacagtcttggttcagcgtaccaagtgtgtgatttggggtttcactgaaatcgtttgccacaaaagtaatttccacaggctgcttgggatttaggcccttgtagacagacacacagatacaaatgaaggtgggctgggaactgttcggtccccttctgcctccgggctctcgcgggagcgggcctctccggggcactcgcgtttcccccccagcccccagagggcgctgtgggccactccgccgcactgccggcggcgtccccggggaggagcctctcctgcagccgccaccgcctccgcgatcgcaaacccggaagacgtgttcgggcagctggagtgtacgggcccgcgggccacggccatgcagcccctggaggctcgtggaataggatcagtcccctcctcctccaagtgctttattggcattcacat

SEQ ID NO: 463281 - DNA, 2478 bp, Homo sapiens
gcgtccgcggcggtgatggcggtgcgtgaacgcgcggcggcagcaatggccgctctggagcggcgggtgccgagtctcgatgacttcgcgggacagagctggagctcgtgggtggagcgggccgacctgcccgcggctgacggggctgagctggaggagagtagcaaaaacacgaagaagttggatgccatgaccctcattaaagaagacatgtccatcttcgggcactgccctgcccatgatgacttctacttggttgtgtgtaaccactgcagccaagtggtgaagcctcaagctttccagaagcactgcgaaagaagacatgggcccctcagcaagctttatggccgggccccaccccacctccagcccctgccagctctcagaaatgccatgtagtgaatgggcagggcccagcttgtagggccccaggttccacgaaaacctcctccagggagaagggccaggggtcccggagccgtggccaccagcctcctgagaagacccagaaggacaacctctgccagccagggggcctcaccaaggactcccctggaaaaactcccatggctcccccttctaaagaacctcctggcagagagaacatcgagatcatccccagtgaggggtccagtcactgggctgaaggcagccctcctgaaaaggagcccagtgggaccaggctgccccctaaaacccaccggaagatggctcggaaggagtgcgacctcaacaggcagtgtggggtaataaatccagagaccaaaaagatctgtacccgcctgttgacctgcaaggtaacccccttcccagcccggccctggcctttgaggagaagtgctctacactgaagtcaaaagcccattaacgagaaagtgcctgcccactgcaacggagccgccagcacctcctcccctccagatccgggccccaggctgctgccgctttttataactttatattatttttttttaagaaaaaaagctctttaaaatacctcaagactgtctccctgttctgttgctgctatgaaaatataaaaacagaaacatagaaaaggaaggaaaaaaaataacaaaatgagtgtccttactgtccccagccctaccctgggaggctgagatgataggcagccagactccagctcccatagcttgcctgcaaaagtctcttatgctcattattattattattgtcatcttgtcattttcaatagtgtgaaaaatgtttgtgtcactggggtagtctttccagacaggatgatgaggcgtgtggctctgaatgagtaaggcttcctgagtcttgacaccagagacgactatggtcccattgggaagagaaactcgagagggggagctgcacttctggctctttctaggatccttgccccgagggtctgggaattggcttgtgacccttttctggtccttcagcaaccctaggcatccatccctccctgaattattgcctgcttttcttcagctgttcctgcagcctcattttctcagccacttagggagcttgagctgggttggtcattgctgttgggatattcctgttttctattggacagccttccttccctgcctgtgggtttgcctttaaggaaggggtagaacctttcccagggaggcctccttgggttgaaccaccccttttttggaggcaggaagggaaaaggcatcatcacttgcagaactggtggtgtgggaggccacaggagtgtgggaggccttggtccttcaggatcacctggctcctcagggctgagcagctgctgaggaggcggcagggctgggagtgccctagtttttccatttatctcgctggggaccactcccgtgcagatgcgagaggagacttgcatttccctcctttggtccaccaggttcaaggcactatattttggcgatgtcctttcctattctccttgctcttaggcatggaggaagcttgttccctgaacaagacaaaatgaggtgacaggagacagtgcacagccagggaaatccagtactactagaaatcggctccaaacacttgtttcacagtcttggttcagcgtaccaagtgtgtgatttggggtttcactgaaatcgtttgccacaaaagtaatttccacaggctgcttgggatttaggcccttgtagacagacacacagatacaaatgaaggtgggctgggaactgttcggtccccttctgcctccgggctctcgcgggagcgggcctctccggggcactcgcgtttcccccccagcccccagagggcgctgtgggccactccgccgcactgccggcggcgtccccggggaggagcctctcctgcagccgccaccgcctccgcgatcgcaaacccggaagacgtgttcgggcagctggagtgtacgggcccgcgggccacggccatgcagcccctggaggctcgtggaataggatcagtcccctcctcctccaagtgctttattggcattcacat

SEQ ID NO: 463282 - DNA, 769 bp, Homo sapiens
gggcatttgagaatggacccactgaaaggttccccaagtggtcctagcaccaggagcttgtcacggagtgtgggcttcatactgttgagctgcaggccctgcttggggcttctggaaaggggacaacctctgggttgtcttctgggaagaacagtctctggtaaggagaggctggagactctctaaaactggccctgacccttctgagctgtgtttctcctctaggggctgagctggaggagagtagcaaaaacacgaagaagttggatgccatgaccctcattaaagaaggtgggagtcgacacacattagggctgggacccagggcagacaggaccacgctccacttttccaccacactacagaaggaggtggctgcttgaagcagctgtctggggaccctcattttgataggtccgagtcggccggttgttctggctcctgtgacctgtcgttggagatcataatcataggtgattgcccactcacctgaaagcgtataccctttgggactgcttagatcgaactctggaagctggaagcattcagcatggagcttgttatatcagcggggaggtgaagtgccttctgagtgtggggtgggagtgctctccgatcttccagagaaaccctgggatcttcagccccagtgacatgggcttctgtcattgcagacatgtccatcttcgggcactgccctgcccatgatgacttctacttggttgtgtgtaaccactgcagccaagtggtgaagcctcaagctttccag

SEQ ID NO: 463283 - DNA, 776 bp, Homo sapiens
cacccctccacccctgcttttgctataatcaaagggctacttctttctgaattggctgtgaccctcattccaggtactggagctacctctgttccctgaaggaaagggagtttgagtccctgggtcacagcctaacatgccgagcagcaaggtgggtgggctggtctcactggtttttcctctgggcatcagggccttgaagggcaggcacacaaccccatgtccacttatgcacatgtgcccacctccaggtgtgcaggtgacaggcaagttctccagggtttccagtaaagcctgcagccagttttatttgcctcttctggtgggagccctggtgtagtgtgctatgtgctctccatatgatctctgccaggagggacttactggaggtgggacgggggtgctctcctgggttagatgtgggcctaatcataaaccctgtgtgttctccagcttcactacccaggctgcccctggtgagctggcattcatcttcccccttgctcagttttactcaccaggccagcagaaggaaatcaagctttagcctctgtagtgcacacagttcactgggtaggacagctggtaggcccccaccctgaccctttctctcgcctcttgtcttcctgcagtcaaaagcccattaacgagaaagtgcctgcccactgcaacggagccgccagcacctcctcccctccagatccgggccccaggctgctgccgctttttataactttatattatttttttttaagaaaaaaagctctttaaaatac

SEQ ID NO: 463284 - DNA, 3121 bp, Homo sapiens
cagctcacagacaggctcacaggaatatgtgatgcaagaagggggttgagcgagttgactgggctgaccagagctgggtacagttttaactgtgaagattttctggaggaggcggatctgcagcagattatcccctgaggaggaaggggctgggaggtgaaggggctggggagagaatcccttgggagcagtctctctgtctcttactctgtgagctgtgtcgttccctcctgtccttcccttccctctgtcctcttctgattgccctgcagggtgtctgccctggtgccctgctctttgagctcggcaggttcaaggatgcccctactctgaccccacaacagtcacattcccctggcatcccttttggcccttccaggtcccgggcctcctccgagagtgaattggatgatgaaggcccctgtggtggtgatggggacccaggcctgttccccttccccatgccccggggtgggacccaggcctccagcgaagagagtgaggaggaggggacatctgacgacctccacccaccccctgactgccattatgcaacccggcccccacggccacaggcgttctgcacctttgggagccggctggtgagcccaggatgctatgtgtttagccgccggctggaccggttctgctcagcactcagctccatgctggaacggcacctcagcacacacatgtggaagaagatcccaccggcagctgaacctccagctcaccttgtcaactccccgttatctgctcccctgagcccatcctctacaggcacctgcccccgccttccaggtccaaccctgagacctgcctgcccagcctccatgccccccaccaaggacaaccttgtccccagctaccctgcaggctcccccagcgtggcggctgcctgtagccaggcagagtgcatgggcgggagccaggctatcacctcaccactgcctgccaacacgccatccccgtccttcagcaagctgccgccttccaaggccagcaagtcatccaaaggcaaggacggggtggaggtggaggccccttctcgaaagcggaagttatcccctggccctaccactcttaaacggacctgcatcctggagcccactggaaaagggaaaccctctggctgtaggggcctctcggccaaaactaaaacagccctgagcatggggcttaatgggacaatggggccaagagtgaagcgggcagggcccctggactgtcgtggctcccctcatcagctccccacaccagtcaaggcttctcagctggagaaccggggagcagctggacacccagccaaggccctgccaaccaactgcctctctgaggaggaggtggccaagaagcggaaaaacctggccacttattgccggccagtgaaggccaagcactgtcaggctggtgcccctgctgatgtggcctgctctgtgcgccgcaagaagccaggcccggccctggcctttgaggagaagtgctctacactgaagtcaaaagcccattaacgagaaagtgcctgcccactgcaacggagccgccagcacctcctcccctccagatccgggccccaggctgctgccgctttttataactttatattatttttttttaagaaaaaaagctctttaaaatacctcaagactgtctccctgttctgttgctgctatgaaaatataaaaacagaaacatagaaaaggaaggaaaaaaaataacaaaatgagtgtccttactgtccccagccctaccctgggaggctgagatgataggcagccagactccagctcccatagcttgcctgcaaaagtctcttatgctcattattattattattgtcatcttgtcattttcaatagtgtgaaaaatgtttgtgtcactggggtagtctttccagacaggatgatgaggcgtgtggctctgaatgagtaaggcttcctgagtcttgacaccagagacgactatggtcccattgggaagagaaactcgagagggggagctgcacttctggctctttctaggatccttgccccgagggtctgggaattggcttgtgacccttttctggtccttcagcaaccctaggcatccatccctccctgaattattgcctgcttttcttcagctgttcctgcagcctcattttctcagccacttagggagcttgagctgggttggtcattgctgttgggatattcctgttttctattggacagccttccttccctgcctgtgggtttgcctttaaggaaggggtagaacctttcccagggaggcctccttgggttgaaccaccccttttttggaggcaggaagggaaaaggcatcatcacttgcagaactggtggtgtgggaggccacaggagtgtgggaggccttggtccttcaggatcacctggctcctcagggctgagcagctgctgaggaggcggcagggctgggagtgccctagtttttccatttatctcgctggggaccactcccgtgcagatgcgagaggagacttgcatttccctcctttggtccaccaggttcaaggcactatattttggcgatgtcctttcctattctccttgctcttaggcatggaggaagcttgttccctgaacaagacaaaatgaggtgacaggagacagtgcacagccagggaaatccagtactactagaaatcggctccaaacacttgtttcacagtcttggttcagcgtaccaagtgtgtgatttggggtttcactgaaatcgtttgccacaaaagtaatttccacaggctgcttgggatttaggcccttgtagacagacacacagatacaaatgaaggtgggctgggaactgttcggtccccttctgcctccgggctctcgcgggagcgggcctctccggggcactcgcgtttcccccccagcccccagagggcgctgtgggccactccgccgcactgccggcggcgtccccggggaggagcctctcctgcagccgccaccgcctccgcgatcgcaaacccggaagacgtgttcgggcagctggagtgtacgggcccgcgggccacggccatgcagcccctggaggctcgtggaataggatcagtcccctcctcctccaagtgctttattggcattcacat

SEQ ID NO: 463285 - DNA, 2050 bp, Homo sapiens
cagctcacagacaggctcacaggaatatgtgatgcaagaagggggttgagcgagttgactgggctgaccagagctgggtacagttttaactgtgaagattttctggaggaggcggatctgcagcagattatcccctgaggaggaaggggctgggaggtgaaggggctggggagagaatcccttgggagcagtctctctgtctcttactctgtgagctgtgtcgttccctcctgtccttcccttccctctgtcctcttctgattgccctgcagggtgtctgccctggtgccctgctctttgagctcggcaggttcaaggatgcccctactctgaccccacaacagtcacattcccctggcatcccttttggcccttccaggtcccgggcctcctccgagagtgaattggatgatgaaggcccctgtggtggtgatggggacccaggcctgttccccttccccatgccccggggtgggacccaggcctccagcgaagagagtgaggaggaggggacatctgacgacctccacccaccccctgactgccattatgcaacccggcccccacggccacaggcgttctgcacctttgggagccggctggtgagcccaggatgctatgtgtttagccgccggctggaccggttctgctcagcactcagctccatgctggaacggcacctcagcacacacatgtggaagaagatcccaccggcagctgaacctccagctcaccttgtcaactccccgttatctgctcccctgagcccatcctctacaggcacctgcccccgccttccaggtccaaccctgagacctgcctgcccagcctccatgccccccaccaaggacaaccttgtccccagctaccctgcaggctcccccagcgtggcggctgcctgtagccaggcagagtgcatgggcgggagccaggctatcacctcaccactgcctgccaacacgccatccccgtccttcagcaagctgccgccttccaaggccagcaagtcatccaaaggcaaggacggggtggaggtggaggccccttctcgaaagcggaagttatcccctggccctaccactcttaaacggacctgcatcctggagcccactggaaaagggaaaccctctggctgtaggggcctctcggccaaaactaaaacagccctgagcatggggcttaatgggacaatggggccaagagtgaagcgggcagggcccctggactgtcgtggctcccctcatcagctccccacaccagtcaaggcttctcagctggagaaccggggagcagctggacacccagccaaggccctgccaaccaactgcctctctgaggaggaggtggccaagaagcggaaaaacctggccacttattgccggccagtgaaggccaagcactgtcaggctggtgcccctgctgatgtggcctgctctgtgcgccgcaagaagccaggcccggccctggcctttgaggagaagtgctctacactgaagtcaaaagcccattaacgagaaagtgcctgcccactgcaacggagccgccagcacctcctcccctccagatccgggccccaggctgctgccgctttttataactttatattatttttttttaagaaaaaaagctctttaaaatacaaaaaaaaaaaaaaaaaaaaaaaaaaaaaaaaaaaaacaaaaaaacaaacaagacaaaaaaaaacaaagaagaacaacaaaaaaacagagggggggggcgcgcgcactacaaaacccaccgccggcggggcgcacacataatgacggcgcgccccccccacgttcctctgaaaaaccagggagggccccccataagggacaccctaattaacaacacacgcgacgcggggcggcccgcggctctaaccaaaccgaccagggaagccggggagcaaaaccgcgcgccaccgggcgggcacttctgggaagcaacgaaccccacaaccatcgcgggagcaaaacaaaaaggaggggcacaacacaccccccccaagagataaaacaaccacaagagggagaaaataaacaga

SEQ ID NO: 463286 - DNA, 2615 bp, Homo sapiens
cagctcacagacaggctcacaggaatatgtgatgcaagaagggggttgagcgagttgactgggctgaccagagctgggtacagttttaactgtgaagattttctggaggaggcggatctgcagcagattatcccctgaggaggaaggggctgggaggtgaaggggctggggagagaatcccttgggagcagtctctctgtctcttactctgtgagctgtgtcgttccctcctgtccttcccttccctctgtcctcttctgattgccctgcagggtgtctgccctggtgccctgctctttgagctcggcaggttcaaggatgcccctactctgaccccacaacagtcacattcccctggcatcccttttggcccttccaggtcccgggcctcctccgagagtgaattggatgatgaaggcccctgtggtggtgatggggacccaggcctgttccccttccccatgccccggggtgggacccaggcctccagcgaagagagtgaggaggaggggacatctgacgacctccacccaccccctgactgccattatgcaacccggcccccacggccacaggcgttctgcacctttgggagccggctggtgagcccaggatgctatgtgtttagccgccggctggaccggttctgctcagcactcagctccatgctggaacggcacctcagcacacacatgtggaagaagatcccaccggcagctgaacctccagctcaccttgtcaactccccgttatctgctcccctgagcccatcctctacaggcacctgcccccgccttccaggtccaaccctgagacctgcctgcccagcctccatgccccccaccaaggacaaccttgtccccagctaccctgcaggctcccccagcgtggcggctgcctgtagccaggcagagtgcatgggcgggagccaggctatcacctcaccactgcctgccaacacgccatccccgtccttcagcaagctgccgccttccaaggccagcaagtcatccaaaggcaaggacggggtggaggtggaggccccttctcgaaagcggaagttatccccaggctgctgccgctttttataactttatattatttttttttaagaaaaaaagctctttaaaatacctcaagactgtctccctgttctgttgctgctatgaaaatataaaaacagaaacatagaaaaggaaggaaaaaaaataacaaaatgagtgtccttactgtccccagccctaccctgggaggctgagatgataggcagccagactccagctcccatagcttgcctgcaaaagtctcttatgctcattattattattattgtcatcttgtcattttcaatagtgtgaaaaatgtttgtgtcactggggtagtctttccagacaggatgatgaggcgtgtggctctgaatgagtaaggcttcctgagtcttgacaccagagacgactatggtcccattgggaagagaaactcgagagggggagctgcacttctggctctttctaggatccttgccccgagggtctgggaattggcttgtgacccttttctggtccttcagcaaccctaggcatccatccctccctgaattattgcctgcttttcttcagctgttcctgcagcctcattttctcagccacttagggagcttgagctgggttggtcattgctgttgggatattcctgttttctattggacagccttccttccctgcctgtgggtttgcctttaaggaaggggtagaacctttcccagggaggcctccttgggttgaaccaccccttttttggaggcaggaagggaaaaggcatcatcacttgcagaactggtggtgtgggaggccacaggagtgtgggaggccttggtccttcaggatcacctggctcctcagggctgagcagctgctgaggaggcggcagggctgggagtgccctagtttttccatttatctcgctggggaccactcccgtgcagatgcgagaggagacttgcatttccctcctttggtccaccaggttcaaggcactatattttggcgatgtcctttcctattctccttgctcttaggcatggaggaagcttgttccctgaacaagacaaaatgaggtgacaggagacagtgcacagccagggaaatccagtactactagaaatcggctccaaacacttgtttcacagtcttggttcagcgtaccaagtgtgtgatttggggtttcactgaaatcgtttgccacaaaagtaatttccacaggctgcttgggatttaggcccttgtagacagacacacagatacaaatgaaggtgggctgggaactgttcggtccccttctgcctccgggctctcgcgggagcgggcctctccggggcactcgcgtttcccccccagcccccagagggcgctgtgggccactccgccgcactgccggcggcgtccccggggaggagcctctcctgcagccgccaccgcctccgcgatcgcaaacccggaagacgtgttcgggcagctggagtgtacgggcccgcgggccacggccatgcagcccctggaggctcgtggaataggatcagtcccctcctcctccaagtgctttattggcattcacat

SEQ ID NO: 463287 - DNA, 871 bp, Homo sapiens
tatctgtatgtttgtatccgtatggatgtgggtcctgtttcccactggctgtttctctggagaactctggttcctgccctctgttttgttgtttgtggctctaagtcacggtgtgctccaggtgccagagtcgctgctggccaaggatcccggaagagacacagctcgggatgaatccctggaaccaaaagtctgtccagcccacacctacgtccaggggcagtgtccgcaaagttccagttctgctcggacttcctccgtagcagcatcacacaagtgttcagctcgagatgtgcaccgattcctttccaaccttcgtctccataaaggacgtactgcccagccacctacatcccagtgaatccatctcttctctagtcggtatctgctgggatgcgtctagaacaatctccctgaagacgtcatttcggtatggcctggactcgaagcaggcctgtgagtggggtgcatgctctgctctctgtggctgtgtcaacttcaaacttctttatgtttggacacagaaaaactacatcattagtgaaataaaacaagggacagacagatgcgtctttttctcaggaggtcgtgtttgattgactaaaacagcaaggaaacttttattgggtctggcctcctgtgcattctacacaatgtgggccgtttttgtcacagcccggggtgttcaccatctttatttctacaagagctccctttgtgttctgccctccacttgcctgggtgctcacaggggaggctgagggtgcagcatgggtccttcctgccctgtctctgcattcacactataaaaggcactcacagagccaccaccacagccccaaactgcaatcatgaaataacacctgcactg

SEQ ID NO: 463288 - DNA, 714 bp, Homo sapiens
ttcatgtctttgttgtatttttattgcaaatttactacatgcttatagttaaaaagtaaaataaatgagtatatagcaacaaggaaagaggctggtgattccagccatgccccttgcacttcgctttggggatctggtgatatttcgaatgctcagcactctagtaaggggaggggacatcaaggcagcatcatgctcattgcaacttccttcttcctttttttctcatcggtggtggcagcccccacccacagcagtttctggcagtttcagaggagggtcaaacacatcacggggcgaagtgccttcttctcatattacggatatggctgctactgtgggcttggggataaagggatccccgtggatgacactgacaggacagctgcccccaccctgcaaaaaagcctgggctagcctgctggaggatgagagcccacctggatcagttgtctcagctgatttcagacacgtgagagagagctcagcgagactcagcttgtagctgactacagatgtgtgagggaacctggctgagaccaaaacaactgtccagctgagcccaggctaaactgccaacatgcagaattgtgagctaaataaaggctgctgttctaagtcactgggttttgaaatgatgggcccttgatggtatgcaagccccatttgtttggcattgatgccctgattcttggagagctgagatgggagtgt

SEQ ID NO: 463289 - DNA, 561 bp, Homo sapiens
agctctagctggcaacaaagccaccactttccttgcccctctgcgtcctcagtttttatgatgtcattcttagcttttcttatcaagaggcagaatctgttttccccatcccatgaatctgaactggtcttgtggcttagtttggtcaatagaatgttgtgggagggatggtttaccagttttgagctaggcctcaggaggtctagggcatgtctactctctcttaggacagctgcccccaccctgcaaaaaagcctgggctagcctgctggaggatgagagcccacctggatcagttgtctcagctgatttcagacacgtgagagagagctcagcgagactcagcttgtagctgactacagatgtgtgagggaacctggctgagaccaaaacaactgtccagctgagcccaggctaaactgccaacatgcagaattgtgagctaaataaaggctgctgttctaagtcactgggttttgaaatgatgggcccttgatggtatgcaagccccatttgtttggcattgatgccctgattcttggagagctgagatgggagtgt

SEQ ID NO: 463290 - DNA, 1212 bp, Homo sapiens
atagtagcttcctggattttccttggactcaagaaacacatctccacttcttacaggaaagactttcagcttttccccattcactatgatgttagctgtggcattaaggaagtgtatgctgctgtgggtcgaagagaggaaaatgcagactgtagggtctctgacagaattcctggggagaactgatatgacctccaggagggtaaaaacagtagaaggggaaaagaggccacatacatttcagaaaatgatgtcagatgctgtaggaagtttaaaacatgaagactggaaaacagaaaacttcagctatatgtccccaaatcacagagtctccgtgggagagagactaaaattagacttccttgatctcctattacattctttcataagatcacttgccgatcaaaaaaatacctttattatgcaaacagttgtctaccacaaagactccatctttccaccatcccaagttacctcacatgctcctggtcagacagatcatcctacattcaaatgaatgtagataaaaatgtctctgatatattcttttcttgaattcttgtatttggacaaacaattgtttgaccatgggaagatacactcccaacatgtaggtggcctcaccagaaggtaaaaactgaagaaaaaaatcattcaaactcccatatactagatctttctcatttaatcttgaggtttccatgttgagaggagtgaaaggagatttctgtacccattagccaagattgtctgaaacaaatcccaggaagatgttttgaaagaagaatacataagccttatgactcagttctcagtagcttcttcagtatctttcttttaaaatatcattttaaagtcttgcattatagcactaaaaaagctaaaagaatgctaaaattgcactaaatccaaccacgccagcaagcctgctcaattcatttcttcagacatcactccgaaattgccagagtggtttcccactgacagacttcatcgctgtactgcacatctcttcactacaaatggggagatgagacagagacaaaaagagaaatggatttactgtgctggggaagttaagcacacactgggttggaatttcatttccactgaattagaagctctggctcagcacggatgacacagtgatgctcctttaataacacaaaataaataaaacatggaaaaggttttccagtttgttttggggga

SEQ ID NO: 463291 - DNA, 1522 bp, Homo sapiens
tgcagcagctgcgacacgcagtggcaggcagccagtgtcctggcatgactaccactatgagcccccatgcctgctatggccaagtccacccccagctgagccccagcaccatcagtggggccctcaaccagcccgatgggggtggctacagcagctttggcctagtgcagccccggcctcccctcgagcccagccccactggccgccaccgtggggtacgtgctgtgagcagagctggcctacgccggcacaggccatgccatggctgccatgccgtccagtcaggaaacagcagaggctgtgccaagggagcgatgggcaacatggggtcggtgcctccccagccgcctccgcaggacgcaggtggggccccggaccacagcatgctctactactacggccagatccacatgtacgaacaggatggaggcctggagaacctcgggagctgccaggtcatgcggtcccagccaccacagccacaggcctgtcaggacagcatccagccccagcccttgccctcaccaggggtcaaccaggtgtccagcactgtggactcccagctcctggaggccccccagattgacttcgatgccatcatggatgatggcgatcactcgagtttgttctcgggtgctctgagccccagcctcctccacagcctctcccagaactcctcccgcctcaccaccccccgaaactccttgaccctgccctccatccccgcaggcatcagcaacatggctgtcggggacatgagctccatgctcaccagcctcgccgaggagagcaagttcctgaacatgatgacctagaggcccgagcgcctggtgctgagtgcacccggaggggtcatcgctgcccagagcctggggattccagctgtcttgtctttttccaaaaaagtgttaaataggcttgaggggttgttgcgcaatggccgcttcagatgacagatgttgtaagagaaggtttatgggcatcctctctggtcttttggattattcctcagaacaatgaaaaaagtctccataggacaggaaggaatgcaaaactcatttacacagtgctttccagccttttggtgcttacaggaccgcgctgttccggcttcttcacggctgacattcggctaacgagggattactttggccaaaacctttcaaaggatatgcagaaagatggtagggagcatttgggtttgaatctgaatgctatactggatactctgctccggaaagatgagctttttattctactacttggaaggaaaaggaattcctggtccacctgaattcctctatgaagcctaactcttgaggtctctaacataccttgtcatagaggaaaagcacagattatacctggatgattcaggagcacattctgattccaggtttggtagagctggctcttctactccgtaaagccgagtctgggactggcagcccatccaagtgtatatgaatgaataaagcatccaagtatatatgaatgaataaagtatgtaagtatcaccaga

SEQ ID NO: 463292 - DNA, 1084 bp, Homo sapiens
agataggggcaatatgaggaccaagggaattaatgtagctgcagtcagagcacagtatgctctggggcagggacccccaaccactgggctgtggagtggtaccagtccgtggcctgttgggaactgggctgcacagcaagagactgcaaactctattgtgaactgctcatgtgagggatctaggatgtgcgctccttatgagaatctaatgcctgatgatctgaggtggaacagtgtcatcccgaaaccatccccacacctcatctgtggaaaaattgtcttccacaaaaccaaacatagaattaagctctggttttatgattatgtgtacactaaaaatactcataaagtattttttaatgctttaaagaatttccttcagcactttaacctcaggaaaggtcgggatgagaaggatgccttgtctgttatgctgtattcatgccagagaacaggaactcaagccagccactaaattcaggactgaagcaaaggattaatgcatttttcagactattagcccctagaaagttaatcctactttgaagacctctaatttcccagtcctcagccatagctgattggaccaggaataggtgtctgaatgaataaaccactgactctcagaaatttgaactgaaagagacagagctacttgagctgaagagtcatatggaggctccatggaagtagtggttttcagcaaagcataagataatcaaacatcagatacccttggaggagagaatgacaaatggatagatgtacagagtgaaatgaagtcataagaaagagagatgcagagatggcattatgtgaagacattaaccttggttaccaaattaaatatccaggccctggacagccaactacatttgcctcatcttttttttttttttcattgacaaataaaaaatatgttaggccgggtgcggtggctcacacctgtaatcccagcactttgggaagccaaggagggtggatcgcctgagatgacctctccatctttaagctcactgattctttcttctgcttgattgaatctcctgttaaagttctctatggaaatgtttagttcagtcat

SEQ ID NO: 463293 - DNA, 578 bp, Homo sapiens
cacacagatatttttgttgtagtttcctttaaaggaataagcagctaataaagatgggttctatttatagtagtgaataaatatatttaaacatttaaaatttggtttctaaatttctatgtcttattctaatcactgatttgtaatgttatttattgtttcttttttcctacttaggtgaaatctattcttgaaagaagtaaagaggagctgtcccgaacagtgaagtgtcgtaatgcggccctgaaagagagtcagaagttgaaagaagacctcgaggctgtggaggacagggaaaacaagaaggtgggaaactttcagcgacaattggcagaagctaaagaagacaactgcaaagtcacaatcatgttggagaatgtgctggcttctcacagtaagatgcaaggtgctctggagaaagtacaaatagagcttgggcggagggattcagagattgcaggcctcaagaaagaaaggtacctgtggttttttttccctgtcattggtattgctggattgtactaaggagcagtgtcaagtcaataaatgaagtcactttatgtagcttcctttacaaa

SEQ ID NO: 463294 - DNA, 2652 bp, Homo sapiens
caacttttctggggatcagcttttctttttctcaacaataacttaagaaaccacctaaaaataaaatatactttaattattcccactagcatcctactgtgtctgcttgtctgctttccatgctctttcctgggagtaatgagatccacaagcagaagagtaaccagaaaggatcaaatgtctttgtgttgtttcattttctgttaggtgggaaactttcagcgacaattggcagaagctaaagaagacaactgcaaagtcacaatcatgttggagaatgtgctggcttctcacagtaagatgcaaggtgctctggagaaagtacaaatagagcttgggcggagggattcagagattgcaggcctcaagaaagaaagggatctcaatcaacagagggtgcagaagctggaagctgaagtggaccagtggcaggccaggatgcttgtcatggaggaccagcacaacagtgagattgaatctctacaaaaagctctaggtgtagctagagaagacaacaggaaacttgctatgagtctggaacaagctctccagacaaataatcatctgcaaacaaagctagatcacattcaagagcaattggaaagcaaagaacttgagcgacagaatttggaaaccttcaagtaagagcattatagttgcagtaaaattagggaagcacctctggaggaacatgaggttgcaagtgacagagaagagcttatagcatgataatcacagagtaattgtgtgtgccagcctctacttctttctttatatgatcttatttaatttaattgttatttgtattctatgaagtaagctatacacacactgttcagatgatgaacctgaggcttaaggtagttaattgctccagatcactcagctagtaagtactgaagctgatatttggacagatgcctgactccaaagtcatgctcttaaaatgcaaatgatgaatatacatttgcattctttattccaaaaaagattttgttctttagtgataaaaatcatgaaaaccacttggtctattgctccataaatctgcttaatcagatattattattgcctcactaactctcctttttaaaagaagatccaaagatgataaaatataaggacaaaactaagtaagcttctcttaatggaaagtaaaaatgtttcaattttctcccttgtgttttaagctgaagaaagcccttgatgaagctaacttcagatcagtggaagtgtcccggaccaaccgagagctgcgacagaaacttgcagagctagaaaaaatactagaaagtaacaaggagaaaataaagaatcaaaagacccaaattaagctccacttgtcagctaaggcgaataatgctcagaatatagaaaggatgaaggttgtatgggaaacctcttctcacttcctggataccctgtgaggatgtagtcagtcaatggtgtctagggaagacaggttttagaaccctaccagccccatgtattctctgggaattatagccagttgtctttggggagactttttcagtggagtcactgctgtgtaaatgtttgatttctcatttgctgccagtgtcacattccggctccctatctgtcccttccgtgttgattgtactggactttgctcttttgggatcagtgggctagatgggaaagaaagctcagcaggaactggtaactttgggtctcatattggattctttctgtcatcctataggcaaaaagagcaagccagtttttccactgatcatctttttatgttattttccaattacttttagcaaatagaaaaagaattgaagcaaatggagctaattaaggatcaatatcagaaaaagaactatgaacagtctttgagtatccagagatttgtgtgtgaaatgactaacctgcagaaagagatgcagatgttggctaagagccaatatgatgcctcagtgcggaataaacagcaagagctgcacctagaagcagagcggaaaataaggcaggagctagagaatcggtgccaggaattggaagaaactgtcagacacctgaagaaatgtaaagaggcaacagagaatacgctgaaagaagccagtgtggaatcagaacagataacagctaatctggaagaagctcatcgctggtttaagcacaggtttgatggtctacaacttgaggtgacaaaaaaccggttgcagaggccttctggggaagacaggtggcaggaaaaggtgtgttttctttccaacaggaccaagatgtaaaacatgatgtcatgtccaaccaatctgttctgcatcgatgggagagaaaacagaatcttaggcccatgcccaagaagtatcattctgaggtacagaggaagtgatgtccttgacaagggagcttctttatgtgtagctacactccatgattccaagagcccagcagccggggctggcctgtttctagagtcataagaacatgaagtctttgatgtgggctgaagattttggacctgagtttatcactttatgaactcttatatcagtacaaaactacccctttttttgtcccttttcacattttccacccaataaatttgtgttaatttgttgtatgataggagatggtgttgcataattcttgtctgtttttctaataagtatattttat

SEQ ID NO: 463295 - DNA, 2641 bp, Homo sapiens
  misc_feature (2331)..(2331): n is a, c, g, or t
  misc_feature (2341)..(2341): n is a, c, g, or t
cacacagatatttttgttgtagtttcctttaaaggaataagcagctaataaagatgggttctatttatagtagtgaataaatatatttaaacatttaaaatttggtttctaaatttctatgtcttattctaatcactgatttgtaatgttatttattgtttcttttttcctacttaggtgaaatctattcttgaaagaagtaaagaggagctgtcccgaacagtgaagtgtcgtaatgcggccctgaaagagagtcagaagttgaaagaagacctcgaggctgtggaggacagggaaaacaagaaggtgggaaactttcagcgacaattggcagaagctaaagaagacaactgcaaagtcacaatcatgttggagaatgtgctggcttctcacagtaagatgcaaggtgctctggagaaagtacaaatagagcttgggcggagggattcagagattgcaggcctcaagaaagaaagggatctcaatcaacagagggtgcagaagctggaagctgaagtggaccagtggcaggccaggatgcttgtcatggaggaccagcacaacagtgagattgaatctctacaaaaagctctaggtgtagctagagaagacaacaggaaacttgctatgagtctggaacaagctctccagacaaataatcatctgcaaacaaagctagatcacattcaagagcaattggaaagcaaagaacttgagcgacagaatttggaaaccttcaagtaagagcattatagttgcagtaaaattagggaagcacctctggaggaacatgaggttgcaagtgacagagaagagcttatagcatgataatcacagagtaattgtgtgtgccagcctctacttctttctttatatgatcttatttaatttaattgttatttgtattctatgaagtaagctatacacacactgttcagatgatgaacctgaggcttaaggtagttaattgctccagatcactcagctagtaagtactgaagctgatatttggacagatgcctgactccaaagtcatgctcttaaaatgcaaatgatgaatatacatttgcattctttattccaaaaaagattttgttctttagtgataaaaatcatgaaaaccacttggtctattgctccataaatctgcttaatcagatattattattgcctcactaactctcctttttaaaagaagatccaaagatgataaaatataaggacaaaactaagtaagcttctcttaatggaaagtaaaaatgtttcaattttctcccttgtgttttaagctgaagaaagcccttgatgaagctaacttcagatcagtggaagtgtcccggaccaaccgagagctgcgacagaaacttgcagagctagaaaaaatactagaaagtaacaaggagaaaataaagaatcaaaagacccaaattaagctccacttgtcagctaaggcgaataatgctcagaatatagaaaggatgaaggttgtatgggaaacctcttctcacttcctggataccctgtgaggatgtagtcagtcaatggtgtctagggaagacaggttttagaaccctaccagccccatgtattctctgggaattatagccagttgtctttggggagactttttcagtggagtcactgctgtgtaaatgtttgatttctcatttgctgccagtgtcacattccggctccctatctgtcccttccgtgttgattgtactggactttgctcttttgggatcagtgggctagatgggaaagaaagctcagcaggaactggtaactttgggtctcatattggattctttctgtcatcctataggcaaaaagagcaagccagtttttccactgatcatctttttatgttattttccaattacttttagcaaatagaaaaagaattgaagcaaatggagctaattaaggatcaatatcagaaaaagaactatgaacagtctttgagtatccagagatttgtgtgtgaaatgactaacctgcagaaagagatgcagatgttggctaagagccaatatgatgcctcagtgcggaataaacagcaagagctgcacctagaagcagagcggaaaataaggcaggagctagagaatcggtgccaggaattggaagaaactgtcagacacctgaagaaatgtaaagaggcaacagagaatacgctgaaagaagccagtgtggaatcagaacagataacagctaatctggaagaagctcatcgctggtttaagcacaggtttgatggtctacaacttgaggtgacaaaaaaccggttgcagaggccttctggggaagacaggtggcaggaaaaggacnaagatgtaanacatggatgttgatgtccttgacaagggagcttctttatgtgtagctacactccatgattccaagagcccagcagccggggctggcctgtttctagagtcataagaacatgaagtctttgatgtgggctgaagattttggacctgagtttatcactttatgaactcttatatcagtacaaaactacccctttttttgtcccttttcacattttccacccaataaatttgtgttaatttgttgtatgataggagatggtgttgcataattcttgtctgtttttctaataagtatattttat

SEQ ID NO: 463296 - DNA, 1575 bp, Homo sapiens
agcggccgctcgcgatctagaacctctcctttttaaaagaagatccaaagatgataaaatataaggacaaaactaagtaagcttctcttaatggaaagtaaaaatgtttcaattttctcccttgtgttttaagctgaagaaagcccttgatgaagctaacttcagatcagtggaagtgtcccggaccaaccgagagctgcgacagaaacttgcagagctagaaaaaatactagaaagtaacaaggagaaaataaagaatcaaaagacccaaattaagctccacttgtcagctaaggcgaataatgctcagaatatagaaaggatgaaggttgtatgggaaacctcttctcacttcctggataccctgtgaggatgtagtcagtcaatggtgtctagggaagacaggttttagaaccctaccagccccatgtattctctgggaattatagccagttgtctttggggagactttttcagtggagtcactgctgtgtaaatgtttgatttctcatttgctgccagtgtcacattccggctccctatctgtcccttccgtgttgattgtactggactttgctcttttgggatcagtgggctagatgggaaagaaagctcagcaggaactggtaactttgggtctcatattggattctttctgtcatcctataggcaaaaagagcaagccagtttttccactgatcatctttttatgttattttccaattacttttagcaaatagaaaaagaattgaagcaaatggagctaattaaggatcaatatcagaaaaagaactatgaacagtctttgagtatccagagatttgtgtgtgaaatgactaacctgcagaaagagatgcagatgttggctaagagccaatatgatgcctcagtgcggaataaacagcaagagctgcacctagaagcagagcggaaaataaggcaggagctagagaatcggtgccaggaattggaagaaactgtcagacacctgaagaaatgtaaagaggcaacagagaatacgctgaaagaagccagtgtggaatcagaacagataacagctaatctggaagaagctcatcgctggtttaagcacaggtttgatggtctacaacttgaggtgacaaaaaaccggttgcagaggccttctggggaagacaggtggcaggaaaaggaccaagatgtaaaacatgatgtcatgtccaaccaatctgttctgcatcgatgggagagaaaacagaatcttaggcccatgcccaagaagtatcattctgaggtacagaggaagtgatgtccttgacaagggagcttctttatgtgtagctacactccatgattccaagagcccagcagccggggctggcctgtttctagagtcataagaacatgaagtctttgatgtgggctgaagattttggacctgagtttatcactttatgaactcttatatcagtacaaaactacccctttttttgtcccttttcacattttccacccaataaatttgtgttaatttgttgtatgataggagatggtgttgcataattcttgtctgtttttctaataagtatattttat

SEQ ID NO: 463297 - DNA, 206 bp, Homo sapiens
  misc_feature (34)..(34): n is a, c, g, or t
  misc_feature (44)..(44): n is a, c, g, or t
ccttctggggaagacaggtggcaggaaaaggacnaagatgtaanacatggatgtcttaagcaattttctacttgttgcttctcagatttctaattaccgaagttctctcatcatctcgatactctctcttttaatctttagtttctttagactaatgctaggaaaccaattaatttcttttttttacaaagttccacctgtcacaa

SEQ ID NO: 463298 - DNA, 2542 bp, Homo sapiens
  misc_feature (2232)..(2232): n is a, c, g, or t
  misc_feature (2242)..(2242): n is a, c, g, or t
caacttttctggggatcagcttttctttttctcaacaataacttaagaaaccacctaaaaataaaatatactttaattattcccactagcatcctactgtgtctgcttgtctgctttccatgctctttcctgggagtaatgagatccacaagcagaagagtaaccagaaaggatcaaatgtctttgtgttgtttcattttctgttaggtgggaaactttcagcgacaattggcagaagctaaagaagacaactgcaaagtcacaatcatgttggagaatgtgctggcttctcacagtaagatgcaaggtgctctggagaaagtacaaatagagcttgggcggagggattcagagattgcaggcctcaagaaagaaagggatctcaatcaacagagggtgcagaagctggaagctgaagtggaccagtggcaggccaggatgcttgtcatggaggaccagcacaacagtgagattgaatctctacaaaaagctctaggtgtagctagagaagacaacaggaaacttgctatgagtctggaacaagctctccagacaaataatcatctgcaaacaaagctagatcacattcaagagcaattggaaagcaaagaacttgagcgacagaatttggaaaccttcaagtaagagcattatagttgcagtaaaattagggaagcacctctggaggaacatgaggttgcaagtgacagagaagagcttatagcatgataatcacagagtaattgtgtgtgccagcctctacttctttctttatatgatcttatttaatttaattgttatttgtattctatgaagtaagctatacacacactgttcagatgatgaacctgaggcttaaggtagttaattgctccagatcactcagctagtaagtactgaagctgatatttggacagatgcctgactccaaagtcatgctcttaaaatgcaaatgatgaatatacatttgcattctttattccaaaaaagattttgttctttagtgataaaaatcatgaaaaccacttggtctattgctccataaatctgcttaatcagatattattattgcctcactaactctcctttttaaaagaagatccaaagatgataaaatataaggacaaaactaagtaagcttctcttaatggaaagtaaaaatgtttcaattttctcccttgtgttttaagctgaagaaagcccttgatgaagctaacttcagatcagtggaagtgtcccggaccaaccgagagctgcgacagaaacttgcagagctagaaaaaatactagaaagtaacaaggagaaaataaagaatcaaaagacccaaattaagctccacttgtcagctaaggcgaataatgctcagaatatagaaaggatgaaggttgtatgggaaacctcttctcacttcctggataccctgtgaggatgtagtcagtcaatggtgtctagggaagacaggttttagaaccctaccagccccatgtattctctgggaattatagccagttgtctttggggagactttttcagtggagtcactgctgtgtaaatgtttgatttctcatttgctgccagtgtcacattccggctccctatctgtcccttccgtgttgattgtactggactttgctcttttgggatcagtgggctagatgggaaagaaagctcagcaggaactggtaactttgggtctcatattggattctttctgtcatcctataggcaaaaagagcaagccagtttttccactgatcatctttttatgttattttccaattacttttagcaaatagaaaaagaattgaagcaaatggagctaattaaggatcaatatcagaaaaagaactatgaacagtctttgagtatccagagatttgtgtgtgaaatgactaacctgcagaaagagatgcagatgttggctaagagccaatatgatgcctcagtgcggaataaacagcaagagctgcacctagaagcagagcggaaaataaggcaggagctagagaatcggtgccaggaattggaagaaactgtcagacacctgaagaaatgtaaagaggcaacagagaatacgctgaaagaagccagtgtggaatcagaacagataacagctaatctggaagaagctcatcgctggtttaagcacaggtttgatggtctacaacttgaggtgacaaaaaaccggttgcagaggccttctggggaagacaggtggcaggaaaaggacnaagatgtaanacatggatgttgatgtccttgacaagggagcttctttatgtgtagctacactccatgattccaagagcccagcagccggggctggcctgtttctagagtcataagaacatgaagtctttgatgtgggctgaagattttggacctgagtttatcactttatgaactcttatatcagtacaaaactacccctttttttgtcccttttcacattttccacccaataaatttgtgttaatttgttgtatgataggagatggtgttgcataattcttgtctgtttttctaataagtatattttat

SEQ ID NO: 463299 - DNA, 2632 bp, Homo sapiens
caacttttctggggatcagcttttctttttctcaacaataacttaagaaaccacctaaaaataaaatatactttaattattcccactagcatcctactgtgtctgcttgtctgctttccatgctctttcctgggagtaatgagatccacaagcagaagagtaaccagaaaggatcaaatgtctttgtgttgtttcattttctgttaggtgggaaactttcagcgacaattggcagaagctaaagaagacaactgcaaagtcacaatcatgttggagaatgtgctggcttctcacagtaagatgcaaggtgctctggagaaagtacaaatagagcttgggcggagggattcagagattgcaggcctcaagaaagaaagggatctcaatcaacagagggtgcagaagctggaagctgaagtggaccagtggcaggccaggatgcttgtcatggaggaccagcacaacagtgagattgaatctctacaaaaagctctaggtgtagctagagaagacaacaggaaacttgctatgagtctggaacaagctctccagacaaataatcatctgcaaacaaagctagatcacattcaagagcaattggaaagcaaagaacttgagcgacagaatttggaaaccttcaagtaagagcattatagttgcagtaaaattagggaagcacctctggaggaacatgaggttgcaagtgacagagaagagcttatagcatgataatcacagagtaattgtgtgtgccagcctctacttctttctttatatgatcttatttaatttaattgttatttgtattctatgaagtaagctatacacacactgttcagatgatgaacctgaggcttaaggtagttaattgctccagatcactcagctagtaagtactgaagctgatatttggacagatgcctgactccaaagtcatgctcttaaaatgcaaatgatgaatatacatttgcattctttattccaaaaaagattttgttctttagtgataaaaatcatgaaaaccacttggtctattgctccataaatctgcttaatcagatattattattgcctcactaactctcctttttaaaagaagatccaaagatgataaaatataaggacaaaactaagtaagcttctcttaatggaaagtaaaaatgtttcaattttctcccttgtgttttaagctgaagaaagcccttgatgaagctaacttcagatcagtggaagtgtcccggaccaaccgagagctgcgacagaaacttgcagagctagaaaaaatactagaaagtaacaaggagaaaataaagaatcaaaagacccaaattaagctccacttgtcagctaaggcgaataatgctcagaatatagaaaggatgaaggttgtatgggaaacctcttctcacttcctggataccctgtgaggatgtagtcagtcaatggtgtctagggaagacaggttttagaaccctaccagccccatgtattctctgggaattatagccagttgtctttggggagactttttcagtggagtcactgctgtgtaaatgtttgatttctcatttgctgccagtgtcacattccggctccctatctgtcccttccgtgttgattgtactggactttgctcttttgggatcagtgggctagatgggaaagaaagctcagcaggaactggtaactttgggtctcatattggattctttctgtcatcctataggcaaaaagagcaagccagtttttccactgatcatctttttatgttattttccaattacttttagcaaatagaaaaagaattgaagcaaatggagctaattaaggatcaatatcagaaaaagaactatgaacagtctttgagtatccagagatttgtgtgtgaaatgactaacctgcagaaagagatgcagatgttggctaagagccaatatgatgcctcagtgcggaataaacagcaagagctgcacctagaagcagagcggaaaataaggcaggagctagagaatcggtgccaggaattggaagaaactgtcagacacctgaagaaatgtaaagaggcaacagagaatacgctgaaagaagccagtgtggaatcagaacagataacagctaatctggaagaagctcatcgctggtttaagcacaggtttgatggtctacaacttgaggtgacaaaaaaccggttgcagaggccttctggggaagacaggtggcaggaaaaggaccaagatgtaaaacatgatgtcatgtccaaccaatctgttctgcatcgatgggagagaaaacagaatcttaggcccatgcccaagaagtatcattctgaggtacagaggaagtgatgtccttgacaagggagcttctttatgtgtagctacactccatgattccaagagcccagcagccggggctggcctgtttctagagtcataagaacatgaagtctttgatgtgggctgaagattttggacctgagtttatcactttatgaactcttatatcagtacaaaactacccctttttttgtcccttttcacattttccacccaataaatttgtgttaatttgttgtatgataggagatggtgttgcataattcttgtctgtttttctaataagtatattttat

SEQ ID NO: 463300 - DNA, 259 bp, Homo sapiens
tagaacaaataaaaattcttcccttcactcagggttcttgtaaaagaaacgcagaaggagaattgaaacagacagaagaggagaagacacagaagagaagacaaggtgaagacggaggcagagatgggagtgatgtggccacacgccaagaaatcccaagaatgccatgaaccgtcagatgctggaagagctcctggcgcccagcatgctactttctgtctctatgaatttgaacacactaagtacttcatataaatga

SEQ ID NO: 463301 - DNA, 504 bp, Homo sapiens
tgctgagagggcaggggcttgaatgctgctgtggggctcacacagagcctacttctgccagagaggagtgaccagccagttccagcaggcctttccctccagttcccatgcttgcttgcttgcccacattgtttcaggagcagtggccagcgacaggctgagtgaaaagagccacttcagctcctgcccacaaagggtgtcaagggaaaaatcttgtttgaaaagtaaggcggaaaacaacagtctcttcctggtgtgtcctaaatccaatgacaagggttcttgtaaaagaaacgcagaaggagaattgaaacagacagaagaggagaagacacagaagagaagacaaggtgaagacggaggcagagatgggagtgatgtggccacacgccaagaaatcccaagaatgccatgaaccgtcagatgctggaagagctcctggcgcccagcatgctactttctgtctctatgaatttgaacacactaagtacttcatataaatga

SEQ ID NO: 463302 - DNA, 1525 bp, Homo sapiens
tgttgatcagaaccttcctagggtctccttatgctctaaatagtttggtgtgccagaatatggccctagctagaagtttcctaaagcctgaattgcagaggttttgtgttagtcatcttaaggaggctacctgtggtccccaagtcatgcccaatggagagatctggcaactgtccatttcctgcctcttcatctcccttgcagacaccactcagtcaaccttgtattcatttggctatttggtccagcagcctgaggctggaagataaatggaagccatgggtttctacctaggaagaacttgattaaaggggatcctcactctcccccactcccgcacttaatgtctgcacctgcggggagtcacggttagttctcgactttggccagttgaggccttctgactctcaaagaggcttcactctctctcagctctttgctattttcgccttcgggtcctgtggctcctacagcggggagacaggagcaatggttcgctgcaacaacgaagccaaggacgtgagctccatcatcgttgcatttggctatcccttcaggttgcaccggatccaatatgagatgcccctctgcgatgaagagtccagctccaagaccatgcacctcatgggggacttctctgcacccgccgagttcttcgtgacccttggcatcttttccttcttctataccatggctgccctagttatctacctgcgcttccacaacctctacacagagaacaaacgcttcccgctggtggacttctgtgtgactgtctccttcaccttcttctggctggtagctgcagctgcctggggcaagggcctgaccgatgtcaagggggccacacgaccatccagcttgacagcagccatgtcagtgtgccatggagaggaagcagtgtgcagtgccggggccacgccctctatgggcctggccaacatctccgtgctctttggctttatcaacttcttcctgtgggccgggaactgttggtttgtgttcaaggagaccccgtggcatggacagggccagggccaggaccaggaccaggaccaggaccagggccagggtcccagccaggagagtgcagctgagcagggagcagtggagaagcagcatcagctgttggaaacctgggcagccctctcagtggcttcctatcctccttcttgctggagccatgaatggcaggagctcagtgcttcttgtgcagtgcctggacccaggtatcttacttggggtcttacttgtacccttacagtctctgagaaccagcctctgctgcagtctctatcccctctcaagtccagggcaggccgatgctattggtgcttcttcactttgagacccagttccatatttgtctttagtgtatatcctcttcctgatacctccttcagtccctctctgggccccaaggctgagaatcagtgttaactgggagagccttgatttaggctacggcctcactctctatggccaccctaagaggaaaggctacttcacctcattacctccagag

SEQ ID NO: 463303 - DNA, 1440 bp, Homo sapiens
ggcggccgcagcctctgagagcacgaacagcagcgcccccgcgtcccagccagccagccagccagactggactccggcccaccgacggccgctcgcgctccggccccgctcgcctgctctgccccggacctgcagctccccgctcccccgccgtgtccgccgcctcccggccagagagccaagcccccacgccgcgcccagcgctcgccgcgccagcatgtcctcgaccgagagcgcccggccgcacggcggacaagtcgccgcgccagcaggtggaccgcctactcgtggggctgcgctggcggcggctggaggagccgctgggcttcatcaaagttctccagtggctctttgctattttcgccttcgggtcctgtggctcctacagcggggagacaggagcaatggttcgctgcaacaacgaagccaaggacgtgagctccatcatcgttgcatttggctatcccttcaggttgcaccggatccaatatgagatgcccctctgcgatgaagagtccagctccaagaccatgcacctcatgggggacttctctgcacccgccgagttcttcgtgacccttggcatcttttccttcttctataccatggctgccctagttatctacctgcgcttccacaacctctacacagagaacaaacgcttcccgctggtggacttctgtgtgactgtctccttcaccttcttctggctggtagctgcagctgcctggggcaagggcctgaccgatgtcaagggggccacacgaccatccagcttgacagcagccatgtcagtgtgccatggagaggaagcagtgtgcagtgccggggccacgccctctatgggcctggccaacatctccgtgctctttggctttatcaacttcttcctgtgggccgggaactgttggtttgtgttcaaggagaccccgtggcatggacagggccagggccaggaccaggaccaggaccaggaccagggccagggtcccagccaggagagtgcagctgagcagggagcagtggagaagcagcatcagctgttggaaacctgggcagccctctcagtggcttcctatcctccttcttgctggagccatgaatggcaggagctcagtgcttcttgtgcagtgcctggacccaggtatcttacttggggtcttacttgtacccttacagtctctgagaaccagcctctgctgcagtctctatcccctctcaagtccagggcaggccgatgctattggtgcttcttcactttgagacccagttccatatttgtctttagtgtatatcctcttcctgatacctccttcagtccctctctgggccccaaggctgagaatcagtgttaactgggagagccttgatttaggctacggcctcactctctatggccaccctaagaggaaaggctacttcacctcattacctccagag

SEQ ID NO: 463304 - DNA, 862 bp, Homo sapiens
tccttgtttgtctatcccactgcattgagggtaaccaatgaatgagaattcctttttctctccacatccttaccaacatttgtgttttcaatgttctggatttgggccattctgatagaataccagtgaagaaaccaatccttcctcttcatatcccagtgtcaggtcaaaggggggaaggaagctatggacctgtgaatgtaaggagtcagattctaaagcccccaatacaagtgggaataggccacacctctctaactctgatttcatttgttcctcttactttttctcaaggggcaggaataccttccaagcaggtccaagttcaaccactagacctgtacttcgcaagccttcagaggattcctgctttcagcccgcaagctttttcagctgaagcccccagtatcatggaacagaatcagattatttccactgagtccttttcaatttcttaacccacaggatttatgagcattatgaagtcattatggctttctgccactaggctgagagtggaccacatatacagaaataaaaaactattaatagaaaaatatattgcaaacatctaatcctcaaaccccattcaagttttgccaactaccctccatcctatcaaatattccttataccaaaaagatccagttcaaaaataagtgttgcatttattttttaacctcttttgatctggaatagctcctcacaccgtctttcatgactttagtgctttggaagactacagatgtttaggctcatctgaaatttccctgccgtcacctgggaatcaaccatttcttcagggagtcctagtttcttttagcggtcacatgtttttgttatgtctatggagacttctatt

SEQ ID NO: 463305 - DNA, 500 bp, Homo sapiens
ggttcctaggtgacctctctctgacttcatgggccatggaacaggctgtctctgtggtaatctcaacaatgctcaaggcagtcagtgcctggcaactttggacttaagagtatccgttctagaggctggaagtccaagatcaaagtgccagcaacaggccttgggagggcctgcctcctggttcatagatggccatcgtctccctatgtcttcacacggtggaaggggcaaggaaggcttccccacacacctgccctttactctgcggagcccagcttcctactgcagtaaactctcacatggccaagaagtttctcagagctctcccagagccagcataggggctgcttacaaaaagcccttggaagctgcttcactgtggaatccactcccgctccttgctactgcctacaggacaagcagccctccttttttgtcctgccactgtctggctgccccctaaccctctactaattaaagccaccatttgctatttgttt

SEQ ID NO: 463306 - DNA, 1035 bp, Homo sapiens
ggccaccagctccctgttgacatgtgcttcccccgccccccaccccgtgtcctgcgcaagtaccagaacaaacaggacagcacaggtggctcatggtccttggatggagtttctgttttcctggccagctcccagaggccttgctgcctgcgagaagtcactgacagagctcccccagcccctgcccccatgcttggccatggatcctaccagcaaggaggcttcactgtgagggaaaccagagccgggcatgctgctgcagctccagccagccgggcccgtgcctctgccagggaatgtgcttgtctgtatccctgcagccgtgttgaacgcagtccaatggcagactccccttgcctctgcggtgcttggcatgtggatgatttccaggtgaatatgcagcagaggcagccccgtgcctggtgcagggtggaggcatcccaggccgggctttgccaacatctgtggcagccacttcaaagagttccagctgctgctgaagacgacttggcaaaggacatgggctttacagtggacatcattgtccagtgtgggaagcctggccccactcagaccctgctcaccctgctaccgacccagctgccatcttcctcagactccagcaggccctccactcctagcacacaggccggattgaatcttcaggaaagaagagcacacccagggtgggacctgaccttcccaaggtcacacaactgcggagcagcagatctgggtcctggatccccaaactctgatgagatgcaggccgcttcttgcccacacagcagcgtgagctgctgtcctgcggtttgaaggaccatctaggtggcctcgcagactgacctccaggaagaccagatggcatcctgctccacacgtttactcttggtgactttggatcacttggttaatttctttaggctttatttcccttatctgtgcaatgagattggtgatgttgtgtttaatggagatggtgatgataacagtagtaaaacacattaaagagcctggccacgataaatggtcatc

SEQ ID NO: 463307 - DNA, 2465 bp, Homo sapiens
atgtatctcccagaactattttgggaacccaacaggatctcaccatgaagtgtaacgaggaggaaaaatctcttagctctgaggccttttccaaggtttcactgaccaatctgcgtagatctgcagtcccagatctttcttcagacctgggcatgaatatttttaaaaagttcaagagccgcaaagaagaccgagagaggaaaggctccattccattccaccacacaggcaagaggaggccacggagaatgggagtgcccttcctgcttcacgaggaccacctggatgtgtcccccacgcgcagcacattctcctttggaagtttctctgggctgggagaagacaggcgaggaattgagaaaggaggctggcaaaccaccattttagggaaattgacccggcgaggcagttcagatgcagccactgagatggagagtctgagcgccaggcattcccactcccatcacaccctggtaagcgacctgccggacccctccaacagccatggagaaaacaccgtcaaggaagtgcgatctcagatctccaccatcacagttgcgaccttcaataccactttggcgtcattcaacgtaggctatgcagactttttcaatgagcatatgaggaaactctgcaaccaggtgcctatcccggagatgccacatgaacctctggcatgtgctaacctacctcgaagcctcacagactcctgcataaactacagctacctagaggacacagaacatattgacgggaccaataactttgtccacaagaatggaatgcttgatctttctgtagttctgaaggctgtttatcttgtccttaatcatgacatcagctctcgtatctgtgacgtggcgctaaacattgtggaatgcttgcttcaacttggtgtggtgccctgtgtagaaaagaatagaaagaagagtgaaaacaaggaaaatgagaccttggaaaagaggccaagtgagggagctttccaattcaaaggagtatctggaagttccacctgtggattcggaggccctgctgttagtggagctggagatggtggaggagaagaaggaggaggtggagatggaggaggtggaggaggtgatggaggaggaggtggaggaggtggaggcggcccttatgagaagaatgataagaaccaagagaaggatgaaagtacacctgtaagcaaccataggcttgctctaacaatgctcatcaaaatagtgaagtctttgggatgtgcctatggttgtggtgaaggacaccgagggctctctggagatcgtctgagacaccaggcccagaactgcctcactaagctatacaagctagataagatgcagttccgacaaaccatgagggactatgtgaacaaggactctctcaataatgtagtggacttcttgcatgctttgctaggattttgtatggagccggtcactgacaacaaggctgggtttggaaataacttcaccacagtggacaacaaatccacagcccaaaatgtggaaggcattatcgtcagcgccatgtttaaatccctcatcacacgctgcgcttcaaccacacatgaattgcacagccctgagaatctgctggtccagtttatcaaagaggctcatgggaatgtcttcaggagagtggccctcagcgctctgcttgacagtgccgagaagttagcaccagggaaaaaggtggaggagaatgaacaggaatctaagcctgcaggcagtaaaagcgatgaacaaatgcaaggagccaacttggggcggaaagatttctggcgtaagatgttcaagtcccagagtgcagcaagtgacaccagcagccagtctgaacaggacacttcagaatgcacgactgcccactcagggaccacctctgaccgacgtgcccgctcacgatcccgcagaatttccctccgaaagaagcttaaactccccataggcctggcagatggtgtggaggacctcctggacattagctctgtggaccgactctctttcatcaggcaaagctccaaggtcaaattcactagtgctgtgaagctttctgaaggtgggccaggaagtggcatggaaaatggaagagatgaagaggagaatttcttcaagcgtcttggttgccacagttttgatgatcatctctctcccaaccaagatggtggaaaaagcaaaaacgtggtgaatcttggagcaatccgacaaggcatgaaacgcttccaatttctgttaaactgctgtgagccagggacaattcctgatgcctccatcctagcagctgccttggatctactcagtgtggttttctattacccatcttctgaagcctacttctgtcaatttgtccatgtgatctcggtccagttctgtgcccttgatggagagacgctgcgatcatttggagaagaggcaccctgacatttcgggtcttcagcattttttcgttgattctttctcatcttc

SEQ ID NO: 463308 - DNA, 1882 bp, Homo sapiens
gaaaggcacaacctttcatagagaccaccagtctgtgtagcgagggcaccagtctgtgtagcgagggctacacagatggcgaggggggggccctacactgaaactgagtcccagccccaggaagggagaaggaggacggaccagctggcagcctgggagaggtcacaggtcagtggccggaccccagtcgtagccatcttcatcggggactccgcatcgcggactcgtgtaaactttttcttcagggcttccggttcacagggctggagccgggagctcatcatccgcatccgtgtagggccccccgctagccgtctgtgtagcgctcgccatcagtgtacgcgccgccctcgccttccgtctcctccagtagtcgctgttaacacggctgtcgcagctgaggtcagcagagctgtcggccaggccgcggtgagggttgtcctccaaggagccatccagcttatcttccgccgtccagatgggccgcgtctgctgctctcgaatgatagccttgaactcctggtaccaggtgtcactcgtgccattcagagggatggtggctgtgaagaggtggctgctctgcttccgcagcttctgggcttgtgcgtagaggcggcgggtactgcggcaggaggcaggcgccagccaacttagctccttctaaattgtcctcatacatccagtgattttcagatcattttcattcaaagactgattgagaaaatctcagaagattaaagagaataaaggatctgacttgaaatatttgtgattttgttttattttggtttggttattttctaaatataaaatgaaatatttaaaggttcacataatagaagtatgaattatgtctattttctccctttataatatagaaaatattttccaaacactgaatatgtttgaatttcagagctactaagaaataaagtccaataagcatatgtaaattatgcagattttaacatcaataaagcaaattgaaacaaaatcttgctcagcagaattattaatgtaaagaagggagtaactacttgcacaaactgatttaactgtgtggcacacatttcctgtaaggccaattggacagtctcccaaaggctttacaaagggttacagaaaagatgttcctaaaacagtgcatatcacaaagttgattataaaaatccagatttagaaactaccaaagttgccaaaagtaatagtatcggttaaatacgtgatggaaaatagaatataattaccattttaaaaaaacagtggaaaaaaattattactataaaaatttgctatatgatcccattttcaaactagacatgtaaagcttagattaggttacagagggatgagaagggatctaaaatgagaaatagttgcaacctgagagttactttttgttcctcaattctattttactagctgaatatattgtttacaaaataataaagttagaccctagtgcctcatctattgtctggtgttaaggtagcagccctagaagaggagctcctattaaatataggtgtcatttttgttctgtatgcacttctttctattccatacaatttcctgagggatgtgaaaataaacatacttaagagatttcacaagaacagtactactttaaggtgatatgctgtaatttgaccccacctgctaacatttttcctccaaaagatatcagaacttttcttattgtgtcactgagacttatatttatatattgagcttttaatctataattgtgactgtgtccagagcatacatacaatacatagtataaatgtatttaagcggaacactaatcaatttttgttaattataacatttgaacttcactgaagctttataccacatattacagaaataaaactagaag

SEQ ID NO: 463309 - DNA, 831 bp, Homo sapiens
tatacataaataacccattatatattatgaaacagaaagttcttcagcaggctagtagcgcaaagcctaatcaacacttctgtgaggaagttagcagccttccttctgacctgactgcttccgcttctggtggtggcagcgctgtcaagcctcattactggaaagttcatcttgttaaatttccacttagagcaggggatgtgttagaagatagctcagactctgtggccattatgacatcaaactcagacagtgacattccaagtggtagtcaaggagttttgtttctagcttcattgaaaaatgtgaacattggctgggcacggtggctcacacctgtaatcccagcactttgggaggccgaggtggctggatcatttgaggtcaggagtttgagaccagcctggccaacatggtttcatggcatgatatggctcaatccacagacaaaggctgctgagcccagaacagcttattggacgagcccctatgagaagcagaaatgtatagaagcaaactgaacccaaggaaagattggtgatactttgggagggatgacagaggaaggggaaacacactgtccatccctgtcccagcaaggagccagctcccattcggcagtccctctgaacatctaggtagcttcccccttctttctgtccagttgtgagcagccaccaactatgatgcccctcttccagcaggctttgctttcacatcacaaagcatcatcctgagaaacaattacagttctttttagagttctggttccttcataggtacctattgtcctaataaatggaattccttggaacacaaaagcatttattt

SEQ ID NO: 463310 - DNA, 3130 bp, Homo sapiens
ctgctggcatacactgctaaaggagatttactttttttttttttttttttttgagacagggcctcactctataagtatggagggtgttttggtgccagtgcacattcatgatctccaatcccaactcaccctcaggaaagcttctcaagatgtctgtggctccagcagcccagaagaggaggaaataaatgcctctggggcagctgtgataggcttgaaagagcaactgacacttggagctgaattttcatttcactgtgttgaatatttgaatgcttctcccttggaaaaacagggagaaagtggccagcccctccaaatttacaagagggaaaaaccaaacaactccattaaaaagtgggcaaaggacacgaacagatacttttcaaaagaaggtatagatgtggacaacaatcatatgaaggaaagctcaacatcattgattattggagaagttcaagtaaaaaccacagcgaagaagaggaggaaataaatgcctctggggcagctgtgtactactatcttcatttcaagtatccttgaaaagactttctccattgaattgcctttgtacctttgtcaaaaatcaactgaccagccttatagcacgttaagaagtaacttatatgatgttattaacacaaaggatgggggaaggaatgaagctatattggagtaaacaatgacaccagacagttatgtgaagaaatgaagaataccaggaatattaaatatgtgaatgtaaaagaccctaatatattttcctttctcctcttaactttataaaaagaaaattatttaaagtaataattacaacactatattactgggtttaaatatataaacatatatgacaataatagcataaaggtggaggaaaggaataaagctctattggagcaatttctatattttttagaatcaagttagtattaagctgagagaaattgtgataaactaagacgcaatagtaatctctagagtcatcactacgaaactcaagaaactatagtaaaaaaaaatacattaattaaaatggtgtactagaaaatacctatttaatagaaaagaaggtgataaaggagggtgagaggaagtaaaaagacatgtgatatatagaaaacaaatagctaaatggcaggcatgaatccaaccataccaatgttaattttaaatttgaataaacactcaaaagggcagagattgtcagattggatataaaaacaagatccaactatatgctatctacaaaagatacacttcagattcagagacaacaattttggaaaactgtcaactatttctataccattctctttcctttccttctgtgattccaattatgtgtaatgttgaacttatttgatactataccagaagactctgatgttattttttaaaattattttttctctttttacttcagtttggtttcttgtgacctgttttcaagttttctagtgctttcttctgtcacatctcatctaattgagtgaccgcaactcctaagtatattgtgactttattttcaggataagggagatcttgaaggcatctcgaaagttgcaaggtgatccagatttgccgatgtcttttactttggccatagtggagtctgattctacaatagtctattataaacttactgatggatttatgctgccagaccctcagaatatttctcttagaagatgacatccatgtttcctgatgcttgttttattcatacaagattggatttgagacccatcagactgcttcatcttttatctcagaaatagggttgacgtacatagtgagggttgacttccccattccataaggttttcattctgaagagtaaaacttccccaggtagaagactttctccttcttaaaaaatatagggtgatttctttaaaactttgttatctagagacagtttaattacagttatatacaggtttatgcctaggatgtattcagatgggtgggacctgtgtgctgcttttgtcatcccacactcaaagttgtctctttgtttcttgctgccactgccagctcattgttgagactgccatttctttctcttactcagctctccccagtgccttttggccactgcagctaccgtagaatggcattttatatgtaccttgtcacccacttctgtttactttttcctctccagtaaaaagtaaaagatttctttcaattggtcttcccattgcagttactgttatttctcttttttggttaactttaaatcaaaactcaaaatatgttcatccagagtgtgtcttaagtaacttacgtgtcttaagtaacagggaccagagacatgttacctacaagagttctgggctatccttttcattcttatcacatatcatagcttgaatattacaacagtgtgggagagaatcaaccgtaaaaatgtcttcattaattagacccagttattccacttttgttaatgtctctcaaattgtacaaagtataaaaaattatatgcacaaagatgttccaagtgacattacttttagtagcccaaattataaaccactttaaagtttggggtaaagattggcaaactttttctataaagggccagaaagtaactattttaggtttttaaacctactgtctctgtcataacttgtcaacactgctgtatgaagcacaaaagcagccatagacaatacataaacaatacgggcgtggctttgttccagtaaaactttgtttacaaatgtggtgccatagtttgtcatccctgggtctaggaaatagtcaataaacagatatatacaaatgatacataatgtacttattaaaaattagtaatgaatattattaaaaacatgaaaatattaccttaagtaaaaattgcaagacggaaaagtgtataagtgggtgtaatcatggctgaaataacagaccaagcatatgataaaaagataacaaagtaaatcaaattactaactggttatagtgggataggaggcagaaaatggatgactttgtcttttctcaatgtttttatttgtattttataataaaaatgttttaaaattaaaaggtgtcttgaaatctgtattagttatctatcattgcaaaataatattaccacaaatgtagcaacttaaaa

SEQ ID NO: 463311 - DNA, 3016 bp, Homo sapiens
ttgctggatttcccgcgccttctatccctgcagattgagctctggccttcaccccgggcctcttaacttcaggtccgcccaagtgccctcctctcagcaggcggaggctcacagctctgtcgggagtagggagggctgaccgcattgtggtgcaaagtgacaagtcgagtgttgacttggggactgcgatgaccggccaccaggaagggaaccaggtatgctctggggtcccgggcggcgccctggcagcggacgttcccgcaggtagtgcgcgacttttgccccaggaagaagtcgctgctgcctgcagggtggccttggagaggctcgggcctccattgagactgctcacttccttttctccgggaccacggctcttcagctttttccgccctaggctcccgcgcctcctcagttccccatgggagagttatttgaaggctccccggagatgggatttggcccaccaatcctagcaagtcaaggcccgcccggctaggcgcagagaggcggcctccctcccgctaccccgggtggggtagggaccccctttccccagagaccctctagcacctgagtgttgatgatcattactttaaattaaaagtctcttttctcctttccgtctaagcctcaacttagtttcagagaatgaagcgtgaaagctcttttatggagattaccgatgcttcatttattcccgcgaatggcaaacacagcccgggaaaaaccgagcgagcgagctccttgtctcggatcctcggccgtctccgtgttcacaagctcacttggctgtgagacgccgtcggggaaagcccctgcgtggcttccctggggaagggaattgcgcgttcgctagtgccgcagtccgcgagcatccctgggcgagacagcggtgcttttgatgtgcctgcgtttttgatggccgcattctcttgaaatgtggttgtgcggagcagtcccagatacctttcagaagtgtggccttgggtttggaatggagcatgtaaggacaggatacagagtgacttgctgccttctgggtgtcatataaagtggatgaagccagaggggcaccctgctgaaatgactccccggtctatttttggtgtagctctaccatggaaccatccgttttcacttttccatggcccctgccagctctcgcaaatttgcacacatgtttacacagttgtaaacctcaggactggccctgagggctcctggctgctgaagcacagcagagctacccctggagccttgaaaaatccaaattccagatccaaatttgagtttggctcggcctgccgaactcaaatctccaaagaggcagccctggcacagatttcacaaggatcaggcaataatgaatcgattaataaagacagcagtcatttatcaagcctttattatgggcaggcctacacctgcattgttacaaagcaggtggacggttgtggggttatccagaaaaatgtcattttaacccactgtgaaagacagagggcttctaaatttggcccaagtcatccagtctgggccgtgtggccacaatgatgattttcactcagccaattcaaaatactcctcttctcaagctcagacccactttggggctcccaaggtaaaaatcaaaaaaactggctctaagacaatgggaccccgagcggtgtggaattctaagcccaggcttgccttaaagctacaatatggatttaatttatatgcaaatgcaagcaataaaaaggcagacactgtagaaattatagggtccccccctccttttcttaggagatgctcaaccctttctctcctcttccaactaagacctaattattattggttcctgccacctcccccctctccctcctgcccactctggcccgctgggctctcctgttgaccagtagaacgcaaaactgatcaaagccagccggaagccttaagtaggccaaaatgggggctaaattatgctaatagaggagctaaatatactttaatcctgttataatacaagtgcagagaaggtacctttgcaggagaaagagaacccacaggctgcaacggaagagactctagaatttaattccggctctaccgcttactggcattgtgtttgggggcaaattcttaactttttcacacagtcgtaaggatcagatgggatgatacctgggaagttcttgacatggcactcatgtcagccagggaagtacctactgagagtaacctcttactactattggacttagtcctagtaagaccattgttacttttatattagcagatgaaaagtccctttttatagttttaatacttattgatttcagcaagaaataaaatgcaactatctgtctgaagccagttctgagggatcctactcccccatcattttttcctgccaaaggcaagggcattggcattgtaaaacctggcttcagtattgatgctaagtttcccagtcctgaaggcaatctaagcctctcacattctcctcatctctggttctgcttttcctttaaaatatcttcctcaagctctggggcaagaccttcctaactctaaggggaaaataaaaaactgtaaatgtcccattgaccaccgatactttctatttctcacttgagtggaaagcctccccaccaaagagtcttgaggactgagtcatcttttttgttctttgcgacaagtcataaaatggttttaattatatggtgtttttccaagtaaacaaccagactgaaagagaaaatatttaatttttgttgaattaagttgggaacaatctcagcaccatgactgccgacgaggccggcaaatggggcttctgatactgtccttgttgtggtgcatgttttcccttagcggtagcaacaaggaaataggaaccaggccagagagatgcaagaaaaacgtaaaacgcaacttcaatacgggattccagattccaactgaaacccaggagttattttggtaacagttttgccaggggaaaaatattcaaagatctttgttt

SEQ ID NO: 463312 - DNA, 3230 bp, Homo sapiens
ttgctggatttcccgcgccttctatccctgcagattgagctctggccttcaccccgggcctcttaacttcaggtccgcccaagtgccctcctctcagcaggcggaggctcacagctctgtcgggagtagggagggctgaccgcattgtggtgcaaagtgacaagtcgagtgttgacttggggactgcgatgtaagtgagggaccctgggtgttggtggaggggagaatggagggattattgcccactcccccctccgccgtgccaaattcagccagaagttaacaaagtttgcttttcgggattgaacccgtcttgggttctccgaccgcccagggcttggggttagggaaaggaggcgcagagtcctttgtgcccatcgcatgcaaactttggccccaaacaggaccggccaccaggaagggaaccaggtatgctctggggtcccgggcggcgccctggcagcggacgttcccgcaggtagtgcgcgacttttgccccaggaagaagtcgctgctgcctgcagggtggccttggagaggctcgggcctccattgagactgctcacttccttttctccgggaccacggctcttcagctttttccgccctaggctcccgcgcctcctcagttccccatgggagagttatttgaaggctccccggagatgggatttggcccaccaatcctagcaagtcaaggcccgcccggctaggcgcagagaggcggcctccctcccgctaccccgggtggggtagggaccccctttccccagagaccctctagcacctgagtgttgatgatcattactttaaattaaaagtctcttttctcctttccgtctaagcctcaacttagtttcagagaatgaagcgtgaaagctcttttatggagattaccgatgcttcatttattcccgcgaatggcaaacacagcccgggaaaaaccgagcgagcgagctccttgtctcggatcctcggccgtctccgtgttcacaagctcacttggctgtgagacgccgtcggggaaagcccctgcgtggcttccctggggaagggaattgcgcgttcgctagtgccgcagtccgcgagcatccctgggcgagacagcggtgcttttgatgtgcctgcgtttttgatggccgcattctcttgaaatgtggttgtgcggagcagtcccagatacctttcagaagtgtggccttgggtttggaatggagcatgtaaggacaggatacagagtgacttgctgccttctgggtgtcatataaagtggatgaagccagaggggcaccctgctgaaatgactccccggtctatttttggtgtagctctaccatggaaccatccgttttcacttttccatggcccctgccagctctcgcaaatttgcacacatgtttacacagttgtaaacctcaggactggccctgagggctcctggctgctgaagcacagcagagctacccctggagccttgaaaaatccaaattccagatccaaatttgagtttggctcggcctgccgaactcaaatctccaaagaggcagccctggcacagatttcacaaggatcaggcaataatgaatcgattaataaagacagcagtcatttatcaagcctttattatgggcaggcctacacctgcattgttacaaagcaggtggacggttgtggggttatccagaaaaatgtcattttaacccactgtgaaagacagagggcttctaaatttggcccaagtcatccagtctgggccgtgtggccacaatgatgattttcactcagccaattcaaaatactcctcttctcaagctcagacccactttggggctcccaaggtaaaaatcaaaaaaactggctctaagacaatgggaccccgagcggtgtggaattctaagcccaggcttgccttaaagctacaatatggatttaatttatatgcaaatgcaagcaataaaaaggcagacactgtagaaattatagggtccccccctccttttcttaggagatgctcaaccctttctctcctcttccaactaagacctaattattattggttcctgccacctcccccctctccctcctgcccactctggcccgctgggctctcctgttgaccagtagaacgcaaaactgatcaaagccagccggaagccttaagtaggccaaaatgggggctaaattatgctaatagaggagctaaatatactttaatcctgttataatacaagtgcagagaaggtacctttgcaggagaaagagaacccacaggctgcaacggaagagactctagaatttaattccggctctaccgcttactggcattgtgtttgggggcaaattcttaactttttcacacagtcgtaaggatcagatgggatgatacctgggaagttcttgacatggcactcatgtcagccagggaagtacctactgagagtaacctcttactactattggacttagtcctagtaagaccattgttacttttatattagcagatgaaaagtccctttttatagttttaatacttattgatttcagcaagaaataaaatgcaactatctgtctgaagccagttctgagggatcctactcccccatcattttttcctgccaaaggcaagggcattggcattgtaaaacctggcttcagtattgatgctaagtttcccagtcctgaaggcaatctaagcctctcacattctcctcatctctggttctgcttttcctttaaaatatcttcctcaagctctggggcaagaccttcctaactctaaggggaaaataaaaaactgtaaatgtcccattgaccaccgatactttctatttctcacttgagtggaaagcctccccaccaaagagtcttgaggactgagtcatcttttttgttctttgcgacaagtcataaaatggttttaattatatggtgtttttccaagtaaacaaccagactgaaagagaaaatatttaatttttgttgaattaagttgggaacaatctcagcaccatgactgccgacgaggccggcaaatggggcttctgatactgtccttgttgtggtgcatgttttcccttagcggtagcaacaaggaaataggaaccaggccagagagatgcaagaaaaacgtaaaacgcaacttcaatacgggattccagattccaactgaaacccaggagttattttggtaacagttttgccaggggaaaaatattcaaagatctttgttt

SEQ ID NO: 463313 - DNA, 1742 bp, Homo sapiens
gccagcaggatgcagattatccaaccctgatgatcctgagatgagaccaaactgctgctgaggatgacagccgtgctctggtcactccagaggctgaccagtctgcgcatggctgaaccttgaggagacaacaagccctgctctagtcacacaccggcagctgactagtctatgcacagccgaagcttgaggactcatcaagcaagagaacatggaggaaattcacatctttataatactaaatcacctcatttataaataaggtgactactgctgatgtggtggaaatttctgattttttaatgttgactttgtagccagcaatcttattgaactattttattcattctaatagtttactaataattctgcttcattttctatgtagctaatcaaaacaaatgtgcctctttgagaaactatatagcaccaaggttaaaaggtgaaatctggaagccataaaaactagtttcaaaactgtagttaattcctctacttcctttccagattacaaatttaatatccaattttcttgcctgagactagactcctctactgaagactcattttataacattccttatcttcccatcatcaccagcccatctacaacacaaaggaagaaatcctttgccctattgcctcctgctgccataaaattatatattatgggatagcagagtctttttttttttttttttttttttttttgagacagagtcttgctttgtcacccaagctggggtgcagtggcgccatcttggctcactacaacctccgcctcccgggttcaagcaattctcatgcctcagcctcggagtagctgggattacagcttcatgatggtaaaaaattccaccacctttgcccagaaaaaagtgattcacatcctgatatcactgtgtactcagggaaatagctccccacaaggcattgcattagggagaaactatgattcttgccagattagagctcctggcgcagtcagccaacattgttccatgctagcccctggacatttgtatcatacaacagcacataatttcacccgcagcagtggaaaagatgaagtcattcgacatcagctgtcactctacacagctatcttggggttctacctacagcggatcaggaaaactccacgacgagcattcggggacgcctggagccctgcccaactatctccgggctctggctgcagccctgactgcgccggaagtttcctgaggaagcaccatggagttcacccctgtgccctcagtcatgaccccgccgcgagcagcccgggacttacctgctttgctggctacttccctgcgcgccccgatcccgaagctgtgggtggcccgcccgggtacttttctcgtgggtcagagacacagtgtgtagtggttatcacgttcgcctcacacgcgaaaggtccccggttcgaaaccgggcggaaacaaagtggctctggctctggctccggctccggcctcttcggccgagactgcgatggctgggagcatcggtggactcacgtctccaaaaaccgagctccccaagtgagcaattcctatcctttttaagggcttacagctctaagggggacccctttctgcagcagagagctattctctttctttcgtctattaaacttccactctcaacctcactctttgtgtgtctgcatccttattcttggtggctgtgagacaacgaacctcggatgttactccagataacaaggccgtttcagt

SEQ ID NO: 463314 - DNA, 474 bp, Homo sapiens
gccagcaggatgcagattatccaaccctgatgatcctgagatgagaccaaactgctgctgaggatgacagccgtgctctggtcactccagaggctgaccagtctgcgcatggctgaaccttgaggagacaacaagccctgctctagtcacacaccggcagctgactagtctatgcacagccgaagcttgaggactcatcaagcaagtaaatgtagttaaaaatcttaagactaatagttttcctgtaatattgttttcctattgttctgtcactgtattcaacctttttcccagtaaggacctcttttgtccttgctggatatgaatatgctgtacattgttttgttgttgctaccccccccataaccatgctagaagaaacatctatataaggtgtccccactgggaccattactagccctacaggagaaacctggaccatccctgtttattctgcccagccccggtgggacc

SEQ ID NO: 463315 - DNA, 234 bp, Homo sapiens
attatccatggacttatgcattcatataaattttacaatcagttgtcaagttatataagccattctgttgatatattgatatcgcatgggtcttgcaggagaacatggaggaaattcacatctttataatactaaatcacctcatttataaataaggtaaatctcttcacttaattagttctcaacttgcccttgaataattttaagtgtttctcaatacaaaggttatgtgca

SEQ ID NO: 463316 - DNA, 1500 bp, Homo sapiens
ttattttctcataggcgctaggtgactactgctgatgtggtggaaatttctgattttttaatgttgactttgtagccagcaatcttattgaactattttattcattctaatagtttactaataattctgcttcattttctatgtagctaatcaaaacaaatgtgcctctttgagaaactatatagcaccaaggttaaaaggtgaaatctggaagccataaaaactagtttcaaaactgtagttaattcctctacttcctttccagattacaaatttaatatccaattttcttgcctgagactagactcctctactgaagactcattttataacattccttatcttcccatcatcaccagcccatctacaacacaaaggaagaaatcctttgccctattgcctcctgctgccataaaattatatattatgggatagcagagtctttttttttttttttttttttttttttgagacagagtcttgctttgtcacccaagctggggtgcagtggcgccatcttggctcactacaacctccgcctcccgggttcaagcaattctcatgcctcagcctcggagtagctgggattacagcttcatgatggtaaaaaattccaccacctttgcccagaaaaaagtgattcacatcctgatatcactgtgtactcagggaaatagctccccacaaggcattgcattagggagaaactatgattcttgccagattagagctcctggcgcagtcagccaacattgttccatgctagcccctggacatttgtatcatacaacagcacataatttcacccgcagcagtggaaaagatgaagtcattcgacatcagctgtcactctacacagctatcttggggttctacctacagcggatcaggaaaactccacgacgagcattcggggacgcctggagccctgcccaactatctccgggctctggctgcagccctgactgcgccggaagtttcctgaggaagcaccatggagttcacccctgtgccctcagtcatgaccccgccgcgagcagcccgggacttacctgctttgctggctacttccctgcgcgccccgatcccgaagctgtgggtggcccgcccgggtacttttctcgtgggtcagagacacagtgtgtagtggttatcacgttcgcctcacacgcgaaaggtccccggttcgaaaccgggcggaaacaaagtggctctggctctggctccggctccggcctcttcggccgagactgcgatggctgggagcatcggtggactcacgtctccaaaaaccgagctccccaagtgagcaattcctatcctttttaagggcttacagctctaagggggacccctttctgcagcagagagctattctctttctttcgtctattaaacttccactctcaacctcactctttgtgtgtctgcatccttattcttggtggctgtgagacaacgaacctcggatgttactccagataacaaggccgtttcagt

SEQ ID NO: 463317 - DNA, 656 bp, Homo sapiens
attagtcatatgctgcaatccctaatcagatctctttacacagagtcctgtaggctctccgctcaggcagttctcttaagaaatgatgaactgctctattggcagccgccacagggtgagaagctcaatcaagttcacaaagaagaggcattaggctggcaagcagagctggtgggatttacctttgacgtagtgagctccttgaagctacaacaatgccatatgcatcctgtcacagtgtctggtagaagctgcaaagccttctgggagcctcatatcatctcccgtgggcagctgtcttgtgtccctgggcagaatcactcttcaagaaagcatcagcaagcatcacaggaggctgaagcacgagaatcacttatctgtataagaaatagtgtcaagatgaattgttgtgtcctcaagggtagcaagctctccctcattccttctcagatatcttgcattaccctattttactaacgaaaaaatattctctaatttaagcacaatggcatattttattttcctaatgaactactttctgtgattttggactatcccattgctgaaatgttttatctgatttttgatgctctaatgatcccaataaattataaacattttgcattaaatgaactcttttgtggacactctaatcc

SEQ ID NO: 463318 - DNA, 596 bp, Homo sapiens
agagactctgagccagaatcacccagctaaactgctcctgaattcctgtccacagaaattgtgagatagtaagtatttggtatttatttttagagagagagtcttgctatgcggcccaggttggtctcaaactcctgggcacaagtgatcctcctgcctcagcctcccgagtagctgagactacagatttacgtcaccatgtccagctaatattaataaatgtttgttattttaagctgctaagttttagggtaatttgttaggaagcaataggtaactaaaatatgcattaatagttaaaccattttgaaaaagattatagtttttaattcccattattgggccaaaggagatttctgtctcatgagtagctgattttacaaggttaataactctatttttaaaatattgatatgctggccgggtgcagtgcttgcacttgtaatcctagcactttgggaggccgaggtgccaggatcacttgagctcaagagttggagaccagcctgggcaacagagtgagcccttgtctctattttcaataaaaataaatatatatataattttaaaaataaaataaaatattgatatgctat

SEQ ID NO: 463319 - DNA, 2926 bp, Homo sapiens
gagtgctcaaaatgattattttattaacaaataataataataacatggagatttaagaacgtccactgccggaaactagaccaacagctaaaggaatggatgctttcattatacgccatggtgtggttctcctttcaacaggaattagagcttcatcctcctcccctggaaggtgcactgaatttcgtgacttgcttttgatgaacagaatgtggtaaaagtgacagtgtgtgacctctgagattgagtcataaaaggcatggtggcatcttccttgctctctctctgattacctgctctggaggaagctggctgctatgtcataaaaacacttaagcagcccaatggaggaggccatgcttgaggaaccaaggcccctgccatagctgtgtgagtgaaccatcttggaactggatcttcaagttccaaacaagcttttggatgactgcagccctggaggacatcttgactgtaacctcctaagagactctgagccagaatcacccagctaaactgctcctgaattcctgtccacagaaattgtgagatatgtctttgcagatatagttagtcaagatgaagtcctaatggattaggatgggcccaaatttcaaggccttatgccatgagaagacccagagacacacacaagaggaaggccatgtaacagtgaagtcagaggttggagtgatggagctgtaagccaagaaaggccaaggattgctggcaaccaccagaggctggaagaggcaaggaaggttcttccctagaaccttcagagggtgcatggccctgctggcactttggttttagactcctggcttgcagaacacaaggaaataaatttctgttgctttaaaccacccagtttgtgatactttgttgaggcagcccaaggtgagttcatcctaactggaaaataactcgtctgcctccctcattctgagttcaggtacccaggtagctccccttcttggggctgggacctttctcgctgagctcagcatcccaatctgtgaggatgatctatccgtgagtcctccaatgtgctggcctcctcatgacgccagactggctcctcttccctccccccacgcctcatccccaaagaaatctaaactccgtggcgtctgaaactctctgcgcctgggtccccaaggtctccgcctggatccaagacttttgtgaccaaagcgggatcgggtaggggggcggcagtacctctttgcaggcatgaagctccggtcccgttccctgggtcacctggaaggcggtcccagcccagagcagcagccgccacagccggggtatgcgcctctcagtgctgcggctgctgcttctgctggcagaaggcggaaaaaaaggggagggaggtacacaggcggaggatgcaagaggccaggctcgcttcagtcacctccctgcggctacgccaacaccgcccatccttcctcctccctctgtcctctcctcctacccacgtcgccttgacaaccgcctcctctctggctccgcgcgggtggggcagggaccacgcgcgcctctgcagctcacctgcgggtcgccatggcagccgccgccgctggtgcgcgcggcgtgggcgcgggagagcgcgcgcccggggtgcgcaaccggcccaacaggcaggcccggggctcgtgtgaagaacacagtggaagcatcctccaagccagccaacaaatttccgttttctactgccctttcgggccaggggttattttatgagcatctccgatgttgcacacgtggcgtgtgaaccgagagaaagaagatggagagatcaccctccagacgtcgtcgcctggaagaggccccaaaattgccatataagaacccaacacaccttgctcagcagcaggaaccctggagtcggctcaactcaacccccacaattacttccatgaggcgggatgcctactattttgatcccgagataccaaaggatgacctggacttccgcttagcagccttgtacaaccaccacactgggacattcaagaacaaaagtgagatactgttaaaccagaaaaccacgcaggatacctataggtaagtggtagaggcagagcctctccagcctaaacatgctgccatccagtcatataaggtaaaatgtcacctggaaaatgataatcactaggtactcatttgtatacaaatttctgtatttttacatctgtgtctataatatagtttctgtattttcactgtctaagatgaacagaaatctcccaagattgtgctcatctgtataaacaaaatctttggttaatcccacagaggtaaaaagagtctttggctgctttattcttgagatcacattcaactaccttgccttcctcacctttctctgattgatttcactctccacttttcttccctatgccttcttctagaaccaagatccaattccctggagaatttttaacccctcccactccacccatcactttcctggctaacatcagacactggatcaaccctaaaaaggagtccatccacagcatccaaggatccatagtgtcccctcacactgcagccaccaatggaggctactcccgaaagaaagatggtggcttcttctccacctagtgttgacagatccctgaactaattatagtgaaacatactgcggcccacttccattaaatagatttgtgcaagatgaaaaactagtcctttggggtatatttgcaacttggaaaatcatatcttgctgatgaagatttaggacacaacagcagtctttggtaggatacagatattcatattttgtaaactgaagtcactccaaccatacagagccatccattcaacactgccagcaaacctttatgtgccaggaactgagctaagtgttgaggaaacaaaaatggacatgagctaccttgtattttcagaagct

SEQ ID NO: 463320 - DNA, 3826 bp, Homo sapiens
gtgggcctggcctctcccaccgcaggaggaaagagcagggggaagcccccggcgcccgccgcctccgagagccacggtgtcctcgggccgggcaggccgcccgcccgctcggcgccccgagccgtgagaaccccaccctgccgggcgtgggcgacggccggccgggggcgcacggagcagccgtcgcggggcctcgccgcggcctccagcgccccagtcacggggaatgcagtggtccccgacccctggcgcctctgcgtgtctgggctgggcttcctcgctcgcctgctccacggccccgacgctcctgggccgagccggccggggccccctcatggcggccaagtggttcaaggagttccccctgaacctgaagaccgtgtcggagcgggccaagcccgggggcggcggcggcaaattgcgcaagaactcggaggcgggcggcgctgggccgggtcctggcaagggccgcaagaactcggcggccgagctggggagcggcagggccggcgtcggccccaaggacagccggctgtcccgcgacagcctgcagggtctgattcaggccgccgcgggcaagggccgcaaaaactcccgggccacggaggaggagccccaccggggtgcaaccaagagctcgggctgcagcacctacatcaacaggctcatcaaggtggacactcaggagaagaacgggaagagcaactaccccagcagcagtagctccagctccagctcctcttcctccgcgtcctcttccccttcctccctggggcccgagctggacaagggcaagattattaagcagcaagagacggtcatcattttagaagactatgctgacccttatgatgccaaacggacaaagggtcaaagggatgcagagagagtcggagagaacgacggttacatggaaccatatgatgcacagcaaatgataacaggtttgtaagcaggctctacagaatagagactgaaatctcacactcagacacacttgaaatgccgtttgcaaaaccactgtaaacttcacccgtaagtgaggcacctttccactcaaccaagaatgttgtcttcagaagtcagaattgtccaacatggaataaatgtaataataatcgctagcatttaatatttgagtgtgtattaagttccatgctctgttttaaacaatttctgaaaataaattcatttaggaatacaaaattaatatattcagttggcaaataaattcaaatttattaaaaatccaaattactaactttctaaactagtgatctaagtatactttggtcttaactttaaaaaagttgtactcgtggattttaaagtttcttcatttagaatatatatcacaaagcaccttctcaatcagtgtagagactctacctcttattctacccgtaggttacaagctggacagaataacaggaagtgagtttatcggaagctagaaataaaagatttgctgctgggcttttgttttttgttttttaaaccttttacttttttattcagtttgctccttgtgtacctgattgtcaagtccaagttcggaaatttcccgtctttcttgagaaatgagagttttttttacttgtttcagcatttctgaagatggaaaggattttaatgaacacagttgaactgtggagtggttaaatctgtgttgccattctttgcattgccttttttctaccggtgaaatgggaattacaggcctggttttaacaatatcttgggcgtgtagaatactgcccatatgttgttttagaatacccaacaaatatttcttgaggtttttttttttattatgtactaggccctgtcctgagctctgggcatacaggaaacaagacccacatgatttctgcccttggacctcacagcctaagggggaaacagacctaccagcaaagaagataagtcattgaaaagcatgataagtgccatgaagttgagaataggagccagcatctacctcaggggcagaggaaactgagagaagcccatggctttcctgtggccaaatcgctatgggacccaggaagcctgggtccccccaaaactttgctcttaacttttaaaagttaagaatttatgagtttatgagtaaattatcactgagatttatccaaaggattgttcataaaaagatatgactgaatacaaggcaatattaatataaacctctgttgcttttctgctaaattcacaggaacattttaactaaatattctagctaagatatttagctaaatatttggcagaaatattctacataatctagcattaggagttttagccaccgctttgaaacattagcatcggacaggtctttaaaagttcccattggctagttagcatgaggattctttctgcagttgatgtcatacagctgtaaattgagagcttactagggtttctgaattgtacctgcttttgttcagatgtttagatttattcaataagaaaatattaaagtaattttaaaagcttgagcactgatcaaagatatgagtaaaaaattgtcgggcagccctgtttctgattccaggaggaaaatagagtcttaagaggctccaagtttaatgttttggaaacatgaaatgggttaaaatggattaggggaaaaggcacattatttggaaattggaattaacattttacgtgaaatcatttgagcataaagcatggactctggagttggtaataattggcctcaccataactgctgcatgactgtggcttccgtgtattcacctgtgaaaatggggtaacacatctgtcactgccttagtgaggcatcagtgagattctgggcataatacacctagcaggtgtatacctagtcagtacagccgctcgtttcctcttggagccagctctgcacgtcaggggctattctccctgcaggaagggtcggcttgcagccccacgattgtttctgtttctatggcgcctcaggtttgggggcagccaggtgttggaatggactggaagttctttagaaaagttccttttaaaaaaattacagccttgtcttaattgaaccaagaacagagtatgtttttgtttcttgttttccatagctctgtttggagtaagcaaggaagaagaaaaactgtaggactgagagtccagggactcaggagatgcagctctgacctcagacaaccccagatacctggcctggcctgggggtgggggccagggacagttcttccgactcttacattctgatgtggaagtggtagacacaggcagtacctttctcctcaggatgggactagcaatgacaggctccggagaatgaggaaccaagatggggactgtggacacccaggaggtgtggaagtggttctcaggtttagctgctctttagaatcacctgggggatttttacactcttgactcccacactgtaccccagactaatccaatctgaacctctggtggttaaagcagtgtgtgtgaaagcccgcgggtgatttcaatgagctgtccctgcacagaatttgagacagctgctgacagcccctagtcagcagagaactataacctcagcctatacctaagttttgcacttttgaatttggtgtcctgattttaataacgtttccctcatttgttgccctctttttgttatagaggtcttaatgagtcagtggcatttctccacggaccatccccacacctgttttgaagttacagatagaaagtctttccaccctttgtgtctgcggccctgcggtctcctgagcctcttcctcctcacctgacccctcagccttctttgctggcacctccttccagccacccataa

SEQ ID NO: 463321 - DNA, 1293 bp, Homo sapiens
  misc_feature (2)..(5): n is a, c, g, or t
  misc_feature (8)..(8): n is a, c, g, or t
  misc_feature (10)..(10): n is a, c, g, or t
tnnnnttntnctaatctggccatggggagtaaccattcctggactttggtgtcagtcagtgggcagcactggcctgtggaccccctggctgagagtccagggccattccgggctgcaaagggccagcaggagcgggtctccttggtctttctactctgcatcctcagggcggcacccccccttgtgctggcaaggtggcccgtcactcgaggcccaggaggaaggtccactacagagcccctgggggctggatttagtgaggacctgctggtcccgcgcagccccaccctcaaggcccaggcctccccaggctgcgctgtccttactgcaatgctgtcctgggcttggacaccttcctcagctttgatctctcacctgtgcctgtctcctccccgaggtgagcctcctcatgcagaagcaggcctgggtgccggttatgtggtccttattgtggtggccatcttcgtgctggtggcgggaacagccacccttctgatcgtgcgctaccagagaatgaatgggagatacaactttaaaatccagtccaacaacttcagctaccaggtgttctacgaataggaggcgcaggctgacaggaaggtcgccgtgagtcaagctgcctccagaacctcagagcttccctggtgggctcccccgggatccccagtgtctctctgcacctccacccatccctcggttcttaactcttcaagccttaacggaggtctgctctgacgggtgggctctgccagagcccgggtgagcccagaaaggaagacagcagccaccgtctgtcccgaagaggcaggccgtcctgtaggtcctagaggagccacagcccaggggcagatgaaggggctgcggaagacgggggcagtcctgggggtgctgcggctacaccaccacccgcgcggcccccgcagcccagacctcccaggcctgtgaccctccacaccagccctcagaaccctcctgggcttgccctcccttggcgtccgtcaccctttggcaaatatagaatatttcacattctcagagagacccgaccgcgctcttgatgctctttcgaaaataggtcagtcttagaaatacactgctaatgttatttttagtggatgtttatgctgtttgacttttctcctgtgtaccaaggtattgcttttatttacacgacagcgactcaaaaggcactcgattaatgtgacaaccttttcaataagcagaaataacgtaggtacacatcactctttacatttttctaagcattttcacagccgtttcttcatataatcc

SEQ ID NO: 463322 - DNA, 458 bp, Homo sapiens
gcagatgaagaggagcccacaaaagagactgaggaattgtcttcattcactcattcatgcatgtattcatttggtcaacaaatattttttggcacctcccatggacaggtcctgagcaccaagggtacagtcagaaatgatgaatccagaaatgatgccctccagaacttctggtgaggaaggcactcaggaaaatgcagcaccctatggaggcccagaaaggagggcattcaggaagaacacagtctgatggtgtcaagtgcagcggaggctaagagatactgttatatgtgctcatgtaaattgtctggcaattagctgcaagaggattgtaggaagagattctacctatccatctctttacaccatgccttctgaagagaagattttcggagagaatccttggatttagtcaggaatattagatccctaaataaaaatgtctaaaatcctttccc

SEQ ID NO: 463323 - DNA, 2661 bp, Homo sapiens
cagtggcttcaaaggttaaacaacttgtcttcgattgcacagctaacaagagattgctgttccttggtcttgctgtttgccttgctacatgcgtatgaatgtgcagatgacaagaacagatgccagggcccctggaagatcaaagtcctggcgctgccttagaaaatctgtccatgccacatccctaaatctgcaggaaggccataacattgttttctccaaagaatcattcaaaaagttactaccgtatgaaaactctttagccatttacattttgtgggttttaacaagcgtgtcttccaggctgactctggctggtagaggttttcacccattcctcaatgggcaccagaattctgatgagttcatgacattcagtttaagaaattacccgcggccaaagatcttgattggcaaggatggcaacatcttattccctgcttcctgtgtctctcttcaaccttatctcataatctcactttccccctttcttgctcaccacatctctgatcctggttcctttcggttctgggaacaagtcaaactctttccagtctcagggcctttgcacctgttgatatctctgacccaaagtgttacatagccccacccttgttgcatggggggggggtggggggggggcgggggggggggggggggggggggggggggggggggggggggggggggggggggggggggggggggggggggggggggggggagggaggggggggtgagagggggggggggggggggggggggggggggggggggggggggggggggggagggggggggggggggggggggggggggggggggggggggagggggggggggggggggggggggggggggggaggggggggggggaggggggggggggggggggggggggggggggggggggggggggggggggggggggggggggggggggggggagggggggggggggggggggggggcgggggcggggggggggagggggggggggggggggggggggggggaaaaaaaaaaaaaaaaaaaaaaaaaaaaaaaaaaaaaaaaaaaaaaaaaaaaaaaaaaaaaaaaaaaaaaaaaaaaaaaaaaaaaaaaaaaaaaaaaaaaaaaaaaaaaaaaaaaaaaaaaaaaaaaaaaaaaaaaaaaaaaaaaaaaaaaaaaaaaaaaaaaaaaaaaaaaaaaaaaaaaaaaaaaaaaaaaaaaaaaaaaaaaaaaaaaaaaaaaaaaaaaaaaaaaaaaaaaaaaaaaaaaaaaaaaaaaaaaaaaaaaaaaaaaaaaaaaaaaaaaaaaaaaaaaaaaaaaaaaaaaaaaaaaaaaaaaaaaaaaaaaaaaaaaaaaaaaaaaaaaaaaaaaaaaaaaaaaaaaaaaaaaaaaaaaaaaaaaaaaaaaaaaaaaaaaaaaaaaaaaaaaaaaaaaaaaaaaaaaaaaaaaaaaaaaaaaaaaaaaaaaaaaaaaaaaaaaaaaaaaaaaaaaaaaaaaaaaaaaaaaaaaaaaaaaaaaaaaaaaaaaaaaaaaaaaaaaaaaaaaaaaaaaaaaaaaaaaaaaaaaaaaaaaaaaaaaaaaaaaaaaaaaaaaaaaaaaaaaaaaaaaaaaaaaaaaaaaaaaaaaaaaaaaaaaaaaaaaaaaaaaaaaaaaaaaaaaaaaaaaaaaaaaaaaaaaaaaaaaaaaaaaaaaaaaaaaaaaaaaaaaaaaaaaaaaaaaaaaaaaaaaaaaaaaaaaaaaaaaaaaaaaaaaaaaaaaaaaaaaaaaaaaaaaaaaaaaaaaaaaaaaaaaaaaaaaaaaaaaaaaaaaaaaaaaaaaaaaaaaaaaaaaaaaaaaaaaaaaaaaaaaaaaaaaaaaaaaaaaaaaaaaaaaaaaaaaaaaaaaaaaaaaaaaaaaaaaaaaaaaaaaaaaaaaaaaaaaaaaaaaaaaaaaaaaaaaaaaaaaaaaaaaaaaaaaaaaaaaaaaaaaaaaaaaaaaaaaaaaaaaaaaaaaaaaaaaaaaaaaaaaaaaaaaaaaaaaaaaaaacgaaggagagcacctcactgtctccctctgcccacccacctgcacctgacagctgtgggctgtgctctcagggaggcaccgtcagatgctaccagactacagaggagagcaccctcaatcctgactgaaggtttgggaaaaggctgctcagaagaggtgatacttgatatgggccctggaggaggagaagcagtttgagaagacagcagtgagagatggcatccgggcaggcgagaaatgcaaagggaagagaggtcatccaggacaaaagtacagaatgaaaagaaaaagcaactaagcacgaaatcttggagaatgtcctcattgaagggtcctgagcaccaagggtacagtcagaaatgatgaatccagaaatgatgccctccagaacttctggtgaggaaggcactcaggaaaatgcagcaccctatggaggcccagaaaggagggcattcaggaagaacacagtctgatggtgtcaagtgcagcggaggctaagagcctcagtgcctccttcagagatgcggtggatattagcttctgttgtatccttcatacagaacctggtgctgagagacagcttcttctttttttttttttctttaaacttttcttaagactagtcaagtacagtatcaagaagac

SEQ ID NO: 463324 - DNA, 2303 bp, Homo sapiens
  misc_feature (1)..(5): n is a, c, g, or t
nnnnncagaaccaactcagcactgggcaaggtccctttcctcaaggagctctgaatctctttgtgagacagacctccggtgaccgcatcacctccgcagaccccaggtcagttcctcaatgctggggacaagatgggccgtgtttgcggaggagatgggttaccatgtctgctgctaactgttaccatagatccagggatctgtgcttctttcccacacagtcccagggctccttgtgaggtgatagctcccagcatccactgcagtgagaggtggtcaagtgacaagttgaaatctgaagattgggcagagagcaccaagcctgcacccagcaccaaaagcctcctgctgtcttctttcccactggcggacatgggaaacagcagcccatcctcctttggggcccatactccccgactcttggtgcctgcgattgcactgggacaggatggagatgggcagaggctgatccggaggaccctacagggcttcgcgtggactgccctgggcttcacagctaagcgagccagtcagagcccttccagttcccactgagagttgtgactcttacattcttccttttattgggagattttcccagggccatcagtagcagttgagggggatgctggacgtcagtttcaggatggggagcttgactgtgcccacacacagtgtctatgatatccttcccctactccccctggctagctcccattggctctttggattgtctcatttcatagagcaccacttccaggaaggcttcctgaatgcccccagctgtgttaagtgtcctttacactttactctccagctgcacagaactaccttttattcagctcaggcatcacctcctccagggaggagtccttctctgattccttggctgggttgggcatcctcctgtgtgcctctttagcaccttgtgcaaacctttatcaggttacattatggttccatgacactgctttcctgcagggctgcgtgttcctggaggatgggaactgtgtcttatcattctgctggggactcatatgagaagaggaggttgagatctctgcagcagacattcccaaacctggtggagcatcagaaccaggtgctgaacttttagaaagtagacatcatggtctgggagacagacatctgcctccaaggatagacaccacatccacaaccctaaatccaagctaagtttggcacctcgaaagaaaggacagccacaatgggatgataaagtgggagcacaaacacagcacccagaggggccagagggtgatgtaatttactgatgctggatgaatgacccaggctgtaggttcctcaagggttgggactgtgcctgtgttctgggcacctgcccatgcctggcaatttgaagaagctcaattgctacatgttgaaggaatgaataattgcatgagcaaccatcgataattgcatgctacaaccatcaaacttgcagggttcttccatggaataaagcacagaactccagggagcccacgatgcaggagagttcagcgacattcactgagtacaagagaagactgttgggaggcaccaatggactttgcaactggagatctcccaactggaccatgtcactgttatgtttaatttgcactgtgcacagtaggtacccagtcaacgtttgtcgaattccatggactgggccttatacctccgaggatttttcacagcagtagcatgtgcacatgcacagaacgagaacacaaccaatgcttgtttgctggtgaagacctggtctcagtattttgcccaggaaaccctttcttcatggacagcatgaggcaagctatggcccttgctgtggtctcagtggttcagcacggaagatgaagatgacgggcagtctcagaatattagctttagaagggactttggatccttttgattttggtaggtgaaatactttttaaaaataaagaaaacggactttggacaaatgctctcattttgtaaatgaaaaagtagagacaggaagagtaactgatttgtccaaaatcaaacaaagtaaattgtgttgcatcctctccatccgtaaccaccttcgccttccctaactgctccatgtggcctgggaaagtccacttcacctcgtcttagaggtgggcttctgattctagctaagccaacccccacgttctgttcctctggtcatggtgattgatttggggaccagcctgagacctaagctagcccaacgggcatcctttctgccaggagtgagaggagtcaggccctctcttcctcaggatcagggatgtgagaagatg

SEQ ID NO: 463325 - DNA, 427 bp, Homo sapiens
ccacgggcggcggccccctcttctctctctcaaggagcccaagggtggtggcttcagcaccctaggaaatgtgccagcaaggtctacagtatcagcaactttacctctccctcccaaagctttctggagtgcttagtagaagacagaggactctaaagtgtgaatgtggaatggaaatcgaggccactgggaacggctgcgtcgaagagtaacttgggaacgcatagggattcacaggatagatattgtctggatatcagggcgaaatgttaattagggatcaaaatgtccttttaaattagctatgttgaagagaaaggagaagaccaggaaacagaagaaagatatatgttatgtggtattttggaataaatatttatagaaaacaatgatctgtttgtttaaaaactaccgatctaaaatgctg

SEQ ID NO: 463326 - DNA, 748 bp, Homo sapiens
atttccccttccctgatcataggcatggacagccggcccagggtctcccccgtggatctccccttccctgatgctatcatcttagtattcacggggtttgctctgacttactggcttcctcaccagttgtgctggatccttattggctttgatatttccatttacttactctctcatcaaagtgccctagaaatgggaattgaaggacgtcccgtttctaggggagggtgggaacagagcctgagaattccagcctgctcacccttatctcagagtgttgcattcccaggacatcttccaaggccacctggagagctgtcctgcagtgacacacctcagcttacccagcgtagaagagcccaagggtggtggcttcagcaccctaggaaatgtgccagcaaggtctacagtatcagcaactttacctctccctcccaaagctttctggagtgcttagtagaagacagaggactctaaagtgtgaatgtggaatggaaatcgaggccactgggaacggctgcgtcgaagagtaacttgggaacgcatagggattcacaggatagatattgtctggatatcagggcgaaatgttaattagggatcaaaatgtccttttaaattagctatgttgaagagaaaggagaagaccaggaaacagaagaaagatatatgttatgtggtattttggaataaatatttatagaaaacaatgatctgtttgtttaaaaactaccgatctaaaatgctg

SEQ ID NO: 463327 - DNA, 884 bp, Homo sapiens
gtcacaccggcttttttcaaatgaacgcgcaaaaggcggggaagtatctggaaagcgattggttcgtcctagaaaacggtcaaacccggagagtctgtacggatcctttccgttctccgcgggtggggcgcaggcgagagtgggaaactgggaaggccgggctctggggaggtgttgcggggaggggaaaggcccggatgttccctaacaatgaaatcatcgccgacctatcagagccgccgagctgggatacctgcctgacctgtaccccggagggagaagagtgggcgggaaattggggtgtcggaagaacctggaaagcaacgccgatggggaaagtggacatgactcctccagctatcaaattagacgatgctgccatgttaattctccaaacgagaaacaaaagtgtaatagagaacttgtatcgtcaataacgtcatcgtgaaccagactagcagtgtggatcatttctgcaattaaggctatggcgcggtggctggcttgcacatgtcaaattaacagacagcaatgctttttaacagacgccgcctagaaccttctcagcaatcagcttgtgaaaattggacatcggatcgggagttgttatgatggatattacatgctcgggccattagcaccccaataattggtcgaaaggcttttccttttccatcaaagtagtactcagacatttcctgaagttctgttgttgatatgagcagttcctttctaatgtcctcatacagacctttcaagtctctgcaaccgaatttgaaaggatcggtgatctgtatatttctcaccactgtgtgttttactgtccggggttgtgtgataaaaccgtgatatactgtatacatttggacaggcagatgttaagc

SEQ ID NO: 463328 - DNA, 951 bp, Homo sapiens
taaaggggtgacccgacacccaagaagaagcatatggcttcaccagagattggtctggtaaaacaattccacttgagcgcaggcctggttagggaaaatagaatgttctagcatagtttaaaatggcaactttcctcccccaacctacaggaagcataagggaatttttctctcatcttctctgtgagaacctggtcaagctcctggaggtaaaaccccaaacagtgttgggggcccttatgactgagtcccctggagtgtttaaccctcagatgtgtccacacgaagcctccagccattcatccattacagttcaggtttccctaccctggcatgggttctcattatggtttctgctcctgtgtttctgctctagaaacctgagaattcaatgatgtattggagaaaacaagtgcctgcaaactgtttgcagatatgtggtctttggtctgagctaccatagaaaagcttcccgcaaccaaatgaattacagacactcagcaaaagaaactctttgcaaatgtgattattataagtgccagatcgagacacccacagaatggtcccctctgagaaaagcactcaagcaggcccttctagtaacagggcttccaagaccacctccctggtctccagccctcaccctcacacactttctctttcctggtcctgtcacctcagggggcagagccagcccaagacctaagtttctgtttctggggaaactctcagccccacgaccttgcactacttcagaatgccccgggagtccgttaaactttgaaaatcaaaagctccaaggaaaatggcattccttcctgccatgctcctctgtgatctcggttccctgcaattgtgctggtgtctttactggccctttggtatttccatgtctttgctttatgctgcagcgtctcttcattagacaaagttgactttcttgtgtggcta

SEQ ID NO: 463329 - DNA, 1133 bp, Homo sapiens
aaagtgagctatactcagagcagacaccagaacctggaaatgaagcagctgcttgacagtccctgtgaacccgcagacggtggcctgaaatcagagaccttggccaaaagacggagttccaaggacctcctggggaagccgccacagctatacgacactccctacgagcctgcagaaggggggcccagggcagaggggaaggcgcggcccccagacagccggctgcccgagaacgacgagaggcccgcggcagagtacgagcagccatgggagtggaagaaggagcagatcgtgcgggctctgtcagtccagtttgaaggagctgagcgaccttccttcagggaggagacagtgaggcagcaccaccggcagaagagctggacccagaagatcctgaagccagccctctcggaccacagtgagggagagaaagtggacccgggcctgcccctggagaagcagccctggtatcatggtgccatcagccgtgctgaggctgagagtcgactacagccctgcaaagaagctggttacctggttcgaaatagtgagtcagggaacagcaggtactccattgccctaaagactagtcaaggatgtgtccacatcatagtggctcagaccaaagacaacaaatacacactgaatcagacaagcgctgtgtttgacagcatccctgaagtggtacactattattccaatgaaaagttgcctttcaaaggggcagaacacatgactttactctacccagtgcacagcaagcttcactaagattcagccactgcaagccctgggcctctggcaccttcaagggcatcatcagcgcacaaccagcatctcagaggacaaggctggactagcaactgctagaaaatgggagtcttccttgaaaagtcagagagtgatttgttttgttttgtttgagacgaagtctcgctgtgttgcccaggctggagtgcaatggcgcaatcttggctcactgcaacatctgactcctgggttcaagcagttcttccccatcagcctcccaagtaggtgggactataggttcgcaccaccactcccagctaatttttttttttgtatttttagtagagatggggtttcgccgtcttcgtcaggctggtctcaaa

SEQ ID NO: 463330 - DNA, 1504 bp, Homo sapiens
tctgtcccagaatctgtacaaaatgatcctctgcaaactggaagaagactgtgcaggcgcccgggagcagagtggccatgcagaggaagggacccagacacagcaccccaagatctggctacctcgggccctgaggcagacctacatccggaagatccttaggctgttgctgaaaggaggaggcccccgggagggtccaccaacttctaactcaaggaatgtgcagctccaagtcaagcctccctgtggacctggggtggacaggacccctacagcagcagggagagtcaggaagcctctcggggctgctcaaagcattaccctcattcctcagggcaagcccaaacctcaagccatctggacacatgatggctgtgccttggacaccaggcgtgtgagtgtgcggaatggggagcaagactccatcctcttcatccgagaagcccaacgtgctgactcaggtcgctaccaactccgcgtgcagctgggtgggctggaggccaccgccaccattgacatcctggtgattgagaggccaggccctcctcagagtattaagctggtggacgtttggggcttcagcgctacactggaatggacaccgccccaagatacggggaatacagcacttctgggatacacggtgcagaaggctgacacaaaatccgggctgtggttcacggtgctggagcactatcaccgcaccagctgcatcgtctctgacctcatcatcggcaactcctatgccttccgtgtctttgctgaaaaccagtgcggactcagtgaaacagcccccatcactacggacctcgcccacatccagaaagcagaagctacatgccagcccctcttggtgccctcagctactgtttacaagaccaaggggtttgcccaacgagacttctctgaagccccaaagtttacccagcctctggccgactgcactacagtcaccggctataatacccagctcttctgctgtgtccgcgcctctccccggcccaagatcatctggctgaagaacaagatggatatccaaggcaaccctaagtacagagccctgactcacctgggaatctgctccctagagatccgcaagccgggtccctttgatggaggcatctatacctgcaaggcggtgaaccccctaggggaggcatctgtggactgtcgggtggatgtgaaagttcctaattgaggacacctaagaaggcatggtactctgacaaagtgcctccaggaagcccgccagtggtgagactgtgtcctcaaggagcttcggcaccatgtctggtttggattcatctaaataaatatgtggttccccaatctctgttttaatgttaatgttggtcagctgtgcctgattcccaaagggcagagagtataatgaggcatgtccaacccccactttccattatggcctgaactagttttccaggttaaatctggaatgcccttgtcagagagaaggggtccattcagttggttggggggcttagaa

SEQ ID NO: 463331 - DNA, 1198 bp, Homo sapiens
cagcatcagccatgctcctcaaaatacaagaaatgggatcaacagtggaggttttgaatgaccaattgactaaaaagtgttcagagttgagctgcatgcttcagactgttactatggaaaaagccagaatcattgctgaccatcaggccattctgcaggtagagcagaaaatgatgacgcagacatttcaagaacaaaacttattgctggatgcagcccatgccagtatcacaaatgaactacagactgttcagaatgagaaaacccaactccaggcacatctggatcatttaatccttgagcataaccagtgtatccagaaagcacaggatgctgaaaagagaacagctgtgcaaaaagagctgctagaatcaactattgcaagattgcgaggtgaattggaagcatcaatgcaagagaagaagtctctgctagaggagaaagaaagatttcagagggaggttaataaaacagaaaaagaaatagtgcaagaaagatgcaatttggaaaaggaattagctaaaaacaagcttgcccaacagaaggtggaaaaaatcactgaaagtaaaaataaactggcctatgaaaacggaaaactccagataaaagttaaacagctagaagaacaagtacagtcttttactgacaccagcttacagaatgatcatctacgcaagatgaataagtatttacagactaaatatgctcaggtgtgattaatatctacaaaagcggattgctgctatatttcgtttttaagaaattgtttgatgtctttttccccactttaccacacaatcccagaaagataaatatgctgtcacttgactcagtttaacaaactttttttcaagcacctagtacatacaaggttctgctaaagcctcagaaattgtaaagatacctgaagcaggattgagacattcaacttgcttattatagttaggaaatgtactccataaactttattagagaatagaaagttatgcttttcagaaaaatagattgtattactgaacattcatagggagcattattatgagtagaagcagtgagaaatgctttcataaaggcagtgctttttaaaattttggcagttgtgaggaacaagtatctttgttttttgaattaaaggcaaactcagaactcagtgccaagagggtacacctgcagcaggcagatgctcacctgaaagaag

SEQ ID NO: 463332 - DNA, 715 bp, Homo sapiens
tctgctggggctccaggtcctccaggagtaaagggttcatcaggcttgccaggaagcccaggaattcaaggcccaaagaatggtaagattaatagtttttaatagaatttggctaataggtgaacaagggctacctggtcaacctggaattcaaggtaaaagaggtcaccgaggagcacaaggtgatcaaggaccatgtggagaccctggcctgaaagggcagcctggagaatatggtgttcaaggtttgacaggtttccaaggattcccaggccctaaaggtcctgaaggggatgctggcattgttgggatatcaggtcctaaaggtcctattggacacagaggaaacactggtccccttggcagagaaggtataataggcccaacaggtagaactaaatttggctatgaaataaaacataaaaatgagacaatgattggtcaagtgatgttgggaaagttttccaatattgataatagtataaacaagcaaggagcacagtagaaagggtcaaattgagacttagagaggaaagattcattctatctagggaattaatattttgaattatttgaaagttatttatagacacagacaattaaaaaatataaaaatagaatgcttcaagtgtttagtaccactattctctttgataaatttagagaagaaaccaccaaagttactggatatgtaaacaaaagaagtaaaatgtat

SEQ ID NO: 463333 - DNA, 740 bp, Homo sapiens
aagttaagcagctgatcatggcatgatggcttcatcaaccctgaatgaccaagaatgtctacggcgcctgctgctttggacctgcctgcagagttcaattttctccctgcctgtgcttcggcatgtgggttacaatacttcagcctcagcctcctcatccacaaacagggctaatattaccaatgacctacttcatagagatgtgatgagggctaaatcctatgagtttatgcctttaaagcacttattgaaaatgctcatcatctcaagatccaaggagctagaaattggctcctatgctcagtcacatggctggtggcatgccacagctcctcactggctgtttgctggaggcctctgctcctcacctcatgggcctctccatagaattgcttccaacagggaagctgtgtcccccagaccatggtcatcttgcccaggattttccatggtgacattatctgtggtcacaatgggtacatcccccaagaagggtggtcttccaggagtcactgaaaatttcaagaagtgaaaatccaacagaaaatatttgaacccaggaataaaatagaagcctggaagactgaaggatattgagaaatattaccacgcgtgctgatgcctcagacacaccaatctgcaacaagcaactaggataaaaaatagttaaaagtgaatcaacatttatctggaatatacagtcctgacccccttacgcactcccccccacccccctcccc

SEQ ID NO: 463334 - DNA, 1065 bp, Homo sapiens
tcccacccgggtgcttcagctcaaagactacttgctgcagccagttaatgaccccctggactgggatggcacagacatccactttagcaaagtggagtgcctacttggagcagcagagcacactgagtacaagtccccttgcagcagagttgcaagaggtcttgggacctgtggtcctaatgcaagataaggccacggggcctgaggcacccctagaccctgagccttcaccatctaaggaaaggtgtccccccattcccaatggtgcgtggtacacagatgggtctagccgaggtgctgctgctgcctggaccagaccactgttgcagtccaacctagtactgccaccctatgttttgaaactggcaacttggatggagccatctgtgttcccagcccacataaaaatatgcacaagaagggtgcaaatcagcaagtccacagcttccagaggccccagctgggatgtgccctccctttggggactaatgaaagtgtgactcaagagtctatcatactgagttcatgctcccagtatttaaaactgcatgaaaataatgcagaaaataatttgctagcgttgacttgctcccagaacttaaactgatcaagcaggacatctgaggaataatactttttagcagggattggcaaactttttctgtaaaaggccagagtgtaaatattggctccgccactctgactgtgttccccccatcaaatgtagggcactccaacagccctgatcccaagtgtgaagctgtggcctcagctggacatcctgtctggtcttggttagcggaaaggcaacagaatgaatgtccactccagagataatcaaagatgtgatgggggtatgcaacatgaaagaacagagcatcaatgtattgttcctgccggcgagacacttgaaacgttatttatgtagtaaaacaaacacacatctattattaactacaatgtataattcacatgaatttctcagataaaacataagacttcaaagaaagtcatgcctgaaatttgcagctacgagctttacctacagtcttctaaaagcactaa

SEQ ID NO: 463335 - DNA, 400 bp, Homo sapiens
cttaaataagatcctcattcctgatccttcccttctgctcttggtcccacgcatcacagcagggcactccaacagccctgatcccaagtgtgaagctgtggcctcagctggacatcctgtctggtcttggttagcggaaaggcaacagaatgaatgtccactccagagataatcaaagatgtgatgggggtatgcaacatgaaagaacagagcatcaatgtattgttcctgccggcgagacacttgaaacgttatttatgtagtaaaacaaacacacatctattattaactacaatgtataattcacatgaatttctcagataaaacataagacttcaaagaaagtcatgcctgaaatttgcagctacgagctttacctacagtcttctaaaagcactaa

SEQ ID NO: 463336 - DNA, 616 bp, Homo sapiens
gtaaagaggtatcttaactataaacgctattgtgtaagctagtcatattaagttgtgcgcccaggagtttgatatttctcggacagtgagagtgagtagtagaatgtttatcgaccccacaatttctctctttcattttgctacattctactactgttgtctttcgaatctggtctggtttaagagagaaattgtggctgggtaactcttccaaagccagttgtgtttcattggaaacattttaaaacaagatacagcggccaaactctaagtgtttatctgagggaagcattctcggcaagccaggtcctgtaataattccagaactccctcgtggttcgttttcattttgcgtgtcacttctgtcatctgcccccaactggaaccctgtcgttcacgcctcgcccctttgggtgatcttgtctgtacagctaatattgtgggattctgtggctcccccttctctttcgggatgatgtttgatttgtgtttccttaaggtgtgagtcccattccctttctttttctgggtagcaatattttaggtcatgcgtgttttcttccttcgacagtatgttatggtggcatcgatacaccgggtccgagctcgattcgta

SEQ ID NO: 463337 - DNA, 1389 bp, Homo sapiens
agaaaccactcttgtctgccacaggcttcactcgaggctaaattccaagacccccccaatggaggcctgaaccctatatatgttttttcctacatggttgtctgtcaatatctgtgggggattggttccatgacctcctatggatgccaaaaatccatggatgctcaagaatttcttcacatggctcctggagaagtgaccatcacagttcgcctcatccgttcctttgaacatcgcaatttcaaacctgtagtgtatcacggagtgaatttggaccaaactgtaaaggaatttatcgtatttctaaagcaagatgcactaaagattattcatcaagcacataaatcaaagacaaatgaacttgtgttgagtttggaagatgacgaaagactcctgctgaaagaagacagcactctgaaagcagctggaatcgaggaggaggatgagaatgatgtgcattccgatctcttggctgaggacagtaggtgtctgctctccaaatatgcagaatgcaaatggctgttttcagaaggtatgctcagaattctcctgagggtcattttaagtgacgggttggagaaattctctagttcatcctttggctttttatctgcactgcagatccccgtggaacattctacacctgacgtcagtggagtttttgcttgtggacccagtacgaaaatacgtacttcaaaaagatttgatcagtagaagcaagaagagacttttacctagaaatgttacttataattttttgtcagcaattgtagttttatgggctaattcccctaagtaataaatttacatgtaagcttttttttttaagtgttattttctctctttcattttgctacattctactactgttgtctttcgaatctggtctggtttaagagagaaattgtggctgggtaactcttccaaagccagttgtgtttcattggaaacattttaaaacaagatacagcggccaaactctaagtgtttatctgagggaagcattctcggcaagccaggtcctgtaataattccagaactccctcgtggttcgttttcattttgcgtgtcacttctgtcatctgcccccaactggaaccctgtcgttcacgcctcgcccctttgggtgatcttgtctgtacagctaatattgtgggattctgtggctcccccttctctttcgggatgatgtttgatttgtgtttccttaaggtgtgagtcccattccctttctttttctgggtagcaatattttaggtcatgcgtgttttcttccttcgacagtatgttatggtggccgttcttcactcttacatagaaacagtgataatctggttactcggtaatgtgggtgtcggacccaggaaactgggggattccagaagcagg

SEQ ID NO: 463338 - DNA, 3090 bp, Homo sapiens
cctacacacgtgcacagacacgtagctgctgttcaggaactgagctaatggttttaaagtctgttccttatctttgctggaggcaggcagtagctgtgcagtgacagtgtgcctatgcagacagagggagcagtgaatagcaatagggtgtttccaccatggtcttcactcaggccccggctgaaatcatgggccacctccggatacgcagcctcctggcccggcagtgcctggcagagtttctgggtgtgtttgtactcatgctcctcacccaaggagctgtggcccaggctgtcaccagtggagaaaccaaaggcaacttcttcaccatgtttctggctggctctctggccgttacgatagccatctacgtgggtggtaacgtctcaggggcccacctgaatccagccttctccctggccatgtgcatcgttggacgcctcccctgggtcaagctccccatttacatcttggtgcagttgctgtctgctttctgtgcttcgggagccacctatgttctctaccatgatgccctacagaactatacaggtgggaacctgacagtgactggccccaaggagacagcctccatttttgccacctatcctgccccctatctgtccctgaacaatggcttcctggatcaggttctgggcaccgggatgctgattgtggggctcttggccatcctggacagacggaacaagggagtccctgcgggtctggagcctgtggtggtggggatgctgatcctggccctcgggttatccatgggtgccaactgcgggattccactcaaccctgcccgggacctgggcccacgtctcttcacctacgtggctggctggggtcctgaagtcttcaggtgggagacagactctcctggtgctggcctccactcaccttcctctgctaagggctctgtccctgggtccacagcactctgcctttaaaatagctctcttggcttcttaggacagtgttctttctccaagtcatattctccccctttctcccttgcttccctcccaacttttcactgaaacagtaagatttagaggttgtgttcttaggcatgccacattacttccatgcacattagtgacttcatcagcaaaattaatatattcagataattccctaaggcaagaggctggaccaagctctcctggggttccctcttctaaatactatgctttggtgacaaggcaatcctcttcctggtgtctaccaccctgggaacaactttagggcactctcttgttactgccccccgtccttggagaggggaaggctaagggagtcactcctgataccttcccactgtccttcttttgcagtgctggtaatggctggtggtgggtgcctgtggtggcccctctggtgggggccaccgttggcacagccacttaccagctgttggtggctctgcaccaccctgagggcccagagccagctcaggatctggtgtctgctcaacacaaagcctcagagttggaaactcctgcctcagctcagatgctggagtgtaagctatgattaggacaaccctcacttcactcatggaccctggagccagccactgaccccgcctgggaacaacagtcattcttcctctttgttaatgtgccagaacctgggaggcttctctgtttatctgtttggcatcccttcctcctaaactaagaaggatcctggacagggagaagtggaggaggataaggtaccaggactcaggcttctcatcccctcctcccgcaaagcggttttctgaccctcagggcctctcggaatgtagttgctcgagcccagccacgccgaggctcggaagggctaagaccctcccactgccccgcacaaagatggctgctccctcctccccgctccttctcccctccccaaaaccccctcccgccccccggcccccgccgccggctccgtcacttccgccccgccgtggccgaaactgacacaaagtagcgggccgaggccccgggggagcggggccgcagctgggggggcgggagcccgtggggagccgagccgagcgccccccgccccagcccccggcatgggcagtacggggccgccggggcgggcgccgagcgctgagcgctgagggtctcccatgggattgctgggatcttgctgggtgagatggcagtgtgtgcaaaaaagcgccccccagcggttgcccccgacaacgccggcagtccgctcacccgcattggcccggcccgggggtgggaggggaggcggggctcgcgcgcgagctttcgcctacgcggcgcgctggcaggctgcggctcctgcagtcggggagcgggcgggggcggaaccctgggcgtgctcggcgtgtccggggccactcagcgcacgctggcatccgccggggggaatggggggcggcggcggcggcgcagctgagctcgcggtgtccccgagcgccggcggccgggaggatggcctgggctgcgggtggggcgcgcgcccgacggctggggctcccctctgagcggctgcggctcctgcacctccccggggagccgccccgtcgatgccactaaggccaaggacatatagacggtctgccctcccccactcaaaccgggatcatgacggtccccaaggagatgcccgagaagtgggcccgggcccaggcgcctccctcttggagccgaaagaagccctcttgggggacagaagaagaaaggagggcgcgggctaatgaccgagaatacaatgagaaattccagtatgcgagtaactgcatcaagacctccaagtacaatattctcaccttcctgcctgtcaacctctttgagcagttccaggaagttgccaacacttacttcctgttcctcctcattctgcagttgatcccccagatctcttccctgtcctggttcaccaccattgtgcctttggttcttgtcctcaccatcacagctgttaaagatgccactgatgactatttccgccacaagagcgataaccaggtgaataaccgccagtctcaggtgctgatcaatggaatgtgagtgcctgttggagacaagagctctggggacgaagggggtcccttaggaa

SEQ ID NO: 463339 - DNA, 1229 bp, Homo sapiens
gcaaattcagagcagagccacagcgaagcctggaggtagaggaatgccccccggccagcagtggttcagggccgtgcttaggagcaccaaacctgagcctgggcgctgcatgctccgagggccaatcccagcacacactgttcccccactgtctgaggcccagcacctgttgtctagaatcagctcagaaggaaggctgcactgtcccaggggcacccagcctccaaatgagcctcaaggaagggtctggaaggccagacaatactatggtcagattatggacttgggaattgctgcagatgccattggggaaagaaaatggaacaacagaggtcccatccttccaaatgtcatccactggtcttatccttatggaaatagacagtacacggatctggaatggaagcaaataataaccgggtctccagattccatcgtatcacagaacatagaaccaagaaagtaccttagaagtcatctgatccagtcacccctgttttaccaatgaggaatctagacccagaagaagttaaaggacttacccaagagtacccaacaactctctcaccaccccaggctcccatctttgtgtctctcctgtgtgagctgttccctgaagttcttcctgaacttgcacattgcctttccctttgattttaaatccttggctcaaatgacatgcccggactatatcgtgtgatatgagcttgaaaagtaatttacgtacaagtcttgaaagcaaatcaagttttaaaacaaagtagcatctactctgccccagccttgacatcttattacatagcaaatgctggctctttaatttccctaatcaagactggtcctatttagcccacctcctcaaggggtcccagcactagccccactccgacgcctgatgaagttccagaacagtggaatcaagcacagagatgggcacgcctctttacagaaccaaagattcagaactgtgccttaccctttgcttatgaggcggaggaggaggaagagaaagaaccaccgcaaagagagatggcaacaaaggtaaaatgaaggccgggccagccgatcccactcaggctgaccacagtgagggagcagcattaaaatgagaaaggatcaggtctcgaagcccagcccttcccgctgaatctcgtcctttgcttcatccattccattaaataagtcatattgaaaataaattattattaatacaacagtagctaacatta

SEQ ID NO: 463340 - DNA, 459 bp, Homo sapiens
gtgtaaacaagcggaacgtctttgcgctctataaaaacaaggttaaattacttgcagatccgggcaacgtggagagatgtaggaagtgaacctgaagcctgacacactcaaggtctcggaaccgaaaataataggaattgttcttatttttccagtggaatcaagcacagagatgggcacgcctctttacagaaccaaagattcagaactgtgccttaccctttgcttatgaggcggaggaggaggaagagaaagaaccaccgcaaagagagatggcaacaaaggtaaaatgaaggccgggccagccgatcccactcaggctgaccacagtgagggagcagcattaaaatgagaaaggatcaggtctcgaagcccagcccttcccgctgaatctcgtcctttgcttcatccattccattaaataagtcatattgaaaataaattattattaatacaaca

SEQ ID NO: 463341 - DNA, 594 bp, Homo sapiens
gaaccatatcagttgttgagacccacaatggggaaaggacctactgaaggtcacacaggaccgatcatattggacccagagccacctcagagacctcaaggaactgcagtctttccatggtggaaccagcattctgtgcagagggcagataagaagatggcagagcaggagaggagtggagaaagaggggctccagaatccatgagtgctgtggtactgctgaagcagcgggagctggtggtgcagttcagtctcagctggaggtgtgcagtatgtgagtgctctgagtacaatgacgttccagtgctctctgttcagggacatgggagccattttgctgggcacatagatctgaaggttggattggggtttcctttgtgcatcacggttgcaaatgcagcagtcgatatcacgcacacaatatttttgaatgggttgatggaggttgcacgttgagtgccctcagcccttttcagtggaggagagtggagagggactcagtggcagtaaaggcaaggccaccgtaggggaagaaacacaaagtacttgcaccgtcgttttacaagaaaatgacacatgctctaaattgtacat

SEQ ID NO: 463342 - DNA, 7405 bp, Homo sapiens
  misc_feature (5464)..(5464): n is a, c, g, or t
  misc_feature (6517)..(6517): n is a, c, g, or t
ggtgaaggattcacacgtttattatgttttttttttcaatgggagcctccgaacgctgctgtttctagtccatcaatgaattcctttactcttccctcaaaaaataagagggaagcccctgtggtggccagagcagccttgttcctggaatgtgctcgttttgttcaccgctgcaaccgtggcaactggccagagtggatgaaagggcaccacgtgaacatcaccaagaaaggactttcccggggacgctctcccattgtgggcaacaagcgaaaccagaagctgcagtggaatgcagccaagctcttctaccaatggggagacgcaattggcgtccgattgaatgagctgtgccacggggaaagtgagagcccagccaacctgctgggtctcatttacgatgaagagaccaagaggagacttagaaaggaggatgaggaggaagactttttagatgacagtaaggagactccctttactacaagaacccctgcttgtactgtgaacccctctaaatgcggttgcccctttgccttgaagatggcagcatgtcagcttcttctggagattaccaccttcctgcgagagaccttttcttgcctgcccagacctcgcactgagcctctggtggacttggagagctgcagacttcgtttggatcccgagttggaccggcacagatatgagaggaagatcagctttgctggggtcctggacgaaaatgaagactcaaaagattctctccacagcagcagccacactctcaaatcagatgcaggagtcgaggagaagaaagttcccagcaggaagatcaggataggaggttctcgcctgctccagattaaaggaacccgcagtttccaggtgaagaaggggggttccttgtccagcattcgccgggtcggcagcttaaagagcagcaagttatcacggcaggactcagagtctgaggctgaggagctgcagctgtcccagagcagggacactgtcactgacctagaagggagtccttggagtgcaagcgagcccagcattgagccagagggaatgagtaatgccggcgcggaggagaattaccacagaaacatgtcgtggcttcatgtgatgatcttgctgtgcaatcagcagagtttcatctgcactcacgttgactactgccatccccactgctacctgcaccacagccgctcctgtgcccgactggtcagagccatcaagctactctatggagacagtgtggactccctgagggaaagcagcaacatcagcagtgtggctctccggggcaagaaacagaaagaatgctcagataagtcatgcctgaggacaccttctctaaagaagagagtttcagatgccaatctggaaggaaaaaaagattccggaatgctgaagtacatcagacttcaggtgatgagcttgtcgcctgctcccttatctctgttaatcaaggcagcaccaattctgacagaggagatgtacggagacatccagccagctgcctgggagctcctgctcagcatggatgagcacatggcaggggcagcagctgccatgttcctgctgtgtgcagtgaaggtgcctgaggccgtgtccgacatgctgatgtcagagttccaccacccggagactgtgcagaggctgaacgctgtcctcaagttccacacgctctggaggtttcgctatcaggtctggccccggatggaggaaggggcacagcagatttttaagattccgcctcccagtatcaatttcacccttccctcgccggtgcttggaatgccatccgtcccaatgtttgacccaccgtgggttcctcagtgcagcgggagtgtccaggaccccattaatgaagaccagtctgtgagtaacagacacttccaggttccatggtaaatccttttcagcccgggctgtgtcccgctcccatcaaagggcagaacacatcttaaagaacttgcagcaggaggaagaaaagaaacgacttggtagagaagccagcctcatcactgccatccccatcacccaggaggcttgctatgagcccacatgcacgcccaactcagaaccggaagaagaagaagaagtcaccaatctggcatcccgtcgactgtctgtgagtccatcctgcacctccagcacttcccacaggaattattccttccgccgcgggtcagtctggtcagtgcgttcagccgtcagtgctgaagatgaggaacataccactgaacacacgccgaaccaccatgtgcctcagcccccacaagcagtgttcccagcatgcatctgtgcagcagtacttcccattgttcatctgatggaggatggtgaggtgcgggaagatggagtagcagtgagtgctgtggctcaacaagtcttatggaactgtctaattgaagatccatcaacggttcttcgacattttctggaaaaactgaccatcagcaatagacaagatgagttaatgtacatgctgcgcaaacttctcttgaatattggagactttcctgctcagacatctcacatcctattcaactatttggtaggattaatcatgtactttgtgcggaccccctgcgagtgggggatggatgccatttcagccaccctgacattcctgtgggaggtggtgggttacgtggagggcctcttcttcaaggatctcaagcagacgatgaagaaggagcagtgtgaggtgaagctcctggtgaccgcttcaatgccaggtactaaaaccttggtagttcatggacagaatgagtgcgatatcccaacccagttaccagtccatgaagacactcaatttgaagccctgttgaaggagtgtctggagttttttaatatcccagaatcccagtcaacacattattttcttatggataaacgatggaaccttatccactacaataagacctatgttcgagatatttatcctttccggaggtcagtatctccccagctgaatcttgtacatatgcatccagagaagggacaggagctcattcagaaacaggtgttcacccgaaagctggaagaagtagggcgggtgttgtttctcatctccctaacccagaagatccccacagcccacaaacagtcccacgtctccatgcttcaggaagacctcctccgcctgccctcattccctcgtagtgctattgatgctgagttttcactcttcagtgatcctcaagctggaaaggaactgtttggcctcgacactcttcagaaaagcttgtggatccagctgctggaggaaatgttcctgggcatgccgagcgagtttccatggggagacgaaatcatgcttttcctcaacgtttttaacggggctctgatcctccacccggaagacagtgccctgctcaggcagtatgctgccaccgtcatcaacaccgcggtgcacttcaaccacctcttctctctcagcggctaccagtggattctccccaccatgctgcaggtgtactccgactatgaaagcaatccccagctgcgtcaagccatcgaatttgcctgtcaccagttctatattctacaccggaagccctttgtgctccagctgtttgctagtgtggcccctctcctggaatttcctgatgctgccaataatgggcccagcaaaggtgtgtcagctcagtgcctgtttgacttgctgcagtccctagagggagagaccaccgacatattagacatcttagagctggtcaaagctgagaagcctctcaagtcattagatttctgctatggaaacgaagatctgacattttctatcagtgaagccattaagctctgtgtcactgtggtggcgtatgctcccgaatcattcagaagtcttcagatgctgatggtcttagaagccttagttccatgttacctacaaaagctaaagaggcagacatcacaggtggagacagtacctgctgcccgagaggagattgcggccactgctgctcttgcgacgtccctacaggcccttttgtacagtgtagaggtcctcaccaggcccatgacagccccacagatgagcaggtgtgaccaaggtcataagggaaccaccacagccaatcacaccatgtcgtctggggtgaacaccaggtaccaggaacaaggagccaaactgcactttatcagggaaaaccttcatttactggaggaagggcaaggcattcccagagaggaactggatgaacgaattgctcgggaagagttcagaagaccccgggagtccttactgaatatttgcactgagttctataagcactgtgggccacggctgaagatcttgcaaaatctggctggggagcctcgggtcattgccttggaactgctggatgtgaagtctcacatgaggttggcagaaattgcacactcccttctgaagctggcaccatatgacactcagacaatggagagtcgtgggcttcggcgctacatcatggagatgctacccattactgactggacagctgaggcagtgaggccggccctcatcctcattttaaaaagattggatagaatgttcaacaaaattcataagatgcctactttgaggcgacaggttgagtgggagcctgccagcaatttgattgaaggggtttgtttgacacttcagaggcagccaatcatatccttcctgcctcaccttaggtcactgatcaatgtctgtgtcaatctggtgatgggagtggtaggaccttccagtgttgctgatggattaccccttcttcatctcagcccttatctctcaccacctctgcccttcagcacagctgttgtccggcttgtagcattgcagatacaggctttaaaagaagattttcctttaagccatgtgatctccccattcaccaatcaagagcgaagggaggggatgcttttaaatctgctcatcccatttgtgctcacagtaggatctggaagcaaagatagcccatggctggagcagcctgaggtgcagctgctgctgcagacagtcatcaatgtactcctcccaccgcggatcatcagcacatccaggagcaagaacttcatgttagagagctccccagcccactgctccacccctggggatgcggggaaagacttgcgcagggaagggctggctgagtccaccagccaagcagcatacttggcgctgaaggtgattctcgtctgctttgagaggcagctcggaagccagtggtactggctgagcctccaggtgaaggagatggctctgcggaaggtgggaggcctggccctttgggatttcctcgacttcatcgtgcggacccgaatacccatctttgtgcttttgcgccctttcatccagtgcaagctgctggcccaaccagcagagaatcatgaagagctttccgcccggcaacatattgccgaccagctggagcggcgcttcataccacgccctttgtgtaagagctcgctcattgctgagttcaacagtgaactaaaaattctaaangaggcagttcatagtggatcagcctaccaaggcaagacatccatcagtaccgtgggcacctccacctctgcttaccgcctgagcttggccaccatgtcccgctctaacacgggcacgggcactgtctgggagcaggacagtgagccatcccagcaggcttcgcaggacaccctgagtcggactgatgaggaagatgaggaaaatgactctataagcatgcccagcgtggtaagtgaacaagaagcttacctcctgagtgccattggaaggaggcgattctccagccatgtctccagcatgtctgtacctcaggctgaggtgggcatgctacccagccagaggtaaacagctatggttatactgtactctgcatttgggggcaaagttagaaattctgaaaatacactcctgttattctacaaagacagaaagagaagcaagcaatggtaatgtttttagatagatcattccacaaaggatttgtcaactaggttcctgcaggcaacactttgcagttttctaagccaagctagtagaagggatcccaatttccaagtattgtctctccttaaaaattttccatagacacatggtcttctttctgttgtcaaatggcattcttgtatttcagatttatcattagctaagctaatgatgggtacttggcaagagttaggaccatctttatgtttttggtaaagtttaggcttctgatatattattagtattcagttgtaggtagtgacacttaaccaagcagaaaaggatctatgccactgagtgtgaccttgggcaggtcatttaaccgtaatccacagttctccctctgtaaaatgaagaggtttgctaaaatgatctttaagataacttctcatctatagttctatgattccatgacaaaacccctttaaatattttgtgtgttctctgtctcttaagaatataagtaaaaaaaaacttcccatgtatatatatatatacacacacacacacacaatgaaagtataatgaaaatgatctcacatgagtcaaaacatttatcttaagtagatnaatgttttggaaccaatgatattttcactttaggaattgagtttttcaaggaattgaccttatgtgattttagtgtgttgcttatttttaatacctatagattcattgtagtacaattcagacatggaaaataataaaattcagggcatattctgatgttcacataaaaccagtttatatgtaggaataattaccctgtacccaaatcctttcgcaaatggttcgtgaactacacagatgaaataaaatttgtgaaataaagcccaagtttggagaatatcaaagaatagggtaaaatgataaatcattaataaacaagttgcatactttttaagaaggcaatgttttatataagtaccatttaattattacgaagattaatactatataaaggtttgtatcattgtaagaaattgttttacctaccatttggtaattttcctttgaaaagaaagtcttatacacaaaaagtgtgaacaaaatcaaagccaaacaataacatgtcctaaaaaagatataaagccacacaagcagctaatattggtagctatcagttatttttaattgctagcaatgtgcatggttctatgaagaatatttttaaaaatcaattatttgaaagttttatttaaattatagaattgtagaaatttcataaagaggtttttcattgttatttacctaaaataaccaggccatcaatttcctttttacatattcattaaggggtcaagttgtttgcagggagaaaatttgtcctattatacatatcttgattgtacattttcttgatttctagaaatcaagaaaaaataatatagttaaatagtttgggcttcattcatattttggaagactagcgaaggtaataatactgtctctgtacat

SEQ ID NO: 463343 - DNA, 5780 bp, Homo sapiens
ggtgaaggattcacacgtttattatgttttttttttcaatgggagcctccgaacgctgctgtttctagtccatcaatgaattcctttactcttccctcaaaaaataagagggaagcccctgtggtggccagagcagccttgttcctggaatgtgctcgttttgttcaccgctgcaaccgtggcaactggccagagtggatgaaagggcaccacgtgaacatcaccaagaaaggactttcccggggacgctctcccattgtgggcaacaagcgaaaccagaagctgcagtggaatgcagccaagctcttctaccaatggggagacgcaattggcgtccgattgaatgagctgtgccacggggaaagtgagagcccagccaacctgctgggtctcatttacgatgaagagaccaagaggagacttagaaaggaggatgaggaggaagactttttagatgacagtaaggagactccctttactacaagaacccctgcttgtactgtgaacccctctaaatgcggttgcccctttgccttgaagatggcagcatgtcagcttcttctggagattaccaccttcctgcgagagaccttttcttgcctgcccagacctcgcactgagcctctggtggacttggagagctgcagacttcgtttggatcccgagttggaccggcacagatatgagaggaagatcagctttgctggggtcctggacgaaaatgaagactcaaaagattctctccacagcagcagccacactctcaaatcagatgcaggagtcgaggagaagaaagttcccagcaggaagatcaggataggaggttctcgcctgctccagattaaaggaacccgcagtttccaggtgaagaaggggggttccttgtccagcattcgccgggtcggcagcttaaagagcagcaagttatcacggcaggactcagagtctgaggctgaggagctgcagctgtcccagagcagggacactgtcactgacctagaagggagtccttggagtgcaagcgagcccagcattgagccagagggaatgagtaatgccggcgcggaggagaattaccacagaaacatgtcgtggcttcatgtgatgatcttgctgtgcaatcagcagagtttcatctgcactcacgttgactactgccatccccactgctacctgcaccacagccgctcctgtgcccgactggtcagagccatcaagctactctatggagacagtgtggactccctgagggaaagcagcaacatcagcagtgtggctctccggggcaagaaacagaaagaatgctcagataagtcatgcctgaggacaccttctctaaagaagagagtttcagatgccaatctggaaggaaaaaaagattccggaatgctgaagtacatcagacttcaggtgatgagcttgtcgcctgctcccttatctctgttaatcaaggcagcaccaattctgacagaggagatgtacggagacatccagccagctgcctgggagctcctgctcagcatggatgagcacatggcaggggcagcagctgccatgttcctgctgtgtgcagtgaaggtgcctgaggccgtgtccgacatgctgatgtcagagttccaccacccggagactgtgcagaggctgaacgctgtcctcaagttccacacgctctggaggtttcgctatcaggtctggccccggatggaggaaggggcacagcagatttttaagattccgcctcccagtatcaatttcacccttccctcgccggtgcttggaatgccatccgtcccaatgtttgacccaccgtgggttcctcagtgcagcgggagtgtccaggaccccattaatgaagaccagtctaaatccttttcagcccgggctgtgtcccgctcccatcaaagggcagaacacatcttaaagaacttgcagcaggaggaagaaaagaaacgacttggtagagaagccagcctcatcactgccatccccatcacccaggaggcttgctatgagcccacatgcacgcccaactcagaaccggaagaagaagaagaagtcaccaatctggcatcccgtcgactgtctgtgagtccatcctgcacctccagcacttcccacaggaattattccttccgccgcgggtcagtctggtcagtgcgttcagccgtcagtgctgaagatgaggaacataccactgaacacacgccgaaccaccatgtgcctcagcccccacaagcagtgttcccagcatgcatctgtgcagcagtacttcccattgttcatctgatggaggatggtgaggtgcgggaagatggagtagcagtgagtgctgtggctcaacaagtcttatggaactgtctaattgaagatccatcaacggttcttcgacattttctggaaaaactgaccatcagcaatagacaagatgagttaatgtacatgctgcgcaaacttctcttgaatattggagactttcctgctcagacatctcacatcctattcaactatttggtaggattaatcatgtactttgtgcggaccccctgcgagtgggggatggatgccatttcagccaccctgacattcctgtgggaggtggtgggttacgtggagggcctcttcttcaaggatctcaagcagacgatgaagaaggagcagtgtgaggtgaagctcctggtgaccgcttcaatgccaggtactaaaaccttggtagttcatggacagaatgagtgcgatatcccaacccagttaccagtccatgaagacactcaatttgaagccctgttgaaggagtgtctggagttttttaatatcccagaatcccagtcaacacattattttcttatggataaacgatggaaccttatccactacaataagacctatgttcgagatatttatcctttccggaggtcagtatctccccagctgaatcttgtacatatgcatccagagaagggacaggagctcattcagaaacaggtgttcacccgaaagctggaagaagtagggcgggtgttgtttctcatctccctaacccagaagatccccacagcccacaaacagtcccacgtctccatgcttcaggaagacctcctccgcctgccctcattccctcgtagtgctattgatgctgagttttcactcttcagtgatcctcaagctggaaaggaactgtttggcctcgacactcttcagaaaagcttgtggatccagctgctggaggaaatgttcctgggcatgccgagcgagtttccatggggagacgaaatcatgcttttcctcaacgtttttaacggggctctgatcctccacccggaagacagtgccctgctcaggcagtatgctgccaccgtcatcaacaccgcggtgcacttcaaccacctcttctctctcagcggctaccagtggattctccccaccatgctgcaggtgtactccgactatgaaagcaatccccagctgcgtcaagccatcgaatttgcctgtcaccagttctatattctacaccggaagccctttgtgctccagctgtttgctagtgtggcccctctcctggaatttcctgatgctgccaataatgggcccagcaaaggtgtgtcagctcagtgcctgtttgacttgctgcagtccctagagggagagaccaccgacatattagacatcttagagctggtcaaagctgagaagcctctcaagtcattagatttctgctatggaaacgaagatctgacattttctatcagtgaagccattaagctctgtgtcactgtggtggcgtatgctcccgaatcattcagaagtcttcagatgctgatggtcttagaagccttagttccatgttacctacaaaagctaaagaggcagacatcacaggtggagacagtacctgctgcccgagaggagattgcggccactgctgctcttgcgacgtccctacaggcccttttgtacagtgtagaggtcctcaccaggcccatgacagccccacagatgagcaggtgtgaccaaggtcataagggaaccaccacagccaatcacaccatgtcgtctggggtgaacaccaggtaccaggaacaaggagccaaactgcactttatcagggaaaaccttcatttactggaggaagggcaaggcattcccagagaggaactggatgaacgaattgctcgggaagagttcagaagaccccgggagtccttactgaatatttgcactgagttctataagcactgtgggccacggctgaagatcttgcaaaatctggctggggagcctcgggtcattgccttggaactgctggatgtgaagtctcacatgaggttggcagaaattgcacactcccttctgaagctggcaccatatgacactcagacaatggagagtcgtgggcttcggcgctacatcatggagatgctacccattactgactggacagctgaggcagtgaggccggccctcatcctcattttaaaaagattggatagaatgttcaacaaaattcataagatgcctactttgaggtgagaatgcctccgagttagctgttgctatcacaaatgtcaaagttaagatttgtcattttttaagatggtggatcattctggagttgaatggatgacttgaaagttttctttggtatatgtgcatagttaatagggtctatgaatgcctaagtagcaaagcctacattttgagaaaaataacattttctttaaaagtatatgtgctcatcttgaaaaaaatctatccatttcttagctatcatgctcctcatctgacacatataaaaatttcaattagtaccctttaatcccttttaaaataagggagggttggccttataaatgaaacaactaatgagaaaagaaaaggaattttatgttcaaaatactatatttaacatagctagttaacatatttaggaattgagtttttcaaggaattgaccttatgtgattttagtgtgttgcttatttttaatacctatagattcattgtagtacaattcagacatggaaaataataaaattcagggcatattctgatgttcacataaaaccagtttatatgtaggaataattaccctgtacccaaatcctttcgcaaatggttcgtgaactacacagatgaaataaaatttgtgaaataaagcccaagtttggagaatatcaaagaatagggtaaaatgataaatcattaataaacaagttgcatactttttaagaaggcaatgttttatataagtaccatttaattattacgaagattaatactatataaaggtttgtatcattgtaagaaattgttttacctaccatttggtaattttcctttgaaaagaaagtcttatacacaaaaagtgtgaacaaaatcaaagccaaacaataacatgtcctaaaaaagatataaagccacacaagcagctaatattggtagctatcagttatttttaattgctagcaatgtgcatggttctatgaagaatatttttaaaaatcaattatttgaaagttttatttaaattatagaattgtagaaatttcataaagaggtttttcattgttatttacctaaaataaccaggccatcaatttcctttttacatattcattaaggggtcaagttgtttgcagggagaaaatttgtcctattatacatatcttgattgtacattttcttgatttctagaaatcaagaaaaaataatatagttaaatagtttgggcttcattcatattttggaagactagcgaaggtaataatactgtctctgtacat

SEQ ID NO: 463344 - DNA, 864 bp, Homo sapiens
tgggaagacagggatgtggatgaatggaatggaggtgcactgtgcctggtgctgtagggaggagagacctgggcctgaaacaccagattaaaggatttgggttggatcccaaggcacagtgtctgtgtgaatccttagagccaggtctcactgcctgccatagccagcaaggggctggcctggctggggcagagacacagggacagcaagaaatgaagtgggagggctcagggcctgcagcatgtactgcagctcccatgccagctgcagaggactgggcccacctagaggccctgggggaatctgggggcccctctattttccttcagaggagaggagaaattcttggaggttatgagaacattaatggtggtgaaatcctaactttgccacttactagccatgtgaacttgggcaagtgacctaatcctctgcatttcatctctaaattggggagaatagaagcatctacttcatgtagtagccaggattagaagagggaggaataactgggccctggatagaatgtgatgaatgtatattcttaatgagaagtggaaataatttgtggttgagagctgtgcctcagatcagagtgacaggatacatggctaggctatattttccagcagattaagagctgcggcccaagactctgaaatatgaagaaaaaaggagaagatgacagcatatctttttaaagaaatattttccagccaaatggtgcagcagaggacttccaggaatttgttcttgttctgtatcaaaggtgaagagttcgtagccttcaaggaaacaagaaaccatgggatggagtgaaggaaggtggcctggaaccagctgctgagcctctctgagccccag

SEQ ID NO: 463345 - DNA, 1612 bp, Homo sapiens
tgggaagacagggatgtggatgaatggaatggaggtgcactgtgcctggtgctgtagggaggagagacctgggcctgaaacaccagattaaaggatttgggttggatcccaaggcacagtgtctgtgtgaatccttagagccaggtctcactgcctgccatagccagcaaggggctggcctggctggggcagagacacagggacagcaagaaatgaagtgggagggctcagggcctgcagcatgtactgcagctcccatgccagctgcagaggactgggcccacctagaggccctgggggaatctgggggcccctctattttccttcagaggagaggagaaattcttggaggttatgagaacattaatggtggtgaaatcctaactttgccacttactagccatgtgaacttgggcaagtgacctaatcctctgcatttcatctctaaattggggagaatagaagcatctacttcatgtagtagccaggattagaagagatggggccacttgagggaaaagacctacccaagggcacataatctgtacatgagagagagccagatgtaacagactgagtactggacttggggttaaacagactgtgaatctttccaccccattggcaagttaccttggacaagttactttaatctccctgagcctcaatctgctcatctttaaaatggaagtcttaataatctcctcataggggattaaacaagaacatgagcacaccttttctaacacagtgtctgagatgagtagatgttcaaaataggggttcatttgcttctttgctctttggctcccacctttttttcaactgccccaaatctctttctgctcaccttttcttgttccatggggtctttacaccaccgtgttagcatgtgtttctgctacatggttacttcttttctagaagcaagtgagtgagggagggcccagtgggcagctcagaactcagtaataaaaccacacagaatccatctcaaacaaaacggcagattggcaagagtgacctgcatgtagtttttgatttcatttacagtatgcaaggactgtgggaggacaactggaggggagtcaggaaatgggggttcaagtccatggagtggctatgtgatgctgggctggccccttttcctctctgggcctcagtttccccatgtgacaataaggggtcaggccagggaatattctgacactctgaatttttaattttattctaattatatgtttcagggaggaataactgggccctggatagaatgtgatgaatgtatattcttaatgagaagtggaaataatttgtggttgagagctgtgcctcagatcagagtgacaggatacatggctaggctatattttccagcagattaagagctgcggcccaagactctgaaatatgaagaaaaaaggagaagatgacagcatatctttttaaagaaatattttccagccaaatggtgcagcagaggacttccaggaatttgttcttgttctgtatcaaaggtgaagagttcgtagccttcaaggaaacaagaaaccatgggatggagtgaaggaaggtggcctggaaccagctgctgagcctctctgagccccag

SEQ ID NO: 463346 - DNA, 2075 bp, Homo sapiens
ctctagaatttttcttaaacaacagaatctccgacagcttgtttaccgggcaggccataagtgcaggggagttaacttccctaaggacaaccctcaattaaaggctggatggtgatgagcagatttcatctttctgccaagaacagattgaccctgagcccaggaattgctgccaaagtcggcctttggtgcagctgtaagtcggatggaatccaccttcctgacgtcagacccacccactggaacactgctcctctgactggggcttccctgaatggaaactacatgtcatactgcaaagaggacacactggaccctggtgtgagctgcactggcagaaatgtcactgtaagatcccaaggtattattataaattgtcaatatggcagaattaaaggcagccctcctcaagaataccactgcaacactgagcccacccttatcccattctactgtacaccaccagagaacatcactccgaatccagtgtcttttaccagagacaatctgattcctatagattgggatatttctatttttaattctccttaacagagaactctaagtccagaatcttctgcaaaggcctgtgaagtgctattctgatcatcccttcatgttcctgagttgctctgggataatgttgtcgggggaagacccccaggggaacagctgattggattctggcaagatggaccaaacatctgcttcaaacaaaagacatctgcatatttcacatttatttttcataatttacagaagcaacctgccaaaattcagcaagggagaatacactagcacataattagcttaaagtttgcttgctttagaagtatgagcatgaagcccaggagctcacctgggaggacatcaaggaatggcggaactgaggtttgatttctgtgaattttgttttagacctcatatgccagggcagaagacctggccctgctaggcttggaagggagaagcaaatatgccagagatgacacgaggaggttctttcgccctcgtgtcaaataaaaagcctccacaccaaaagagtggtcaaagataatatcatttattaaataagatctgattaatcagaaagattttgcttcaaccacttagcactacagttcacaggttagaaaatgatgcaatgctacatggcgcttaatttaaaatgtatataccgagagtaccaatggcatggtgagaaattatgtgtgggtgtttcattattgttcaaatcatcagaaagctgttatttgtcaaaaaaatactaggaaatatattggttgcctagatgctagtatatttggaatacatgatgaaaacataaagagaacaagataatggactatattatcagtcttaatatatcctgctatcatgaatacaactattttccccctataaactacatcatcccagttgaaattcaaacttggcaaggtcataattacatgaaataactaaagcttgcttagagaataaaaagatttggggggggggaggtaaggaacccagtgagaaagacagagagaagtatggacaagaaacagatcctaaacctgttttgttttatttttggtagtagttgtttatttttgaaaacattcaaaccacctgtattggtggctgttattatgaaataaataaactgagaaacaacaagacaatttggcctctacaatttgtttagttttgactaagtatttgccttggaagaagtatgtgtacaatactcatttttaaaagatgcaacagtcacctcgttacttggagttttacttgagacttgaatggactgaaaccacctggtcaccactagaagctacatcaaggaaaagaaaggcaacatattgaatctcttgggagaaactcatcctgtatctgctcgattgaaaacatgaaggtgcacattccaagctgcatatgctcaggtccgagtttccaaggaaacaagggactgctcatctatctgcaaaactgaactgacgagtcactttcagcttgttacaaaccttgattctgaatcaaattctagtgtgcagtctaaaaattctcactgccttgtcatttctgcc

SEQ ID NO: 463347 - DNA, 981 bp, Homo sapiens
  misc_feature (1)..(2): n is a, c, g, or t
  misc_feature (6)..(6): n is a, c, g, or t
  misc_feature (8)..(9): n is a, c, g, or t
  misc_feature (11)..(11): n is a, c, g, or t
  misc_feature (13)..(13): n is a, c, g, or t
nntttntnntncnagaaatggggttttgccatgttgcccaggctgttaaattctttaaaagggaaaactattaacactttgcctatttgtgttataataccttattacaggggtcgccaacccctggggccacagactggtactactccatggcttgttaggaaccaggccacccagcagcagactcaaacctttgtctgcgaggcaatcttcagagtggcagtcaacctttgcacctcatcttgtgccttgtcttcttcctcttttacagctctcagttgctggcgcaaattcataacttcgagatgcaacagcttcaggtccttagaatgctcttcctgtattgcattcagtcgatctttcagaaaagctaccagaccgcacaggaggggcatcaagcagcagaaagaaggttcacaggtagaaagaacttgccttgagtctcagatgagactttggaattgagacttgggacttctgaattaacgctggaataagcctttagtgtactattgagaagtgataattatattttgcagtgcgagaagaacaagatttggggtccaagggtggaatgatatagtttggatgtttgtcccctccaaatttcatgttgaaatgtgatctccattgttggaggtaaggcctggtgggagctgttaggtcataggggcagatccctcatgaacggcttggtgccctccccatggtaatgagtgagttctcactctgttagttcacactggttgtttaaaggggcctggtacctcctcctctctcttgctccctctctcaccatgtgactcacctactccccctttgccttccaccatgattgtaagcgtcctgaggcctcaacagaagtcgagtagttgctggcaccatgtttttacagcctgcagaactatgaaccaaatatatctcttttctttataaattacccagtctcaagtattcctttatagcaatgcacaatggact

SEQ ID NO: 463348 - DNA, 2519 bp, Homo sapiens
  misc_feature (2506)..(2506): n is a, c, g, or t
ggcttctatgagagcagggggttctgtgtcccgctctgtgcccaggagtgtgtccatggccgttgtgtggcacccaatcagtgccaatgtgtgccaggctggcggggcgacgactgttccagtgagtgtgccccaggaatgtgggggccacagtgtgacaagccctgcagctgcggcaacaacagctcgtgtgatcccaagagtgggtgccatggggcaccctgcgatccccagactggagcctgcttctgccccgcagagagaactgggcccaggtatgtaatggggggaacgacactttaacaagatcgcagacacaaggccacacagatctatgtggggaaatgaggtgactcagacagggccccaagtgtggggatgatgtggaggccaagatcctggtcccagtggatcctattcctcacgagtggagtgaccttgagcaaatcattgactcgttgtgggcttgtttcctgtctgtaaaacgggaatagtattgtctacatggcagggtggctgtgaagataacatgagctgtgacgtgtcctgttcccagggcacttctggcttcttctgccccagcacccattcttgccaaaatggaggtgtcttccaaaccccacagggctcctgcagctgcccccctggctggatggtatggagggtggggcctgtgggcatggggtgtgggtctggggagaattctgtgggtggtgctaagcagggctccaaggtgagtgaggggggtgagctctgtggttagaattctgtgggtggtgctaagcagggctccaagggcaccatctgctccctgccctgcccagagggctttcacggacccaactgctcccaggaatgtcgctgccacaacggcggcctctgtgaccgattcactgggcagtgccgctgcgctccgggttacactggggatcggtgagtggcgtggggcgggcgggagacgggagggaggaggtggggcgccgccaggctcactcagctaggtgcccaggtgccgggaggagtgcccggtgggccgctttgggcaggactgtgctgagacgtgcgactgcgccccggacgcccgttgcttcccggccaacggcgcatgtctgtgcgaacacggcttcactggggaccgctgcacggatcgcctctgccccgacggcttctacggtctcagctgccaggccccctgcacctgcgaccgggagcacagcctcagctgccacccgatgaacggggagtgctcctgcctgccgggctgggcgggcctccactgcaacgagagctgcccgcaggacacgcatgggccagggtgccaggagcactgtctctgcctgcacggtggcgtctgccaggctaccagcggcctctgtcagtgcgcgccgggttacacgggccctcactgtgctagtctttgtcctcctgacacctacggtgtcaactgttctgcacgctgctcatgtgaaaatgccatcgcctgctcacccatcgacggcgagtgcgtctgcaaggaaggttggcagcgtggtaactgctctgtgccctgcccacccggaacctggggcttcagttgcaatgccagctgccagtgtgcccatgaggcagtctgcagcccccaaactggagcctgtacctgcacccctgggtggcatggggcccactgccagctgccctgtccgaaggggcagtttggagaaggttgtgccagtcgctgtgactgtgaccactctgatggctgtgaccctgttcatggacgctgtcagtgccaggctggctggatgggtgcccgctgccacctgtcctgccctgagggcttatggggagtcaactgtagcaacacctgcacctgcaagaatgggggcacctgtctccctgagaatggcaactgcgtgtgtgcacccggattccggggcccctcctgccagagatgtgaggctccctactgccccttccacctgccaccagcagggggcagtgtagtgtcagctgccagagcacccctccccccgcgcccgccgcccacctctcccaccttacccccggtctcttcctctgacccgtcttcagactagttactgcagtgggaaggtgggagggagacggtggggtaagggctgattgaggattggcctctgcccccaatcaccatgtacccctttcccccagcctgtcagcctggccgctatggcaaacgctgtgtgccctgcaagtgcgctaaccactccttctgccacccctcgaacgggacctgctactgcctggctggctggacaggccccgactgctcccagcgctgccctctggggacatttggtgctaactgctcccagccatgccagtgtggtcctggagaaaagtgccacccagagactggggcctgtgtatgtcccccagggcacagtggtgcaccttgcaggattggaatccaggagccctttactgtgatgccgaccactccagtagcgtagagggttaacccacagatcattcttgataatctcantaatcctgtcagc

SEQ ID NO: 463349 - DNA, 886 bp, Homo sapiens
  misc_feature (873)..(873): n is a, c, g, or t
tggcgtcccccagctgactggcctacctgctccccactccttctccaagaaggggcagtttggagaaggttgtgccagtcgctgtgactgtgaccactctgatggctgtgaccctgttcatggacgctgtcagtgccaggctggctggatgggtgcccgctgccacctgtcctgccctgagggcttatggggagtcaactgtagcaacacctgcacctgcaagaatgggggcacctgtctccctgagaatggcaactgcgtgtgtgcacccggattccggggcccctcctgccagagatgtgaggctccctactgccccttccacctgccaccagcagggggcagtgtagtgtcagctgccagagcacccctccccccgcgcccgccgcccacctctcccaccttacccccggtctcttcctctgacccgtcttcagactagttactgcagtgggaaggtgggagggagacggtggggtaagggctgattgaggattggcctctgcccccaatcaccatgtacccctttcccccagcctgtcagcctggccgctatggcaaacgctgtgtgccctgcaagtgcgctaaccactccttctgccacccctcgaacgggacctgctactgcctggctggctggacaggccccgactgctcccagcgctgccctctggggacatttggtgctaactgctcccagccatgccagtgtggtcctggagaaaagtgccacccagagactggggcctgtgtatgtcccccagggcacagtggtgcaccttgcaggattggaatccaggagccctttactgtgatgccgaccactccagtagcgtagagggttaacccacagatcattcttgataatctcantaatcctgtcagc

SEQ ID NO: 463350 - DNA, 5292 bp, Homo sapiens
ggcttctatgagagcagggggttctgtgtcccgctctgtgcccaggagtgtgtccatggccgttgtgtggcacccaatcagtgccaatgtgtgccaggctggcggggcgacgactgttccagtgagtgtgccccaggaatgtgggggccacagtgtgacaagccctgcagctgcggcaacaacagctcgtgtgatcccaagagtgggtgccatggggcaccctgcgatccccagactggagcctgcttctgccccgcagagagaactgggcccaggtatgtaatggggggaacgacactttaacaagatcgcagacacaaggccacacagatctatgtggggaaatgaggtgactcagacagggccccaagtgtggggatgatgtggaggccaagatcctggtcccagtggatcctattcctcacgagtggagtgaccttgagcaaatcattgactcgttgtgggcttgtttcctgtctgtaaaacgggaatagtattgtctacatggcagggtggctgtgaagataacatgagctgtgacgtgtcctgttcccagggcacttctggcttcttctgccccagcacccattcttgccaaaatggaggtgtcttccaaaccccacagggctcctgcagctgcccccctggctggatggtatggagggtggggcctgtgggcatggggtgtgggtctggggagaattctgtgggtggtgctaagcagggctccaaggtgagtgaggggggtgagctctgtggttagaattctgtgggtggtgctaagcagggctccaagggcaccatctgctccctgccctgcccagagggctttcacggacccaactgctcccaggaatgtcgctgccacaacggcggcctctgtgaccgattcactgggcagtgccgctgcgctccgggttacactggggatcggtgagtggcgtggggcgggcgggagacgggagggaggaggtggggcgccgccaggctcactcagctaggtgcccaggtgccgggaggagtgcccggtgggccgctttgggcaggactgtgctgagacgtgcgactgcgccccggacgcccgttgcttcccggccaacggcgcatgtctgtgcgaacacggcttcactggggaccgctgcacggatcgcctctgccccgacggcttctacggtctcagctgccaggccccctgcacctgcgaccgggagcacagcctcagctgccacccgatgaacggggagtgctcctgcctgccgggctgggcgggcctccactgcaacgagagctgcccgcaggacacgcatgggccagggtgccaggagcactgtctctgcctgcacggtggcgtctgccaggctaccagcggcctctgtcagtgcgcgccgggttacacgggccctcactgtgctagtctttgtcctcctgacacctacggtgtcaactgttctgcacgctgctcatgtgaaaatgccatcgcctgctcacccatcgacggcgagtgcgtctgcaaggaaggttggcagcgtggtaactgctctgtgccctgcccacccggaacctggggcttcagttgcaatgccagctgccagtgtgcccatgaggcagtctgcagcccccaaactggagcctgtacctgcacccctgggtggcatggggcccactgccagctgccctgtccgaaggggcagtttggagaaggttgtgccagtcgctgtgactgtgaccactctgatggctgtgaccctgttcatggacgctgtcagtgccaggctggctggatgggtgcccgctgccacctgtcctgccctgagggcttatggggagtcaactgtagcaacacctgcacctgcaagaatgggggcacctgtctccctgagaatggcaactgcgtgtgtgcacccggattccggggcccctcctgccagagatgtgaggctccctactgccccttccacctgccaccagcagggggcagtgtagtgtcagctgccagagcacccctccccccgcgcccgccgcccacctctcccaccttacccccggtctcttcctctgacccgtcttcagactagttactgcagtgggaaggtgggagggagacggtggggtaagggctgattgaggattggcctctgcccccaatcaccatgtacccctttcccccagcctgtcagcctggccgctatggcaaacgctgtgtgccctgcaagtgcgctaaccactccttctgccacccctcgaacgggacctgctactgcctggctggctggacaggccccgactgctcccagcgctgccctctggggacatttggtgctaactgctcccagccatgccagtgtggtcctggagaaaagtgccacccagagactggggcctgtgtatgtcccccagggcacagtggtgcaccttgcaggattggaatccaggagccctttactgtgatgccgaccactccagtagcgtataactcgctgggtgcagtgattggcattgcagtgctggggtcccttgtggtagccctggtggcactgttcattggctatcggcactggcaaaaaggcaaggagcaccaccacctggctgtggcttacagcagcgggcgcctggacggctccgagtatgtcatgccagatgtccctccgagctacagtcactactactccaaccccagctaccacaccctgtcgcagtgctccccaaaccccccaccccctaacaaggttccaggcccgctctttgccagcctgcagaaccctgagcggccaggtggggcccaagggcatgataaccacaccaccctgcctgctgactggaagcaccgccgggagccccctccagggcctctggacagggggagcagccgcctggaccgaagctacagctatagctacagcaatggcccaggcccattctacaataaagggctcatctctgaagaggagctcggggccagtgtggcttccctgagcagtgagaacccatatgccaccatccgggacctgcccagcttgccagggggcccccgggagagcagctacatggagatgaaaggccctccctcaggatctccccccaggcagcctcctcagttctgggacagccagaggcggcggcaaccccagccacagagagacagtggcacctacgagcagcccagccccctgatccatgaccgagactctgtgggctcccagccccctctgcctccgggcctaccccccggccactatgactcacccaagaacagccacatccctggacattatgacttgcctccagtacggcatcccccatcacctccacttcgacgccaggaccgttgaggagccaggatggtatggcagaggccagcacacctggctgttgctgctcaaggctggggacagagcctagtgtacccctgccaggagcagggagtggaccggcaggctgtgaacatgaacaacgcttaacagagcaagtgatgggagccttgttcctgggttctaccatgggagacgctgatcagcaggatgcctggctccctttcccaacccactgctcccaaggcctccagggccctgtgtacataaactggtgggttggaagttgctgggtaactctgatttcagacatgcgtgtggggtaccttttctgtgcatgctcagcctgggctctgtgcgtgtgtgtgtttctgtgattttagaagggtaccaggcacaggttctgtcctagggcacttaccatttagtagggagatggaaccaacccaattaactctagcaatagcctcctaactggcctcctccattgattcagtgaaccttccaatgcatggctcataatttcaaaatacaggctggttagttactccctacctgaaagccttcataggtgcctctttgctcttctgccagtatcaaaacttttgaaggccttaaaggccctgctttgcctggcccatctgtctctccagcctcaccttgaactgtgttcctgtcactgcacgccagtcacaccggcctctaggtcctcctgtaggccactcttctttctggcacagggacctgcacacctggagtgcccttcctcccccactcgcctgttcacccctgcttttcctttacacctcctcctcagggaagtgcccaccctccgtacatctttcacagccctgattgcagctgtgttcactcaccaggtacctgcagaaggcctacagggtgccaggcacttctttaatgtgttctttctttatgtgattatttgattaatctctgcctcccccactagactgtaagctccctgaaggcaagaatcctgtgcttatgctcaatattagctctcccttggcacagagtaggcactcaacaaatgctccccaaaaggctgagtggctgactgaattaagtaccagtgacatgcagtaactgctaagatagatgagccatctgtatgctctgacagttacagactgaataagttggagacttccctaaagggtggcatttccccagggtaacaacgcagagctcaggtgtgggaaggtgccaggggcaggggtgcagaggggctgaggctgaggggggtgcagaggctggagaaaggataacaggagagagtatacaggcatgccttgatttattgcacttcacaggtagcagaatttttaaagaaattgaaggttttgggacatatatgtgacagcaataggttaagaaaagcaaagcagagaaattgaagatttgtgtcaacactgctttaagcaaatctgttggcaccatttttccaatagcatgtgcccattttgggtctctacattgcattttggtaattgcttgcaatatttcaagcattttcattgttattatatgtgttatagtgatctgtgatcagtgatctttgatatattattgtaattgtttcggggcgccatgaaccgcacccatataacacggtaaacttaatcagcaaacgttgtgtgtgttctgactgctccaccgaccagccgttcccccaagtctttccctctcttagggcctccctattccctgagacacaacaatattgaaatgaggccaattaataaccctacaggggcctctaagtgttgaagtgaaaggaatagtcacacatctctcacttaaaatcagaagctagaaatgattaaacttagtggggaaggcatgttgaaagccaagacaggctgaaagctaggccttttgcactaaatagccaagttgtggatgcaaaggaaaagttcttgaaggaaattataagtgttactccagtgaaaacatgaataat

SEQ ID NO: 463351 - DNA, 1877 bp, Homo sapiens
ggcttctatgagagcagggggttctgtgtcccgctctgtgcccaggagtgtgtccatggccgttgtgtggcacccaatcagtgccaatgtgtgccaggctggcggggcgacgactgttccagtgagtgtgccccaggaatgtgggggccacagtgtgacaagccctgcagctgcggcaacaacagctcgtgtgatcccaagagtgggtgccatggggcaccctgcgatccccagactggagcctgcttctgccccgcagagagaactgggcccaggtatgtaatggggggaacgacactttaacaagatcgcagacacaaggccacacagatctatgtggggaaatgaggtgactcagacagggccccaagtgtggggatgatgtggaggccaagatcctggtcccagtggatcctattcctcacgagtggagtgaccttgagcaaatcattgactcgttgtgggcttgtttcctgtctgtaaaacgggaatagtattgtctacatggcagggtggctgtgaagataacatgagctgtgacgtgtcctgttcccagggcacttctggcttcttctgccccagcacccattcttgccaaaatggaggtgtcttccaaaccccacagggctcctgcagctgcccccctggctggatggtatggagggtggggcctgtgggcatggggtgtgggtctggggagaattctgtgggtggtgctaagcagggctccaaggtgagtgaggggggtgagctctgtggttagaattctgtgggtggtgctaagcagggctccaagggcaccatctgctccctgccctgcccagagggctttcacggacccaactgctcccaggaatgtcgctgccacaacggcggcctctgtgaccgattcactgggcagtgccgctgcgctccgggttacactggggatcggtgagtggcgtggggcgggcgggagacgggagggaggaggtggggcgccgccaggctcactcagctaggtgcccaggtgccgggaggagtgcccggtgggccgctttgggcaggactgtgctgagacgtgcgactgcgccccggacgcccgttgcttcccggccaacggcgcatgtctgtgcgaacacggcttcactggggaccgctgcacggatcgcctctgccccgacggcttctacggtctcagctgccaggccccctgcacctgcgaccgggagcacagcctcagctgccacccgatgaacggggagtgctcctgcctgccgggctgggcgggcctccactgcaacgagagctgcccgcaggacacgcatgggccagggtgccaggagcactgtctctgcctgcacggtggcgtctgccaggctaccagcggcctctgtcagtgcgcgccgggttacacgggccctcactgtgctagtctttgtcctcctgacacctacggtgtcaactgttctgcacgctgctcatgtgaaaatgccatcgcctgctcacccatcgacggcgagtgcgtctgcaaggaaggtaatagggtggagtttcccagagagaagacttgggggatggccaagggaagaagggagagtccaagagtatgggtgggccaagggcaggggagcggctgcagggtaagggtggaggggcagcagctggacacagggaaagtatccaggctactttcttcctggaatatccactttgcttttcttcaaccacaaagatcctacctgtccttaaaggctgaggccaaaagccacctcactggcgaacgtccctcaccctcagtcatacggaaacacaattaccatgctgggaagggcctcacatctgccagagtgacacattgcgaacctttaggctggactcggatacagttgacacta

SEQ ID NO: 463352 - DNA, 5116 bp, Homo sapiens
aataaggtttgacactcttgactatggcattcagagccctcttagttttttatcagcctacttttatagatttgctcccaaaattgcttaatgctcctcctcctacttgggaacagctggaaaatgggctggttgctgtgcgtacagtggtacatgggctggttgattatatccagaaccacagcaaaaaaggagcagatcagcagcagcctccacagcatagcaaatacaaaacatacatgtgtcgagatatgaagcagagaggaggatgccctcgtggggccagctgtacatttgcacactcacaggaggaactggaaaaatttcgtaaaatgaataagcgcctggttccgagaagacccttgagtgcctctttgggtcaacttaatgaggtgggcctgccttcagcagctatccttccagatgaaggtgcagtggatctccctagcagaaaacctcctgctctgccaaatggaattgtatcaacagggaatacagtaacacagcttattccgcgagggacagaccccagctatgattctagtctgaaaccaggaaaaatagatcatctgagcagtagtgctcctggatcccctcctgacctgctagaatctgttcctaagagtatttctgccttacctgtgaatccacattctatacctccaagggggccagcagatctgcctccaatgcctgttaccaaaccacttcagatggtacctcgaggttctcagttatatccagcacaacagacggatgtttattatcaggatcctcgaggagcagctccgccatttgaaccagcaccttatcagcagggtatgtattatactccaccaccacaatgtgtgtcccgctttgtccgacctccaccatctgctcctgaacctgctcctccctacttggatcattatccaccctacctccaagaacgtgttgtaaactctcagtatggcacacagccacagcagtacccacctatatacccatctcactatgatggccgtcgagtgtaccctgctccgtcttacacaagagaagagatattccgagaaagccctatacccattgagattccacctgcagcagtaccatcgtatgtaccagaatccagagaaagataccaacagatcgagagttactatccagtggctcctcatccaactcagatcagaccttcgtacctcagagaacctccttatagccggcttcctcctcctccccagcctcatcctagtctagatgaactacatcgccgacgaaaggaaataatggcccagctagaggaaagaaaggttatctctccacctccttttgcaccttcaccaaccttgcctcctacctttcatccggaagaatttttggatgaagacttgaaggtagctgggaaatacaaaggaaatgattatagccaatactctccctggtcatgtgacaccatcggctcctacattggaaccaaagatgcaaaacccaaagatgttgtggcagcagggagtgtggaaatgatgaatgtggagagtaaaggaatgagggaccagcgattagatcttcagagaagagcagcagaaaccagtgatgatgacctcatcccatttggagaccgaccaacagtgtctcggtttggtgccatctcacgaacttccaaaactatatatcagggtgctggtccaatgcaggctatggcacctcagggagctcctacaaaatctattaacatttcagattatagtccatatggaacccacggtggctggggagcttctccatattcacctcatcaaaacataccttctcagggacacttcagtgagagggagagaatatctatgtcagaagtggccagtcatggaaaaccccttccatctgctgagagagaacagctacgactagaattgcagcaattgaaccatcagattagccagcagacccagctacgtggactagagagggaggcaaacaccctggcaggccagtcacagcccccaccaccgccacctccaaaatggcctgggatgatctcaagtgagcagttgagcttggaactgcaccaggtggaaagggaaatcgggaagagaacacgggaactgagtatggaaaaccagtgttctctggacatgaaaagcaaactgaatacaagtaaacaagcagaaaatggacaaccagaaccacaaaacaaggttccggctgaggaccttacattgacattcagcagtgatgtaccaaatggatcagccttgacacaagagaatatcagcctcctatcaaacaagaccagctctctgaacctgtcagaggaccctgagggaggaggggataataatgactcccagagatcaggagttactcccagttctgctccttaaaatatgaggagtcctacttttatcttctgctcctaatcagtttgtcgggcataggggtaggagaacgcataacttctaaactttttctcttaagagcggtcagagaaatccaggaaattcaccagaggcaatgtgcacaaacaccactactaaaaacaaaccctgcacatagttcacattaatgcatttttttaatttaaagaaaaagaaaattagcagtatctgcaagcaattcagattaaatttgtttttgttctgtgaatgaactttattttaataactttggacgccttggatccagggctttaaaaaaaaaagatattatatatacactctgtttgattaattgtatgatcttaatgaagtaggttttcttgtattttggtattacatacccagtgtataatttgtataattcctcacccccaatccttatcaattctcaccaccccataaacttaaaacagaccaaaaatgtcagctttcagagaattctgtggtgcttgagaaacagacagtactagactgagttattagaaaatgtgcagcaaaccaacttttcccagagctgttatttggaattctttatccctttctagatcactagcttcattggatacgtatatttttcttgacattgaagctttttgtttgtttgggagggttttatttcttgtttttattttcaacttttcaaatagaattaccaattttgaagtcctcattttcatattaaggatcatttgcattctcttaatataatcagaaagctgattcagtgtttaattagatttaaatgttgatcaagaattaactgtaacttactagcactgaaaatacatgtttggtgtttcgcctgcgttcagctcatggttggaaatttgaagcagtgcttttcaaattaaacttttgctgacatcataggatgctaaaaaacaaggacaatcaactatgttttaaaactgcaacatttgatttgaacttaaaatgaatagagccacattattttaatggatgttttgttttacttgtgaactgattgagtcttaaggatagtttatgaattgatcacttgttgctcagaatcattagtataagtaggtaggaaatagtttgaagtcatttttcatagacttaactgtccaatgttgcaaatgtttcttcatgaaaatattgaaaagagtaaggttttttttttttttaattctgctgcacatattctgatgccatgtgtctgtgcttaattaactaagaccctataaaacgtgtttagtggggactgtttgatatagttgccctctccattcctctatttgcctgatttttttcagtttccctttctgtattttactactaaattagaaagcactggttatgtaataagttactacattgctttggttgagtaaaaacaagagtttatatttttcttgtttcttattttcttaacccttaactcctgctgaggtcataacaacctcagtctaagctctgtgtccatcatactgttaacttaaacaaatgggtggtgggggtgggaagggtaatacagtcctgccattgcctaccagtaggagagtccaaacagaacactcttttgagtagcaattatttaatttgcccagtcaaggcaccgtgtttatatactatttcacattgaatttgattatgccctacagacctggctggtcaaggatttgatatacacatattggcttgggattcgagctttcttttttatttaaataaaaatttatatatatattatatatatacatatatacatagctatatctgtatatatattgggtatgttttaaggattttttcgcatgagcgcagctgttgcgataaattgaccgattgggaggtggtagaagcactgaatgaagcctgtaaggacaaatggcatatttgggcataactgcttgactctgtaactacttttttaaaatcaaaattgaaaagtctccccgagacattctgcagtcattatcacctttttgggtggattttattttgttttattttgttttttttaaaaaaataactttttaacattggtgcatatttgcttgggatagagcttgtgtaatttaccaatcgtattgattcctccaaagaatagccttgtccaatgtttctgttcatacaaggtgtcaattcttctggatgagtaagcatttttcaccttacttgataatctaaactttctatttgggaggaatttaaagtgctatatttcctgttattaagttagcagaactactctggacctggattttttcaaacatgaatgtttatcaagtacttggtacattcaacaggacatgttcaataaatatttgctgttttgatttggtttccctgaagccaaaactgaactttctaacaggaggatttgggcaaattccagtgagatgccttgagagcctcagctaaatgctgctaaatgataatgtaggatttattttggtaagtttaatttcaccttaattaaaatgtcatgttcacctagtaaactgggaacccaagggagttggagactgctttttgtgctaaatgttttgccaaatttccatggaagggttaagctttgagttattcagtaaccacagcagaagctgggtcctatctcttccctgccaaggtcttattcttgagtccaaaggaaagaacagaacagcccagggtatgaggcaatggacatggacctgctgaattacctgctcatggaagttactactgaa

SEQ ID NO: 463353 - DNA, 633 bp, Homo sapiens
acaggcgtgtgccaccacgcccagctgatttttgtatttttagtagagacggggtttcgccatgttggccaggctggtctcaaactgacctcagcagtccacctgcctcagccccctaaactgctggtattacaggcgtgagccgccatgcctggccgcctttctaggtcattgtttttttctgagaaattttttttcatattagcttgaggcattgtctgtcttattgtccagcttggttagtgagcaagtggattgtattctgttatgtttttatgtatgtcactcttttagtctgccagtttctttggttattttacaaaattgaatatgatttctggatcatcactttgtattatctgtaatttggtctctcccattaacaccattaaatagatgataactgattttatttccttctctttcaaaggaaaaccagtgttctctggacatgaaaagcaaactgaatacaagtaaacaagcagaaaatggacaaccagaaccacaaaacaaggttccggctgaggaccttacattgacattcaggtaaagaaaaggagattgtcgtagccatattaaattacacacaaaagagaaactaatatatgatccagacatatcagaaataccctc

SEQ ID NO: 463354 - DNA, 3510 bp, Homo sapiens
ccacctcagcttcccaaagtgctagaattaaaggcacaagccaccatgcgtagccaacttctctttcaaatcagaaaatacaaggagcaatttatacataagatgaaattactgtttactaaatttaaatgtccctattttgttatttttttgtttgaatggtactcaaagagaacagcaccttacagttgcattattttgttgcaaatggctgggtgataagctactcaaggctgtggtctggaattgagcctggttattctgtgcatggtgtgaagtgtgttgagttttctgtgtgcttggctttatgcactaggctgttagtaacaggctggtgttgcagagggaggcaaacaccctggcaggccagtcacagcccccaccaccgccacctccaaaatggcctgggatgatctcaagtgagcagttgagcttggaactgcaccaggtggaaagggaaatcgggaagagaacacgggaactgagtatggaaaaccagtgttctctggacatgaaaagcaaactgaatacaagtaaacaagcagaaaatggacaaccagaaccacaaaacaaggttccggctgaggaccttacattgacattcagcagtgatgtaccaaatggatcagccttgacacaagagaatatcagcctcctatcaaacaagaccagctctctgaacctgtcagaggaccctgagggaggaggggataataatgactcccagagatcaggagttactcccagttctgctccttaaaatatgaggagtcctacttttatcttctgctcctaatcagtttgtcgggcataggggtaggagaacgcataacttctaaactttttctcttaagagcggtcagagaaatccaggaaattcaccagaggcaatgtgcacaaacaccactactaaaaacaaaccctgcacatagttcacattaatgcatttttttaatttaaagaaaaagaaaattagcagtatctgcaagcaattcagattaaatttgtttttgttctgtgaatgaactttattttaataactttggacgccttggatccagggctttaaaaaaaaaagatattatatatacactctgtttgattaattgtatgatcttaatgaagtaggttttcttgtattttggtattacatacccagtgtataatttgtataattcctcacccccaatccttatcaattctcaccaccccataaacttaaaacagaccaaaaatgtcagctttcagagaattctgtggtgcttgagaaacagacagtactagactgagttattagaaaatgtgcagcaaaccaacttttcccagagctgttatttggaattctttatccctttctagatcactagcttcattggatacgtatatttttcttgacattgaagctttttgtttgtttgggagggttttatttcttgtttttattttcaacttttcaaatagaattaccaattttgaagtcctcattttcatattaaggatcatttgcattctcttaatataatcagaaagctgattcagtgtttaattagatttaaatgttgatcaagaattaactgtaacttactagcactgaaaatacatgtttggtgtttcgcctgcgttcagctcatggttggaaatttgaagcagtgcttttcaaattaaacttttgctgacatcataggatgctaaaaaacaaggacaatcaactatgttttaaaactgcaacatttgatttgaacttaaaatgaatagagccacattattttaatggatgttttgttttacttgtgaactgattgagtcttaaggatagtttatgaattgatcacttgttgctcagaatcattagtataagtaggtaggaaatagtttgaagtcatttttcatagacttaactgtccaatgttgcaaatgtttcttcatgaaaatattgaaaagagtaaggttttttttttttttaattctgctgcacatattctgatgccatgtgtctgtgcttaattaactaagaccctataaaacgtgtttagtggggactgtttgatatagttgccctctccattcctctatttgcctgatttttttcagtttccctttctgtattttactactaaattagaaagcactggttatgtaataagttactacattgctttggttgagtaaaaacaagagtttatatttttcttgtttcttattttcttaacccttaactcctgctgaggtcataacaacctcagtctaagctctgtgtccatcatactgttaacttaaacaaatgggtggtgggggtgggaagggtaatacagtcctgccattgcctaccagtaggagagtccaaacagaacactcttttgagtagcaattatttaatttgcccagtcaaggcaccgtgtttatatactatttcacattgaatttgattatgccctacagacctggctggtcaaggatttgatatacacatattggcttgggattcgagctttcttttttatttaaataaaaatttatatatatattatatatatacatatatacatagctatatctgtatatatattgggtatgttttaaggattttttcgcatgagcgcagctgttgcgataaattgaccgattgggaggtggtagaagcactgaatgaagcctgtaaggacaaatggcatatttgggcataactgcttgactctgtaactacttttttaaaatcaaaattgaaaagtctccccgagacattctgcagtcattatcacctttttgggtggattttattttgttttattttgttttttttaaaaaaataactttttaacattggtgcatatttgcttgggatagagcttgtgtaatttaccaatcgtattgattcctccaaagaatagccttgtccaatgtttctgttcatacaaggtgtcaattcttctggatgagtaagcatttttcaccttacttgataatctaaactttctatttgggaggaatttaaagtgctatatttcctgttattaagttagcagaactactctggacctggattttttcaaacatgaatgtttatcaagtacttggtacattcaacaggacatgttcaataaatatttgctgttttgatttggtttccctgaagccaaaactgaactttctaacaggaggatttgggcaaattccagtgagatgccttgagagcctcagctaaatgctgctaaatgataatgtaggatttattttggtaagtttaatttcaccttaattaaaatgtcatgttcacctagtaaactgggaacccaagggagttggagactgctttttgtgctaaatgttttgccaaatttccatggaagggttaagctttgagttattcagtaaccacagcagaagctgggtcctatctcttccctgccaaggtcttattcttgagtccaaaggaaagaacagaacagcccagggtatgaggcaatggacatggacctgctgaattacctgctcatggaagttactactgaa

SEQ ID NO: 463355 - DNA, 3450 bp, Homo sapiens
acaggcgtgtgccaccacgcccagctgatttttgtatttttagtagagacggggtttcgccatgttggccaggctggtctcaaactgacctcagcagtccacctgcctcagccccctaaactgctggtattacaggcgtgagccgccatgcctggccgcctttctaggtcattgtttttttctgagaaattttttttcatattagcttgaggcattgtctgtcttattgtccagcttggttagtgagcaagtggattgtattctgttatgtttttatgtatgtcactcttttagtctgccagtttctttggttattttacaaaattgaatatgatttctggatcatcactttgtattatctgtaatttggtctctcccattaacaccattaaatagatgataactgattttatttccttctctttcaaaggaaaaccagtgttctctggacatgaaaagcaaactgaatacaagtaaacaagcagaaaatggacaaccagaaccacaaaacaaggttccggctgaggaccttacattgacattcagcagtgatgtaccaaatggatcagccttgacacaagagaatatcagcctcctatcaaacaagaccagctctctgaacctgtcagaggaccctgagggaggaggggataataatgactcccagagatcaggagttactcccagttctgctccttaaaatatgaggagtcctacttttatcttctgctcctaatcagtttgtcgggcataggggtaggagaacgcataacttctaaactttttctcttaagagcggtcagagaaatccaggaaattcaccagaggcaatgtgcacaaacaccactactaaaaacaaaccctgcacatagttcacattaatgcatttttttaatttaaagaaaaagaaaattagcagtatctgcaagcaattcagattaaatttgtttttgttctgtgaatgaactttattttaataactttggacgccttggatccagggctttaaaaaaaaaagatattatatatacactctgtttgattaattgtatgatcttaatgaagtaggttttcttgtattttggtattacatacccagtgtataatttgtataattcctcacccccaatccttatcaattctcaccaccccataaacttaaaacagaccaaaaatgtcagctttcagagaattctgtggtgcttgagaaacagacagtactagactgagttattagaaaatgtgcagcaaaccaacttttcccagagctgttatttggaattctttatccctttctagatcactagcttcattggatacgtatatttttcttgacattgaagctttttgtttgtttgggagggttttatttcttgtttttattttcaacttttcaaatagaattaccaattttgaagtcctcattttcatattaaggatcatttgcattctcttaatataatcagaaagctgattcagtgtttaattagatttaaatgttgatcaagaattaactgtaacttactagcactgaaaatacatgtttggtgtttcgcctgcgttcagctcatggttggaaatttgaagcagtgcttttcaaattaaacttttgctgacatcataggatgctaaaaaacaaggacaatcaactatgttttaaaactgcaacatttgatttgaacttaaaatgaatagagccacattattttaatggatgttttgttttacttgtgaactgattgagtcttaaggatagtttatgaattgatcacttgttgctcagaatcattagtataagtaggtaggaaatagtttgaagtcatttttcatagacttaactgtccaatgttgcaaatgtttcttcatgaaaatattgaaaagagtaaggttttttttttttttaattctgctgcacatattctgatgccatgtgtctgtgcttaattaactaagaccctataaaacgtgtttagtggggactgtttgatatagttgccctctccattcctctatttgcctgatttttttcagtttccctttctgtattttactactaaattagaaagcactggttatgtaataagttactacattgctttggttgagtaaaaacaagagtttatatttttcttgtttcttattttcttaacccttaactcctgctgaggtcataacaacctcagtctaagctctgtgtccatcatactgttaacttaaacaaatgggtggtgggggtgggaagggtaatacagtcctgccattgcctaccagtaggagagtccaaacagaacactcttttgagtagcaattatttaatttgcccagtcaaggcaccgtgtttatatactatttcacattgaatttgattatgccctacagacctggctggtcaaggatttgatatacacatattggcttgggattcgagctttcttttttatttaaataaaaatttatatatatattatatatatacatatatacatagctatatctgtatatatattgggtatgttttaaggattttttcgcatgagcgcagctgttgcgataaattgaccgattgggaggtggtagaagcactgaatgaagcctgtaaggacaaatggcatatttgggcataactgcttgactctgtaactacttttttaaaatcaaaattgaaaagtctccccgagacattctgcagtcattatcacctttttgggtggattttattttgttttattttgttttttttaaaaaaataactttttaacattggtgcatatttgcttgggatagagcttgtgtaatttaccaatcgtattgattcctccaaagaatagccttgtccaatgtttctgttcatacaaggtgtcaattcttctggatgagtaagcatttttcaccttacttgataatctaaactttctatttgggaggaatttaaagtgctatatttcctgttattaagttagcagaactactctggacctggattttttcaaacatgaatgtttatcaagtacttggtacattcaacaggacatgttcaataaatatttgctgttttgatttggtttccctgaagccaaaactgaactttctaacaggaggatttgggcaaattccagtgagatgccttgagagcctcagctaaatgctgctaaatgataatgtaggatttattttggtaagtttaatttcaccttaattaaaatgtcatgttcacctagtaaactgggaacccaagggagttggagactgctttttgtgctaaatgttttgccaaatttccatggaagggttaagctttgagttattcagtaaccacagcagaagctgggtcctatctcttccctgccaaggtcttattcttgagtccaaaggaaagaacagaacagcccagggtatgaggcaatggacatggacctgctgaattacctgctcatggaagttactactgaa

SEQ ID NO: 463356 - DNA, 1402 bp, Homo sapiens
aataaggtttgacactcttgactatggcattcagagccctcttagttttttatcagcctacttttatagatttgctcccaaaattgcttaatgctcctcctcctacttgggaacagctggaaaatgggctggttgctgtgcgtacagtggtacatgggctggttgattatatccagaaccacagcaaaaaaggagcagatcagcagcagcctccacagcatagcaaatacaaaacatacatgtgtcgagatatgaagcagagaggaggatgccctcgtggggccagctgtacatttgcacactcacaggaggaactggaaaaatttcgtaaaatgaataagcgcctggttccgagaagacccttgagtgcctctttgggtcaacttaatgaggtgggcctgccttcagcagctatccttccagatgaaggtgcagtggatctccctagcagaaaacctcctgctctgccaaatggaattgtatcaacagggaatacagtaacacagcttattccgcgagggacagaccccagctatgattctagtctgaaaccaggaaaaatagatcatctgagcagtagtgctcctggatcccctcctgacctgctagaatctgttcctaagagtatttctgccttacctgtgaatccacattctatacctccaagggggccagcagatctgcctccaatgcctgttaccaaaccacttcagatggtacctcgaggttctcagttatatccagcacaacagacggatgtttattatcaggatcctcgaggagcagctccgccatttgaaccagcaccttatcagcagggtatgtattatactccaccaccacaatgtgtgtcccgctttgtccgacctccaccatctgctcctgaacctgctcctccctacttggatcattatccaccctacctccaagaacgtgttgtaaactctcagtatggcacacagccacagcagtacccacctatatacccatctcactatgatggccgtcgagtgtaccctgctccgtcttacacaagagaagagatattccgagaaagccctatacccattgagattccacctgcagcagtaccatcgtatgtaccagaatccagagaaagataccaacagatcgagagttactatccagtggctcctcatccaactcagatcagaccttcgtacctcagagaacctccttatagccggcttcctcctcctccccagcctcatcctagtctagatgaactacatcgccgacgaaaggaaataatggcccagctagaggaaagaaaggttatctctccacctccttttgcaccttcaccaaccttgcctcctacctttcatccggaagaagtaagcaaatcatttttagtctcatttatccgtgtttttttgtg

SEQ ID NO: 463357 - DNA, 351 bp, Homo sapiens
tttttggatgaagacttgaaggtagctgggaaatacaaaggaaatgattatagccaatactctccctggtcatgtgacaccatcggctcctacattggaaccaaagatgcaaaacccaaagatgttgtggcagcagggagtgtggaaatgatggtatgtgtaatagctaagcaataattaatacaaattaagataaaccaaataaatttttacccattaccatttaggcacaaataattcagctttgcttaagagtttcagaccatattctatactctgcagttgagttatctttaaacagtataggtttttgattcatttaggtgtaaataaaaatattttaatacttac

SEQ ID NO: 463358 - DNA, 395 bp, Homo sapiens
tacccacctatatacccatctcactatgatggccgtcgagtgtaccctgctccgtcttacacaagagaagagatattccgagaaagccctatacccattgagattccacctgcagcagtaccatcgtatgtaccagaatccagagaaagataccaacagatcgagagttactatccagtggctcctcatccaactcagatcagaccttcgtacctcagagtatgctgtatttttttttattacatagacttaatttgactgttgcttgctgtgattccttactttttatgcaatgacaataaccctttgatgaattcttttttataagagagcttcttttttttttaaatcttttcataatttgggtattttttttttttaaactatataatgag

SEQ ID NO: 463359 - DNA, 2100 bp, Homo sapiens
cagccagaattcatgagaactcactcaccatcactatcacttgcctcttccctggctctttacggtacctcgtccagcagcacctggatctgcttcacgcactgcaggaaagggtcctgaagtggccacgccaaggcgttcttggagatttattccttaagttaacaaatgacgagggtgatgaagagattaaatctgacatctacacgttgttttttcacatagtccagcgcatccctgaatatctgatacatctgcagtgacaaggaatattttaaaatttttattatgaaaatttcaaatttacatagaagagttcagtgaactccacatgccctcatccagattcaacagttatcaagatcatgccacgtttactttatctaggaacgtaatttgtttctgagtgtgaagatccacaagtcgaacagaagttgagttttccattattccgtatgactctgctagggcaagcaagggagagaagagagttgaaggtgtgccttggagcaccgcaggtggtgaggagggtcagggcttccacgcggggtgatgacagtccctggcccgcaggccatttcccagaagctcagacaataccttcgggcctccgctcgacggactgccttgtccactctccgcctgggaacgggggttcgtgggagcgccttagtggaagtttgtggagctcgggaggtggcatgcacaggcgcctcggagcgcggccccgaggggcgccggcaggcgagaggcctgcactaaccggccgtaagcacagctcttttgtactctgttttccccctaaagacatctgatgcccccagtgaagaaaagccaacagcagcaaagcctgatggagagcatgcagcccgggaagcccagtgactgggagctggagggcaggaagcacgagcggcccgagagccttctggcaccgacgcagttctgcgcggccgagcaggacgtgaaggcgctggccgggcccctgcaggccatcccggagatggacttcgagccctctccggcggagccgctgggcaacgtggagcgctccctgcgcgccccggccgagctcctgcccgatgcccgcggcttcgtgcccgcggcctacgaagagttcgagtacggcggcgagatcttcgcgctgcccgcgccctacgacgaggagccgttccaggctccggccctcttcgagaactgctcgcctgcctcctccgagtccagcctggacatctgcttcctgcggcccgtcagcttcgccatggaggccgagcggccggagcacccgctgcagccgctgcccaagagcgctacgtcgccggcgggcagcagcagcgcctacaagctggaggcggcggcgcaggcgcacggcaaggccaagccgctgagccgctctctcaaagagttcccgcgtgcgccgccagccgacggcgtggccccacgcctctacagcacgcgcagcagcagcggcggccgcgcgcccatcaaggccgagcgcgccgcgcaggcgcacggcccggccgccgccgccgtcgccgcccgcggcgcatccaggaccttcttcccccaacagaggtcccaaagcgaaaaacagacctatttggaagagatgcatttagaagatactaccagattctgtcccaaagaagaaagagaaagtgaacaaacatctttcagcgatcaaaatcccaggcaagaccagaaggggggctttcgcagctccttccgcaagctctttaaaaagaaaaatgggaacgcaactggtgaagatttctgtggtccttggggctggtggtgacatcaaagctttcctattttcagggacttctgacatgagaaaactggagaaggtgcagagctggaatggattacccaagtggcttaagcaagataaaggaagaatgcaccctcgactggggactcaaatggactgatctgagttgttgactattgattggctttggtctcttttgtggtggttgagattatagtatctctgcaatctgattactgtacgaatttctgcattctaccaaatgtagcatatatgtgtggttggcttcaataaatctttcatttaacaatgaaaacaagcaagag

SEQ ID NO: 463360 - DNA, 506 bp, Homo sapiens
agcatacctgacagcctcagcatatggagaacttggtcagttgtatagaagctttggacaagcaacttcatgtctaacatcactttcatacaccctgcatgaggttttttgatattggttcttagtgtctggactagttttacccattctaggtcagagtttaagctagccaaagggccccagtctagcttatcagaggttatttccagaaagcctcctccctccagggacttctgacatgagaaaactggagaaggtgcagagctggaatggattacccaagtggcttaagcaagataaaggaagaatgcaccctcgactggggactcaaatggactgatctgagttgttgactattgattggctttggtctcttttgtggtggttgagattatagtatctctgcaatctgattactgtacgaatttctgcattctaccaaatgtagcatatatgtgtggttggcttcaataaatctttcatttaacaatgaaaacaagcaagag

SEQ ID NO: 463361 - DNA, 4945 bp, Homo sapiens
gagtgctgactggccacgctgtcggtcatggctgctgagctgcagtcaggtcctcacgctgccctgcagttccgctcgctctccaggttcctttagaccctcaactctgagacccctcctctcactcccagctgctgtcttcacttcgggccatcctagacaacatgctcctgctcccggacatgtccctcacctgccttcctgtgtgggtgggcgagcgagtagtgctatctgtcctccctcgtgcctgggctccccacctctggaacaccaatgagcacacttcagcgttgtcctccctcttccacaccatcaagttctgcaccccaccagcatacggacagctctcccttccgaaccctaccacaagagccgccccatcttcccttcacagccaaattcctgaaccgagttctccataccctctttcctccatgagggcttccgtccagcactctgctgagacagcttttgccaagaaggccccagggctcggtcctctgacttctctaattatatcttctccctagatgacctcatgcgtgctcccagctttaaataacaactaaatgctgcagactccggatttcagtccacagcccagctgcccgctggagtccctgctgggtgctccccatccctggcaccagccgattaatgcccagccgttcatctttacatcttgccgagcagcttctcctcgtctctggcctgagcaaggcctgcggcttccaggttctgaggcccgcagagatgcctgtgcacttcccccaagaagctcctccaagttacgtgaccctgatgaaggtcttccttcaccatatgatttgttacaggaaaaataaggaaggaatttggaagcagttaaggagcaagctggctgttggctgtcatctggagtcacctactgggaagtgccgaatcaccccagaccaaggacaggaaggaggcttgggtctcactctgtcaccccaggctggagtgcagtggcaggatggcagctcactgcagcctcgaccaccctggctcaagctatcctcccacctcagcctaagagaaactcttggaacggaaaaccaaataccacatatcctcagttataagtgggagctaaatgatgagaacacgtggacacaaagaggggaacagcagacaccgaggcctacttgagggtggaagttgggaggagggagaggagcagaaaagataacttttgggtactgggcttaatacccgggtgatgaaataatctgtacaacaaacccccatgagatgagttttcctgtgtaacaccgaacctaaaataaaagctaaaaataaaattaagttaaaagagaagctgtcatttttctcataacctaattacaaacctatgtgttgtgctccccattactgaataccacagatgagctgtgccttcctcccctcccctcccttccctttgcttttatgtcaaaatattaggctgtcgttttcacccgtgtgtttctctggcatgcttttatcgtctgcagggatgttattctactttttattttttctttgaataaccgtgtgggatttgacttcaatccttttctgctacttatgtttacataatattagatttcctgaactttttgaaaggaggatcagctttatcagagattcatctgtttgattagttttatccaaaaaccaacctttggctttgtcaatcctctctattatatttttgtttcctagttcactaatttctactcttacattcagtatatctttctgtgtgtatctatcttttactttctgtgggttggattctttttgtactgattttcatcaaggttattgatttccttccaagcagtatttttgctgcatctctaaatatttgatatgaagatatttaataatcattcacatttaaaaattttgaagaattttcagtgtaattttctctttgattaatgacttatttagaaatgtgtatttaaagctttaaaataacaaggtgctctgcaatgcttaagctcagtgatttaagtacctgtagggtataaaatccagagtggactgctttcagggtccctcagctgtagtgtgaagttgggcatatgcagatgggattccgtctgccctgggcagcttgcttgagttctgggggaccagctccccacggattctatgcttctatctttgctacatatctgtgagtaataagtcggctttgcctgacttgtgcaggtgttttgtcataccagactcagactccggcagctgggtttgtgcaaaacctttagaagctgtgtttgtgtaaagactcctgccagacctgggcatccaccagatacaggaatctttacaaaaattggcaaagtgtttagagtcctctcctggtatccaacatatggtgtgcccctcataaggattgataccagtgcatggtattctgtttcacaattatgaatatatgtggattttttctaatacctactttttgttttctgtgtcttgctttacctatgctatttttcttgtttcttgtttttcaaaaatccaattaaaatttttttcccttcctaaggattttggcattatacttttagctttttatggttacccttgacatttttctagatgtacttaacaagatctaaattagcccataactttcccaaccccaacctctaaacaaatatgagcctcagaacattttaactcaatcccttatttacatatcattgtttttagccagttaattcccctctgggatcattttctttctatctgaagtatatttttagaagttcttcagaaaagaactgttggtaagctctcaatttctgtaatctgaaacattcttattttgcactcaatcttgaaagtcagttttgcttgatttaaaattctaagttggcaatcacttccccctgaacttttaagatattagactactattttctaatctccattgatattgttaagaagtctgttgtaattccacaattgtaggtcatttataatttttctcgactgcttttaagagctgcttagtgtggctaactgtagctttacttttaaatttgctttcctgcctgatggtatacattgcactttcagcatttttggataccagtaattcactagttttagaaaattcttggtctttatctctttaaaatttgcctcttcaccattctttccttttggaactccagctatttgtatgttatagttgttcattttaacctttatctctgttaatgacttttttatattttctatccatttgtctctcttttgcattctgggtaatttttttagcttttaaaattcacgattttctccaatctgctgttaaactcaccaaattaagtttgtttctgacaattttttatttctgaaaattccatttttcatcatgcctgtgcctttatagtatattattgcttatttattttttgcaactctattttttaattctttagatacttaatatatcattatcgtatgtttgacgattctgttcttcgaagtccttcaggttttgtttctactgagtctcacctatggtttattaattgtaaatattaagcttcttatttggttgatctgaactgaggttgcttttcttcagaaaggacttgcatttgcttctgccaggagccaaggagagcttttttttgtttgtttgtttttgatttttgtgtgtgttcccatttattttctgtcctgatgatttcccttacttcctgcaaattcagtattgccttaaaaagtatgtcttttgtttaggaactaattgtgttttaagcaggaagacccttcaggaagttaaaagcccacatgaattctttagttgcagaagttttaaatgttggctaaaattagatttttaagaatagactcttcatatatgagaattatagatataagttaggtttctggtccaataaatgcaatcaaccctcaataagcaagagtgttgattattcactttatgggaggattggcaatggaagtttttggttgcctagtgcatcaaagttccatttgtgactgttcatttctgaatagagaaaacaaaaatgaagccaaggcatttctgagtgactattagagatgacactgaactaagacaaactacctagaattattaaagaaactggtgagggaaaatggaatttaactaaacaaaaatctactttgcacacttcccaggaaacacaatttggtatatttcactctggataaaaaatggttataatcaaattttgtttttgttttttaaaccctatcagtttttctggtctgctccctttacattttctccaacaattattttcagccattttgtccctcttcagccctcagagccaaaccttcctcctcccctgttctcagcagaagggattgactgtttttttaaaaagaacagacaacatcagaagggaactgtcacatgctgtgtcatcacaactagcccctcccctcaatactcagccacttcttttccccttctctcctagttgtaaaggacaatctcctcctctaaagccacctgtactctgcactccatctcttcccatgtcctccaggactttgtgattctctatcattctctctctcatcttccatcattccttttcaccttgtttattccccagaagcatttaaaacatgtttaggtcagaaccatggaaaaaaataaccagccctccttcaacccccacatacccctcccattacccatcctttctctttcccttgctttacagccaaatctcagaagagttgtccagtattactgtctccatttccttcttattcatactcaatctggattttaccctcaacatcctactgaaattctcaccattaggtttccatgtttccaaatctagttgacatttattggtcttcaccctatgtgatttcttcatagcattcaacacaatttcaaaca

SEQ ID NO: 463362 - DNA, 1096 bp, Homo sapiens
ttctctgcttggatgcacacagaatattcttgctcacagaataactcactctctttacaaagcactttgtacttgattgattcattatataagaaccgtaaagcaactctgagagttagtcagagaaaagctaaagatgcagggagttttttgtttgtttgtttgtttgtttgttttttgagacggggtcttgctctgtcgcccaggctggagtgcagtagcgcgatctcggctcaatgcagggatttttgtgtatctgcatctgcagaggttgttggagccatcctgtctattcgtttctttctccagcctctcttagcagctgggaagagagagtggagagaaagagggatcaggacagatgtggacacggcagaagaagaggagcctgctgtgacggacttccttgaaatgacaaacaagtaaatatttaagggaataagtaaaaccaaaagaaggactcatgggttggaagaatggaaggagaaggaaaaggcagatgggatagggatagacattgaagattgcaaacaggctagtagcaaagaaagcaaaaacaaacagggtttttagaagccagataaaccttggattcctggtgttgtcacttctgagctatctctgttaccttagcaaagcatacttatttcatgcaatagggacagagggtcactcctgctgatatcttcttttgcatcatctcacatctacctacctactggttggatgatcctaagctaattacctcactcctctaaactgcagctgtcacataagcaggcaaaaaaactttgaaaggccttacaaaagcccatcaagctctacagtaatgctgtccaaggcagtcacaacaggccacatgtggctatagagcacatgagatggggccagttggaattgagatgcaaaatacacaccggactttgaaaacttagtttgaaataatgtaaaataagtaagaatgtaaaatatctcattaataattttcatagtaattatacatggaaattataatatttttggtacattggataaataaaatatattattaaaatcaattttacttgtttctttttacttttttactgtggctact

SEQ ID NO: 463363 - DNA, 2492 bp, Homo sapiens
agttgcttctctctactttaggattaaagatgaggtagaagagtcagcaatgatgggagtaagtggctatgtggagtatctccgagagcaggaagtatctgagcggtggttccggtacaaccctcgtctcacctgcatctattgcgccaaatctttcaaccagaagggaagcctggaccgccacatgcgcctacacatggggatcacaccattcgtctgccgcatgtgtggcaagaagtatacccggaaagatcagctggagtatcatatccgcaagcacacaggcaacaagccctttcactgtcatgtctgtggcaaaagtttccccttccaggccatcttgaatcagcactttcgcaaaaaccaccctggctgtatacccctggaggggcctcacagcatctcccctgaaacaactgtcacatctcgaggacaagctgaggaagagtcaccttcacaggaagagacagttgctcctggggaagctgtccagggctctgtgtccaccactgggccagactgaaacatccagggggagggggctgaccctcttcccctatgagccataagcagccagcatcagagccatgggctgatacttagattcacaaaatgccacatcactaggccagaagatgctcccaagatgttgccaaactggaggatcagcaacttacacaaaagcactaaaggctcctcccttcttattgcccgcctcacactttggaaaataatcaagcaaatcaactttctaattcagggatcaacagccttggtttgttaactttataagaaaaaaggttttttaacaaaacgatgatgataaatggtcatttatctatcagtcatgtttgaacactgtactttggtccatatcatcttggtggctataattgcccggatctaaaaaatgcagcaggagcctcaaccatccgaagcagccaaccgcaagagaggaggtagtcatgatggtgatgaggaggagaaatttctcctcttccttccctggcataacatgcatttttgtgtttcaagaaaaaaatgaatactggtggttcttattttgaaaggttaggctttatctttcccctgactaggcatctaatactttgcctggttatttcatataatcagccatcttgaagcagtattctagtggacaacatcacctgaagcacttggcaactgggagtgaaatgagcagcaaagtgtatgcaataggtactgctacatttggggggcttgagtgttgtgttgaggaagaggagagcagggagggaagtgtttttatgttttgcaaatatcaaacagcacagagccgttctgcaacttcctgactggtatttgtaaaccatagtgctacacatccttgggtaatggctctagttcaggtgaattaatgtgttaggctgactaccaaagtttcatctagtctctttggctcctattttcacgttcagcaatattgtaatcaaaaatgtcactttccagtgaaatgagcctggattgtatttttaaatccacaggtctccatatttgataacttttatatgaagttttaaacatgttttttctgcagtattgtggttgaagaaattcaacactatggttcttactgcaaccacaatttcatttccttatacatatgtaatagtttatattttcaggcatatagaaggacctcacttaaaactatgtctcgggtctgcaaacctagtaattcataaaccaaccatcagcaaaccatagctggtgactccaagagctttgctttttaataatatactacagggcacttatcagaaaacatcatgcagaatcatgttgcaataaatgatcaaaggatcaattttggtcaggtttggttacttagtcattcctaagatttttaaaacttcaagggacccttttagtaattctgggtatttctaagattcttaatccagcactgagagaaagaacttagcaaacatgtagagctttggataccccgtctttcatgaagtgagagaaggaggaatattaagggatgccggcaaatagatgcttataacttacagtgcaagttgaaaaatctctagcttctgttgacggagcactagttgttggggttcttttaagtatgtaatggtttaagaaattgtttcagtgcagaggcatagatgactgtaaaagagatttggcagagggacaggttgtacctgcactggtgaaccatctgtgagaatgttagtcatgtgctcctttcctgagattgctttgtggtgttctcagtctctcctcctgtaagattctgtccttcccctgatgacaagccaatagttcttggtggggttgcatgtctcctagagccccaggacccctgtcgtgtcggggaaggggggagggcaggagggtgggcagagactcgggttgggggagggagttcaaagaaagagtgaaaatatgggtttatataaacatatttaaagcagtttagcaaaagctttctc

SEQ ID NO: 463364 - DNA, 4619 bp, Homo sapiens
tgtgttgcactgagccgctgtctccaggccgaggcccagcagtgaggccggggacctgtttatagggcctggggcttccagaagggagtgactcccagttgggtcccccatctgtgagccagacacctgaggacaggcctctctcagtgcctacgggctggcagacagctgcctggcaacagcaggtatctaactggtgtgctggccatgggctgatggtggacctgccttctgcacctgtttggggggtcactatagggcaggcctgctttacacagcaggtgaagactggtcaacattgtcacgctgagaagtgactctcagtggtgggagcccttcaagagcactggccacgtcttgttcaccctggcatccctagtgaggcctggcccaagacctcgctgtcttgtccttgggtgacatgagggccggtcttaggtgtcgacttggctaggctacaatccccagttattccatcaacactaatctaggagttgctgtggaggacgcagaggggcatgaggggcgagggtccctggaagacacagtccgttggggaaactcccacgccaagctcagcgcccccctccccgcccagctctgatggccggcctgcccttgctcctgcactggtggcccccaggtctggacccacttgcattccccccacgtccctagtgtcacgccgcagcccagccctgcggctccctcactgctcctctcagggacagaggccgtggctgccttgtgtttcctgcagaatcttcccagcctgtccagggagatgtttctctccttctcctcctcctcctcctcctcctccttcttcttcttcttcttcctccccttcctcttcctcttcttctttggaattaaatgggacttgggctctggagaaagcaagcccagacactgcaacaagctcacagctccatgaagatccagccagggccagccccttagaggccaggggatggattaggtgaccccagaggagccctgctgacacctggattccagctgctttcgtggccatgtgggggtggctgtgcgtgccccgccactgcgtgcgtgggtgtctgtgtgtgttatcggtggggggcgcgtgagtgtggccgcgggtgggtgtgtccgatgtgccccggcttgggaccgcgcccgctgcgcccacttgtggctcctgggagccgccagggggaaccgcgccttcaccgcctctgccgaggacgccgccagataggaggctgatgacatgagggctccgtctcccgagtgatggcagcgcgcgctgcttcgccgcctccgccgctcagccccggactccttacgtcagggtagcggggtcccccctccgcgcgggagccagcgaacagcgagagagcacagcagagcgcgccgcggagccggggcgccctcactgcgctaggagccccactaaacccagcggagcggagcctggcgggaggcagcgccgcggagccagcgccggacgccgcaagcagactccccggccagcgcaagcactccctggccggcgccggaccctcggggcgccggattcgtcttgtgtgccccacgtcatgcgcgcgggcgtccgcggctctcccgaccagccccagcgcggtgggcccaggctcagaggtcccggcgcctctcgctgaagtagttgggtagccggggctgggggtcgccacgtcgggggcgcggccaggacccgcggagccggtccccgagcgcggggagcggggccgcccgcgccgccccaccattacctccccgggcggcaaggaggagctggtggcggtcgcctcccggctgtggcagcggcggcggcgtgccgctgctgctgcaggcggcgccccgaggcgccgcgcactatgagatgatgggcacctgccgcatgatctgcgacccttacactgccgcgcccggcggggagcccccgggtgcaaaggcgcagccacccggacccagcaccgccgccctggaagtcatgcaggacctcagcgccaaccctcctcctcctttcatccagggacccaagggcgacccggggcgaccgggcaagccagggccgcgggggccccctggagagccgggcccgcctggacccaggggccctccgggagagaagggcgactcggggcggcccgggctgccagggctgcaactgacggcgggcacggccagcggcgtcggggtggtgggcggcggggccggggtaggtggcgattccgagggtgaagtgaccagtgcgctgagcgccaccttcagcggccccaagatcgccttctatgtgggtctcaagagcccccacgaaggctatgaggtgctgaagttcgatgacgtggtcaccaacctcggcaatcactatgaccccaccacgggcaagttcagctgccaggtacgcggcatctacttcttcacctaccacatcctcatgcgcggcggcgacggcaccagcatgtgggcggacctctgcaagaacgggcaggtccgggccagcgccattgcacaggacgccgaccagaactacgactacgccagtaacagcgtggtgctgcacttggattcaggggacgaagtgtatgtgaagctggatggcgggaaggctcacggaggcaataataacaagtacagcacgttctcgggctttcttctgtacccggattaggggcgcggggggtgcgaggcggggtggctgcaggccgcccggtctccgcccgggcgcggctccttggcaaaggccactctcgattcataacacttcctgacatctcctttggaaaagacaaatccctgcgtcctccctgccccgctcctggcctcagtgcgtctgcgacccaccacgctcagggctgtgctcctggtctccatccccatcccggcaagggaggaagggacgcccgagcccttgaggcggcggcacagactttgcaaacctgattagactggacaggcagggccgggagcctgccctcctcagacagcctcctcccagtgcctagaagcggagggctccgggccctggccagggaggtaggccagagggagcgcgggcttcctggggcgtccttctttgtgacccgaaatacttgtgcagatttccctgtccatcagccaaaaccccacccacagcagaattccagcaaacagaaaattcacctctccacaccgcattccctcctgactcagactcaccgcgatgcattaaattatgtttttagactatgcgttctgttgtctgtatgtcgacacatcctggaccagggctccagatggcctgctgaccactttctcttagaacagctctcccttttctcctctagggctcagctggcacatgatttccagtagtccccccacagccctggtgctccatggcttctcttctccccaccctgggggccagagaaccctgctgagagcctctctgcatggcagttatgacactgttgtaatcctgtgtcaggtggtctgtcttccccatggactgtagacttcacaagggcgctacctggtgtctgtgtgggccaccagagaatattctctgcccccagcacttctaatggtgcctggcacacagtaggtgctcaataaatagtttcagaatggatggatagagggatggaggcatcctgggggatcttgagaaggtaaatcttgaaaacattttgacttcacaatgggatcatagggggttgtcccagcaagctgaatcactgctttctaaccaatgagtctccatctatcccccactgtcacccctagccccgagtttttaaggttggggtgaaagggggcagatatatgtaaaggtgcatttattacaatctttgggtccctggttacatctttaggaatgaccaaaaccttctagctgacacaagcttatgaccactgccatactgcagcttctgggctgctttagcctcccccttggggccttggggatgaccctctgtattctggagcttcttgggcagtagcctcatttccagtagggtcccttggttggtgcttttgctgtgaggattctttcattttcttgaaacgaaaaacatcttttgaaaaattgttgacataatatgcagtagcaaaaaatccaaacaacacagagaaatataaaagagcaaaaattccctctcccttactgcaatgtccttccccagagacaatttgttaacagcttgacttgtattctttcagacttttagaatgcccatatgtgtggctctgaacacgcagagtgtaaaattctaaacactgctccacacctgggtcccccttcatgcttactctcggacaactcagcggtgcacatagagcccctgtttcttttgaccgaggtgcattcattgtactgttgatgatgacctttaataggaggaacaaatcttccaccactgggtctgtgagctgcttccagcattccctggtctagtggaggaagagtctgctgatagcttcctctttcacttatgtgttctgccttcatgtgggaaagtactactttatttccaaatcagtataaacaaggtctttatccaatgtacaaatgattctgcccttgatttctaccttgtggtatatttcctatactcagtagcccctcttct

SEQ ID NO: 463365 - DNA, 4678 bp, Homo sapiens
tgtgttgcactgagccgctgtctccaggccgaggcccagcagtgaggccggggacctgtttatagggcctggggcttccagaagggagtgactcccagttgggtcccccatctgtgagccagacacctgaggacaggcctctctcagtgcctacgggctggcagacagctgcctggcaacagcaggtatctaactggtgtgctggccatgggctgatggtggacctgccttctgcacctgtttggggggtcactatagggcaggcctgctttacacagcaggtgaagactggtcaacattgtcacgctgagaagtgactctcagtggtgggagcccttcaagagcactggccacgtcttgttcaccctggcatccctagtgaggcctggcccaagacctcgctgtcttgtccttgggtgacatgagggccggtcttaggtgtcgacttggctaggctacaatccccagttattccatcaacactaatctaggagttgctgtggaggacgcagaggggcatgaggggcgagggtccctggaagacacagtccgttggggaaactcccacgccaagctcagcgcccccctccccgcccagctctgatggccggcctgcccttgctcctgcactggtggcccccaggtctggacccacttgcattccccccacgtccctagtgtcacgccgcagcccagccctgcggctccctcactgctcctctcagggacagaggccgtggctgccttgtgtttcctgcagaatcttcccagcctgtccagggagatgtttctctccttctcctcctcctcctcctcctcctccttcttcttcttcttcttcctccccttcctcttcctcttcttctttggaattaaatgggacttgggctctggagaaagcaagcccagacactgcaacaagctcacagctccatgaagatccagccagggccagccccttagaggccaggggatggattaggtgaccccagaggagccctgctgacacctggattccagctgctttcgtggccatgtgggggtggctgtgcgtgccccgccactgcgtgcgtgggtgtctgtgtgtgttatcggtggggggcgcgtgagtgtggccgcgggtgggtgtgtccgatgtgccccggcttgggaccgcgcccgctgcgcccacttgtggctcctgggagccgccagggggaaccgcgccttcaccgcctctgccgaggacgccgccagataggaggctgatgacatgagggctccgtctcccgagtgatggcagcgcgcgctgcttcgccgcctccgccgctcagccccggactccttacgtcagggtagcggggtcccccctccgcgcgggagccagcgaacagcgagagagcacagcagagcgcgccgcggagccggggcgccctcactgcgctaggagccccactaaacccagcggagcggagcctggcgggaggcagcgccgcggagccagcgccggacgccgcaagcagactccccggccagcgcaagcactccctggccggcgccggaccctcggggcgccggattcgtcttgtgtgccccacgtcatgcgcgcgggcgtccgcggctctcccgaccagccccagcgcggtgggcccaggctcagaggtcccggcgcctctcgctgaagtagttgggtagccggggctgggggtcgccacgtcgggggcgcggccaggacccgcggagccggtccccgagcgcggggagcggggccgcccgcgccgccccaccattacctccccgggcggcaaggaggagctggtggcggtcgcctcccggctgtggcagcggcggcggcgtgcctgcctggcggccgtcggcgtactcttggccatggcgctcgggctgctcatcgccgtgccgctgctgctgcaggcggcgccccgaggcgccgcgcactatgagatgatgggcacctgccgcatgatctgcgacccttacactgccgcgcccggcggggagcccccgggtgcaaaggcgcagccacccggacccagcaccgccgccctggaagtcatgcaggacctcagcgccaaccctcctcctcctttcatccagggacccaagggcgacccggggcgaccgggcaagccagggccgcgggggccccctggagagccgggcccgcctggacccaggggccctccgggagagaagggcgactcggggcggcccgggctgccagggctgcaactgacggcgggcacggccagcggcgtcggggtggtgggcggcggggccggggtaggtggcgattccgagggtgaagtgaccagtgcgctgagcgccaccttcagcggccccaagatcgccttctatgtgggtctcaagagcccccacgaaggctatgaggtgctgaagttcgatgacgtggtcaccaacctcggcaatcactatgaccccaccacgggcaagttcagctgccaggtacgcggcatctacttcttcacctaccacatcctcatgcgcggcggcgacggcaccagcatgtgggcggacctctgcaagaacgggcaggtccgggccagcgccattgcacaggacgccgaccagaactacgactacgccagtaacagcgtggtgctgcacttggattcaggggacgaagtgtatgtgaagctggatggcgggaaggctcacggaggcaataataacaagtacagcacgttctcgggctttcttctgtacccggattaggggcgcggggggtgcgaggcggggtggctgcaggccgcccggtctccgcccgggcgcggctccttggcaaaggccactctcgattcataacacttcctgacatctcctttggaaaagacaaatccctgcgtcctccctgccccgctcctggcctcagtgcgtctgcgacccaccacgctcagggctgtgctcctggtctccatccccatcccggcaagggaggaagggacgcccgagcccttgaggcggcggcacagactttgcaaacctgattagactggacaggcagggccgggagcctgccctcctcagacagcctcctcccagtgcctagaagcggagggctccgggccctggccagggaggtaggccagagggagcgcgggcttcctggggcgtccttctttgtgacccgaaatacttgtgcagatttccctgtccatcagccaaaaccccacccacagcagaattccagcaaacagaaaattcacctctccacaccgcattccctcctgactcagactcaccgcgatgcattaaattatgtttttagactatgcgttctgttgtctgtatgtcgacacatcctggaccagggctccagatggcctgctgaccactttctcttagaacagctctcccttttctcctctagggctcagctggcacatgatttccagtagtccccccacagccctggtgctccatggcttctcttctccccaccctgggggccagagaaccctgctgagagcctctctgcatggcagttatgacactgttgtaatcctgtgtcaggtggtctgtcttccccatggactgtagacttcacaagggcgctacctggtgtctgtgtgggccaccagagaatattctctgcccccagcacttctaatggtgcctggcacacagtaggtgctcaataaatagtttcagaatggatggatagagggatggaggcatcctgggggatcttgagaaggtaaatcttgaaaacattttgacttcacaatgggatcatagggggttgtcccagcaagctgaatcactgctttctaaccaatgagtctccatctatcccccactgtcacccctagccccgagtttttaaggttggggtgaaagggggcagatatatgtaaaggtgcatttattacaatctttgggtccctggttacatctttaggaatgaccaaaaccttctagctgacacaagcttatgaccactgccatactgcagcttctgggctgctttagcctcccccttggggccttggggatgaccctctgtattctggagcttcttgggcagtagcctcatttccagtagggtcccttggttggtgcttttgctgtgaggattctttcattttcttgaaacgaaaaacatcttttgaaaaattgttgacataatatgcagtagcaaaaaatccaaacaacacagagaaatataaaagagcaaaaattccctctcccttactgcaatgtccttccccagagacaatttgttaacagcttgacttgtattctttcagacttttagaatgcccatatgtgtggctctgaacacgcagagtgtaaaattctaaacactgctccacacctgggtcccccttcatgcttactctcggacaactcagcggtgcacatagagcccctgtttcttttgaccgaggtgcattcattgtactgttgatgatgacctttaataggaggaacaaatcttccaccactgggtctgtgagctgcttccagcattccctggtctagtggaggaagagtctgctgatagcttcctctttcacttatgtgttctgccttcatgtgggaaagtactactttatttccaaatcagtataaacaaggtctttatccaatgtacaaatgattctgcccttgatttctaccttgtggtatatttcctatactcagtagcccctcttct

SEQ ID NO: 463366 - DNA, 3778 bp, Homo sapiens
tgaacctggtacctcagttggaaatgcagaaatcacccgtcttctgcatcgttcatgctgggtgctatagactggagctggttccattaacttcaaatgatgatgaagatgaagataaagagaaaatgcagtgtgacaacaatattaaatcaaagacattacctgatattccctcttcaggatcaacaacacaacctttatcaactcaggataattcggaagtgttatttcttaaagaaaataatcaaaatgtatatggtttagatgattcagaacatatttcttctatagttgatgtacctcccagagaaagccattcccactcagaccaaagttctaagacttctctaatgagtgagatgagaaacgcccagtctattggccgcagatgggagaaaccatctcctagtaatgtgactgaaaggaagaagcgtgggtcatcttgggaatcaaataatctttctgcagacactccctgtgcaacagttttagataaacaacacatttcaagtccagaattaaattgcaataatgagataaatggtcatactaatgaaacaaatactgaaatgcaaagaaataaacaggatcttcctggcttatcttctgagtctgccagagaacctaatgcagagtgcatgaatcaaattgaggataatgatgactttcaattgcagaaaactgtgtatgatgctgacatggatttaactgctagtgaagtcagcaaaattgtcacagtctcaacaggcattaaaaagaaaagtaataaaaaaacaaatgaacatggaatgaaaactttcagaaaagtgaaagattccagctctgaaaaaaagagagaaagatcaaagagacagtttaaaaatagttcagatgtcgatattggggaaaagattgaaaacaggacagaaagatctgatgtcctggatggcaaaaggggtgcagaagatcccggttttattttcaataatgaacagctggctcagatgaatgaacagctggctcaggtgaatgaactaaagaaaatgacccttcaaactggctttgaacaaggtgacagagaaaatgtactgtgtaataaaaaggagaaaagaataacaaatgagcaagaggaaacatactctttatcccaaagttcaggtaaatttcaccaggagagtaaatttgataagggtcagaattccctaacttgtaataaaagtaaagcttctagacagacatttgtgattcacaaattagaaaaagataacttactcccaaaccaaaaggataaagtaaccatttatgaaaacctagacgtcacaaatgaatttcacacagccaatctttccaccaaagataatggaaatttatgtgattatgggacccacaatatattggatttgaaaaagtatgtcactgatattcaaccctcagagcaaaatgaatcaaacattaataagcttagaaagaaagtaaaccggaagacagaaataatttctggaatgaaccacatgtatgaggataatgataaagatgtggtgcatggcctaaaaaaaggtaatttttttttcaaaacccaagaggataaagaacctatctctgaaaacatagaagtttccaaagagcttcaaatcccagctctttctactagagataatgaaaatcaatgtgactataggacccagaatgtgttgggtttgcaaaagcagatcaccaatatgtaccccgttcagcaaaatgaatcaaaagttaataagaagcttaggcagaaagtaaatcggaagacagaaataatttctgaagtgaatcatttagataatgacaaaagtatagaatacacagttaaaagtcactcactctttttaacgcaaaaagataaggaaatcatccctggaaacctagaagacccaagtgagtttgaaacacctgctctttctaccaaagatagtggaaacctgtatgattctgagattcaaaatgttttgggggtgaaacatggccatgatatgcaacctgcttgtcaaaatgattcaaaaataggtaagaagcctagactaaatgtatgtcaaaagtcagaaataattcctgaaaccaaccaaatatatgagaatgataacaaaggtgtacatgacctagaaaaagataacttcttctctctaaccccaaaggataaagaaacaatttctgaaaatctacaagtcacaaatgaatttcaaacagttgatcttctcatcaaagataatggaaatttatgtgattatgacacccagaatatattggagttgaaaaagtatgttactgataggaaatctgctgagcaaaatgaatcaaaaataaataagctcaggaataaagtgaattggaagacagaaataatttctgaaatgaaccagatatatgaggataatgataaagatgcacatgtccaagaaagctatacaaaagatcttgattttaaagtaaataaatctaaacaaaaacttgaatgccaagacattatcaataaacactatatggaagtcaacagtaatgaaaaggaaagttgtgatcaaattttagattcctacaaagtagttaaaaaacgtaagaaagaatcatcatgcaaggcaaagaacattttgacaaaagctaagaacaaacttgcttcacagttaacagaatcttcacagacatctatctccttagaatctgatttaaaacatattactagtgaagcagattctgatccaggaaacccagttgaactatgtaagactcagaagcaaagcactaccactttgaataaaaaagatctcccttttgtggaagaaataaaagaaggagagtgtcaggttaaaaaggtaaataaaatgacatctaagtcaaagaaaaggaagacctccatagatccttctccagagagccatgaagtaatggaaagaatacttgacagcgttcagggaaagtctactgtatctgaacaagctgataaggaaaacaatttggagaatgagaaaatggtcaaaaataagccagacttttacacaaaggcatttagatctttgtctgagatacattcacctaacatacaagattcttcctttgacagtgttcgtgaaggtttagtacctttgagcgtttcttctggtaaaaatgtgataataaaagaaaattttgccttggagtgctccccagcctttcaagtaagtgatgatgagcatgagaagatgaacaagatgaaatttaaagtcaaccggagaacccaaaaatcaggaataggtgatagaccattacaggacttgtcaaataccagttttgtttcaaataacactgctgaatctgaaaataagtcagaagatctatcttcagaacggacaagcagaagaagaaggtgtactcctttctattttaaagagccaagcctcagagacaagatgagaagatgaagtgaatttatggattctggtttttctgaattttcaaagcataaggaatcaaaacagaaatatagtatcaagaagatgaaatgcttaatgaaaaggttttttttttgtttctttggcctttcatggagtgttgatttgtccattcttaatgtttattaataggtatatgtgcataaaatagctattttgtaacattaaactttttgagtcattttggtcatcatataacttaccttcctgtttatttaagcttctttttacctagtagcctttaaccaaacaataaccttttaaccaaataaaatgtgttaataaatacctttgcattggttatcttgtatactaggctgtcttgttttgctgtctgtttttaa

SEQ ID NO: 463367 - DNA, 3628 bp, Homo sapiens
tgaacctggtacctcagttggaaatgcagaaatcacccgtcttctgcatcgttcatgctgggtgctatagactggagctggttccattaacttcaaatgatgatgaagatgaagataaagagaaaatgcagtgtgacaacaatattaaatcaaagacattacctgatattccctcttcaggatcaacaacacaacctttatcaactcaggataattcggaagtgttatttcttaaagaaaataatcaaaatgtatatggtttagatgattcagaacatatttcttctatagttgatgtacctcccagagaaagccattcccactcagaccaaagttctaagacttctctaatgagtgagatgagaaacgcccagtctattggccgcagatgggagaaaccatctcctagtaatgtgactgaaaggaagaagcgtgggtcatcttgggaatcaaataatctttctgcagacactccctgtgcaacagttttagataaacaacacatttcaagtccagaattaaattgcaataatgagataaatggtcatactaatgaaacaaatactgaaatgcaaagaaataaacaggatcttcctggcttatcttctgagtctgccagagaacctaatgcagagtgcatgaatcaaattgaggataatgatgactttcaattgcagaaaactgtgtatgatgctgacatggatttaactgctagtgaagtcagcaaaattgtcacagtctcaacaggcattaaaaagaaaagtaataaaaaaacaaatgaacatggaatgaaaactttcagaaaagtgaaagattccagctctgaaaaaaagagagaaagatcaaagagacagtttaaaaatagttcagatgtcgatattggggaaaagattgaaaacaggacagaaagatctgatgtcctggatggcaaaaggggtgcagaagatcccggttttattttcaataatgaacagctggctcagatgaatgaacagctggctcaggtgaatgaactaaagaaaatgacccttcaaactggctttgaacaaggtgacagagaaaatgtactgtgtaataaaaaggagaaaagaataacaaatgagcaagaggaaacatactctttatcccaaagttcaggtaaatttcaccaggagagtaaatttgataagggtcagaattccctaacttgtaataaaagtaaagcttctagacagacatttgtgattcacaaattagaaaaagataacttactcccaaaccaaaaggataaagtaaccatttatgaaaacctagacgtcacaaatgaatttcacacagccaatctttccaccaaagataatggaaatttatgtgattatgggacccacaatatattggatttgaaaaagtatgtcactgatattcaaccctcagagcaaaatgaatcaaacattaataagcttagaaagaaagtaaaccggaagacagaaataatttctggaatgaaccacatgtatgaggataatgataaagatgtggtgcatggcctaaaaaaaggtaatttttttttcaaaacccaagaggataaagaacctatctctgaaaacatagaagtttccaaagagcttcaaatcccagctctttctactagagataatgaaaatcaatgtgactataggacccagaatgtgttgggtttgcaaaagcagatcaccaatatgtaccccgttcagcaaaatgaatcaaaagttaataagaagcttaggcagaaagtaaatcggaagacagaaataatttctgaagtgaatcatttagataatgacaaaagtatagaatacacagttaaaagtcactcactctttttaacgcaaaaagataaggaaatcatccctggaaacctagaagacccaagtgagtttgaaacacctgctctttctaccaaagatagtggaaacctgtatgattctgagattcaaaatgttttgggggtgaaacatggccatgatatgcaacctgcttgtcaaaatgattcaaaaataggtaagaagcctagactaaatgtatgtcaaaagtcagaaataattcctgaaaccaaccaaatatatgagaatgataacaaaggtgtacatgacctagaaaaagataacttcttctctctaaccccaaaggataaagaaacaatttctgaaaatctacaagtcacaaatgaatttcaaacagttgatcttctcatcaaagataatggaaatttatgtgattatgacacccagaatatattggagttgaaaaagtatgttactgataggaaatctgctgagcaaaatgaatcaaaaataaataagctcaggaataaagtgaattggaagacagaaataatttctgaaatgaaccagatatatgaggataatgataaagatgcacatgtccaagaaagctatacaaaagatcttgattttaaagtaaataaatctaaacaaaaacttgaatgccaagacattatcaataaacactatatggaagtcaacagtaatgaaaaggaaagttgtgatcaaattttagattcctacaaagtagttaaaaaacgtaagaaagaatcatcatgcaaggcaaagaacattttgacaaaagctaagaacaaacttgcttcacagttaacagaatcttcacagacatctatctccttagaatctgatttaaaacatattactagtgaagcagattctgatccaggaaacccagttgaactatgtaagactcagaagcaaagcactaccactttgaataaaaaagatctcccttttgtggaagaaataaaagaaggagagtgtcaggttaaaaaggtaaataaaatgacatctaagtcaaagaaaaggaagacctccatagatccttctccagagagccatgaagtaatggaaagaatacttgacagcgttcagggaaagtctactgtatctgaacaagctgataaggaaaacaatttggagaatgagaaaatggtcaaaaataagccagacttttacacaaaggcatttagatctttgtctgagatacattcacctaacatacaagattcttcctttgacagtgttcgtgaaggtttagtacctttgagcgtttcttctggtaaaaatgtgataataaaagaaaattttgccttggagtgctccccagcctttcaagtaagtgatgatgagcatgagaagatgaacaagatgaaatttaaagtcaaccggagaacccaaaaatcaggaataggtgatagaccattacaggacttgtcaaataccagttttgtttcaaataacactgctgaatctgaaaataagtcagaagatctatcttcagaacggacaagcagaagaagaaggtgtactcctttctattttaaagagccaagcctcagagacaagatgagaagatgaagtgaatttatggattctggtttttctgaattttcaaagcataaggaatcaaaacagaaatatagtatcaagaagatgaaatgcttaatgaaaaggttttttttttgtttctttggcctttcatggagtgttgatttgtccattcttaatgtttattaataggtatatgtgcataaaatagctattttgtaacattaaactttttgagtcattttggtcatcat

SEQ ID NO: 463368 - DNA, 3718 bp, Homo sapiens
tgaacctggtacctcagttggaaatgcagaaatcacccgtcttctgcatcgttcatgctgggtgctatagactggagctggttccattaacttcaaatgatgatgaagatgaagataaagagaaaatgcagtgtgacaacaatattaaatcaaagacattacctgatattccctcttcaggatcaacaacacaacctttatcaactcaggataattcggaagtgttatttcttaaagaaaataatcaaaatgtatatggtttagatgattcagaacatatttcttctatagttgatgtacctcccagagaaagccattcccactcagaccaaagttctaagacttctctaatgagtgagatgagaaacgcccagtctattggccgcagatgggagaaaccatctcctagtaatgtgactgaaaggaagaagcgtgggtcatcttgggaatcaaataatctttctgcagacactccctgtgcaacagttttagataaacaacacatttcaagtccagaattaaattgcaataatgagataaatggtcatactaatgaaacaaatactgaaatgcaaagaaataaacaggatcttcctggcttatcttctgagtctgccagagaacctaatgcagagtgcatgaatcaaattgaggataatgatgactttcaattgcagaaaactgtgtatgatgctgacatggatttaactgctagtgaagtcagcaaaattgtcacagtctcaacaggcattaaaaagaaaagtaataaaaaaacaaatgaacatggaatgaaaactttcagaaaagtgaaagattccagctctgaaaaaaagagagaaagatcaaagagacagtttaaaaatagttcagatgtcgatattggggaaaagattgaaaacaggacagaaagatctgatgtcctggatggcaaaaggggtgcagaagatcccggttttattttcaataatgaacagctggctcagatgaatgaacagctggctcaggtgaatgaactaaagaaaatgacccttcaaactggctttgaacaaggtgacagagaaaatgtactgtgtaataaaaaggagaaaagaataacaaatgagcaagaggaaacatactctttatcccaaagttcaggtaaatttcaccaggagagtaaatttgataagggtcagaattccctaacttgtaataaaagtaaagcttctagacagacatttgtgattcacaaattagaaaaagataacttactcccaaaccaaaaggataaagtaaccatttatgaaaacctagacgtcacaaatgaatttcacacagccaatctttccaccaaagataatggaaatttatgtgattatgggacccacaatatattggatttgaaaaagtatgtcactgatattcaaccctcagagcaaaatgaatcaaacattaataagcttagaaagaaagtaaaccggaagacagaaataatttctggaatgaaccacatgtatgaggataatgataaagatgtggtgcatggcctaaaaaaaggtaatttttttttcaaaacccaagaggataaagaacctatctctgaaaacatagaagtttccaaagagcttcaaatcccagctctttctactagagataatgaaaatcaatgtgactataggacccagaatgtgttgggtttgcaaaagcagatcaccaatatgtaccccgttcagcaaaatgaatcaaaagttaataagaagcttaggcagaaagtaaatcggaagacagaaataatttctgaagtgaatcatttagataatgacaaaagtatagaatacacagttaaaagtcactcactctttttaacgcaaaaagataaggaaatcatccctggaaacctagaagacccaagtgagtttgaaacacctgctctttctaccaaagatagtggaaacctgtatgattctgagattcaaaatgttttgggggtgaaacatggccatgatatgcaacctgcttgtcaaaatgattcaaaaataggtaagaagcctagactaaatgtatgtcaaaagtcagaaataattcctgaaaccaaccaaatatatgagaatgataacaaaggtgtacatgacctagaaaaagataacttcttctctctaaccccaaaggataaagaaacaatttctgaaaatctacaagtcacaaatgaatttcaaacagttgatcttctcatcaaagataatggaaatttatgtgattatgacacccagaatatattggagttgaaaaagtatgttactgataggaaatctgctgagcaaaatgaatcaaaaataaataagctcaggaataaagtgaattggaagacagaaataatttctgaaatgaaccagatatatgaggataatgataaagatgcacatgtccaagaaagctatacaaaagatcttgattttaaagtaaataaatctaaacaaaaacttgaatgccaagacattatcaataaacactatatggaagtcaacagtaatgaaaaggaaagttgtgatcaaattttagattcctacaaagtagttaaaaaacgtaagaaagaatcatcatgcaaggcaaagaacattttgacaaaagctaagaacaaacttgcttcacagttaacagaatcttcacagacatctatctccttagaatctgatttaaaacatattactagtgaagcagattctgatccaggaaacccagttgaactatgtaagactcagaagcaaagcactaccactttgaataaaaaagatctcccttttgtggaagaaataaaagaaggagagtgtcaggttaaaaaggtaaataaaatgacatctaagtcaaagaaaaggaagacctccatagatccttctccagagagccatgaagtaatggaaagaatacttgacagcgttcagggaaagtctactgtatctgaacaagctgataaggaaaacaatttggagaatgagaaaatggtcaaaaataagccagacttttacacaaaggcatttagatctttgtctgagatacattcacctaacatacaagattcttcctttgacagtgttcgtgaaggtttagtacctttgagcgtttcttctggtaaaaatgtgataataaaagaaaattttgccttggagtgctccccagcctttcaagtaagtgatgatgagcatgagaagatgaacaagatgaaatttaaagtcaaccggagaacccaaaaatcaggaataggtgatagaccattacaggacttgtcaaataccagttttgtttcaaataacactgctgaatctgaaaataagtcagaagatctatcttcagaacggacaagcagaagaagaaggtgtactcctttctattttaaagagccaagcctcagagacaagatgagaagatgaagtgaatttatggattctggtttttctgaattttcaaagcataaggaatcaaaacagaaatatagtatcaagaagatgaaatgcttaatgaaaaggttttttttttgtttctttggcctttcatggagtgttgatttgtccattcttaatgtttattaataggtatatgtgcataaaatagctattttgtaacattaaactttttgagtcattttggtcatcatataacttaccttcctgtttatttaagcttctttttacctagtagcctttaaccaaacaataaccttttaaccaaataaaatgtgttaata

SEQ ID NO: 463369 - DNA, 544 bp, Homo sapiens
agtattctgctttagcagctggttgttgaggctactgaggtggtcaaccctctcctggagcctgtggagcaccgagatgggaaagttttcatgcctgggaacaaggtccttttgcacctcaacctcatccggaaccgcatcacagaggtggggctggagggcttcctcgccacggtgcagtatcagatgcagttctccaaggccaagagtgcatccaagggtccagtggggctgctgtggctgtccctggctaaaaattgcttcgccccacaatgtcctgcgtacgccataatccaggagctgatgttgccaagggatcccatcaaggccaaactcagggaggatgaggccatggcattcttcccctagccccctcccacctgcttgcctctaagactcggggctacagaagcacctcctgtccctgtgtggggtgacctccctgggggagatctcagaccaataacaaagtctgttgctatacttttccttgaggtcgtctgaaaactttcttccagaactacttggaacatttagattttgc

SEQ ID NO: 463370 - DNA, 482 bp, Homo sapiens
tgtctggtgtgtcaggtgccaatgaggcctgtggtgctaagaggccacctgtctgtaacttccaccagggaaccgcatcacagaggtggggctggagggcttcctcgccacggtgcagtatcagatgcagttctccaaggccaagagtgcatccaagggtccagtggggctgctgtggctgtccctggctaaaaattgcttcgccccacaatgtcctgcgtacgccataatccaggagctgatgttgccaagggatcccatcaaggccaaactcagggaggatgaggccatggcattcttcccctagccccctcccacctgcttgcctctaagactcggggctacagaagcacctcctgtccctgtgtggggtgacctccctgggggagatctcagaccaataacaaagtctgttgctatacttttccttgaggtcgtctgaaaactttcttccagaactacttggaacatttagattttgc

SEQ ID NO: 463371 - DNA, 1772 bp, Homo sapiens
acgccaccgcggacgggtcggatccggtccctggacgcggaacagagatcccctgattcagccacccccagactgagccccgtagagtgcgttcttaccttcctgccccgacgaaggtcccagagacgctgcggacaacaccagcatgtcgagcgagcagagcgcgccgggggcctcacccagggccccgcgtccggggacccagaagtcttctggcgcggtgaccaaaaagggagagcgcgcggccaaagagaagccagcgaccgttctgcctcccgtgggggaggaggagcccaaaagccctgtgctggtggatggggagaaggaattataggagctggagaaacaacatcttctggaagggaagacaagacagtatacaatcccctacagaggagtaccagtgctccggggtcctcgagaccgacttcgccgagctctgcacgcggtggggctacacggacttccccaaagttgtcaaccggccccgcccccacccgcccttcgtcccctccgcctctttgtcggaaaaggccaccttagacgatccgcggctgtcggggtcctgcagcctcaatagcctggagagcaaatacgtgttcttccggcccaccatccaggtggagctggagcaggaggacagcaagtcagtgaaggaaatctacatccgcggttggaaggttgaggaacggattctgggtgtcttctctaaatgtctgcccccgcttacccagctacaggccatcaacttgtggaaggtggggctgaccgataagaccctgaccaccttcatcgagctcctgcctctctgttcatccacgctcaggaaggtgtctctggaggggaacccactgccggagcagtcctatcacaagctcatggccttggacagcactccccgcccttccttgtccccctaccatctcggcaagggccctcgatttctgcccctacatcctcagaccagaccgccccctcaagcgctcaagtctcccatattccggcggacgccctgtaccttttccagcgacccacattctccctccggctgccccaggattgcgcacttgtctctgcggaacaataacatcgacgaccgcggggcgcaactcctgggccaggcgctgtccacgctgcacagctgcaaccggaccctcgtctcgctcaacctgggtttcaaccacatcggtgacgagggcgcaggctacatcgcggacggcctccggctgaaccgttccctgctctggctgtccctggcccacaaccgcatccaggacaagggcgccctgaagctggctgaggtcctgcgcgccttcgagctgacacacaccgaagtggtggagcgccgacgcctcctgctggaaaaagggacacaggagcgctcgcgatcgaggtaaccatccctgaacagaagccaagcagggcaaaagggatcaagatcgggagcagagagaagcgcagcatcctcctggagtccgagaaaaattgcttcgccccacaatgtcctgcgtacgccataatccaggagctgatgttgccaagggatcccatcaaggccaaactcagggaggatgaggccatggcattcttcccctagccccctcccacctgcttgcctctaagactcggggctacagaagcacctcctgtccctgtgtggggtgacctccctgggggagatctcagaccaataacaaagtctgttgctatacttttccttgaggtcgtctgaaaactttcttccagaactacttggaacatttagattttgc

SEQ ID NO: 463372 - DNA, 3841 bp, Homo sapiens
ggggcatttcccacggatgtctaaaaagtctgaggacagtctcctgtactctctccggggtacactaacactgttgatgcttggcagggtggcaagtatacagagtgaacctggtcaacagaacctccttgttcagcagccgctggggaggaagaggggcctgaggcagctaagacgtcctctactatcacgtcagaaaactcagactgaacccagaaatcgccaaggggctcggctgtcaaccactcgcaggagcattcaacctaaaacgaagccgtctgcggatcagaaacgatctgtgaccttcattgaggctcagccagagccagcagctgccccaacagatgcgcttcctgcaacaggccaactacagggctgtagcccagccccttctaggaaaccagaagcaatggacgaaccagtcctcacatcttctcccgccatagttgttgcggatctccacagcgtgtctcccaagcagagtgagaacttccccactgaagaaggagaaaaggaggaggacacagaagcacaaggtgctactgcacacagtccactctctgcccaactctctgaccctgatgacttcacaggcctcgagacatccagcctcctacagcatggagacactgtccttcatatcagtgaggaaaatggcatggagaacccgctactatctagtcagttcacctttactcccactgagctggggaaaacggatgcagtattagatgagtctcatgtttaattctgtatcttgtaagctctgcaggtatagagaagacatgaaagtgatctctctactacaagttcaatacttttgcttgaaaaagattaattacaaaatagcactttacttctaatgggtggcacaaatctgaataggttttgctgccaatacacatgatgtttcataaacatcttaaaagtcaatggctaaaaggatttagttgtgtgaaaatcacaaaaccagggaggaataagcggaaagagccatttcactgcacattgtttatgattcaagaagccttcagcagttaaaaatatatactattcattgctgctttcatagaaatattaacaaatgatatgatctaaaaatagaatgcaattttttgagattactcacattatacatctcatgcaaatatttatttttatagtttaaaaaatatcaattcaggttggctatacaagtagcaatttacataaaaaaataattaataggaaaaatattactttggggagactaaataacaagcctgcagccatttttgttttgagtaacaatacagccatttagaagaagaaaaaaatactatatagagagctgtggacttttagatatttatttttcaactatcattttcattgcatgttgtaaatcaaaatgcagatggcataagatcatcccatttcataatctatcacattagaatattacagaatattctagaaatcatcagaaataattctgaattaagaacctaaacagcctatacaattataaaaactaaatgtatatataatcacttaaaagagatggtattcctattcctagccctgactacatcaataccaagattagaagctattggaaaatgtgattagtaatacttttccttatagtatcctgtgcctgccctggagggcatattttcagatattaaggttagtgttgttagaatcggtttaataaaataacattttcctaatagaaacaatattcttatgatacttggaacatctaagtttataaggaaaaatgtataaagtaagcaatttcttcatagacacctccagtttatatattttgcaaataggcctttaacttgaagttcaattacttcaagaaaagtgtaacacttagaaggcttgtgaggccaacacctagtgtgttactgatcctatggtagggctgtgcatcacgtggttcacaattgaatttcaaaattttaacagtttacattagaaaactgttacctaacaaccaagcatatacaaactcatatacatacttaaattggtacggtggtgtatgtgtgcgtgcgtgtgtgtgtgtatgtgttgtagtcctcaagatgaagttaaatatagactttaattaccctgcaatgaatttaaaacacattctgtatgcttaaactttgagtgcgttggctgtgaaatgtatacatatataaagaggatacctactaaacccaccttaatcataaaggaaaattattttttgttagaattgcttattaaataggcatactttatactgtggtttataatttcaaatataacttggggttatggtcctattcactaagagaatgaaagatatccatgagttaaaagaacaaaactaaaaatttcagatctaacaattgaaagaaaattgaggcagtaaatgacctcttttactcttttatgttttacaatattatcatgttatttacagttaatgctgaaataattctcaagtgcaggaatataaatgttaagtggttttatgattccaagctgatatatttcacctgttaaaaattatgctgctaaattagcattagaggccttatgtttggtaattacaagtgtctgggctattggcgcgtctctatatatgtgtgtgctttgttccagtttcttcaaattatctatgtataattgtatgaaatatttaaatagcaaagaagtcaaagaagattgttaaatattcaacaagaatcataaatacctttatatgtattttaaaagtattgggctgttctgaacatgattatgctggtctgtctgccttttagcctgactccttcactcttgtgtgtgaagtctattagcaactttcaataagctaagcaatgttgtaacttgcaaaaaagcctccactctgagaaacagggccttatagagtaggaatgttttcatactgggactactgaaattttgcagatgtgtgcatctgttccatttaaggtgcccttaaatgtgttgaatgtaatgtgttgaatgtttatgtgtaatggctaaagtatctatatgtatgtgcataaaactgtcacaagatgtattctcaggaatactgttacctggagtttgaaaggaataactattaaaaaaaaaagttggggaagattagaaaaaagctcaagataaatgttcaaaatattattaagtacatgactaaaagctaattactacatatgataaatgcagtgttggtaatagtagatcatttcttaagccatgatacttaatgatatttatcttattcagaggaaaaacaaaaaaggtacccacttcccatgtagaaaaaattagactcagcaaagaggttgcttcttctgaaattagcttttgagagaccttggaataaaccatgtgttatccatgatagtatgactcagatccaattaaaacagtttaaattctggatataggatctcctatagcaaaacattttactttcatttttcagtatttgctgctttctagaattctattagataagctatgtcatttttctgaaaaagaaactgagttattgagtgtattaagacaaggcactgagaactacagtgtcaaaatcaaagggcataaatgggcatggcagtgctggtggaaaaatctgtggtactggtgatctggttagggcctgttgcacaggctgggagtaactggtttgctgtttcaagcctccaagagtaccttaaacaaggtgatagctcctctcttctttagcattatattcctttagtcaacaaagaactttctccactctgctgcccagctctgagagtatctgagatgagaataggatgtgtgtggaggggcttttagggaagaaagggtc

SEQ ID NO: 463373 - DNA, 3396 bp, Homo sapiens
tctggaataccttcaaagaaagacaggcacaaacaagcccagactgtaaagactgcaataaatacctaactcttcaaagcccagaccctgaagaacattcacaagcatcaagaccacccaggaaaacatgacctcaccaaaggaactaaataagacactggtgaccaatcctggagaggcaggtatttgtgggaaatacattgagcagccccactttaatagtcctggtgactcatttgagagaggaactccctcccgtagcctaggattctccctccagggcctgcccatcagcatccttgcatatttagaacgacaccttgggagaaatgcatctcgcagtgacacttcagtgactcagacgctttgtatacagagaaattccagtgactatgaaatgatgaagaaaaacgccgtcattgatctcatgggggcagaaggcatggagggaggtgcttcaggaaacctgcattctcgaaaacttgttagctttacattgtcagatcttagggcagttgggctaaagaaagggatgttcttcaatcctgacccttatcttaagatgtcaattcagccaggaaagaagagcagtttccccacctgtgcccaccacgggcaggagagacggtctactatcatcagtaacaccaccaatccaatttggcaccgagagaaatattccttttttgcacttcttactgatgtcttagaaattgaaattaaagacaaatttgccaagagccgtcccatcatcaagcgttttctggggaaactaaccattccagtccagaggctgctggagcgacaagccatcggctacaaccttggcagaaggctcccagctgaccacgtgagtgggtacctccagtttaaagtggaggttacgtcttctgttcatgaagatgcctctccagaagctgttggcacaatacttggagtcaattctgtgaatggagacttaggtagcccttccgatgacgaggacatgccagggagccatcacgacagccaggtgtgctctaatgggccagtttctgaggacagtgctgccgatggaacccccaagcattcattcaggactagctccactctggaaatagacacagaggaattaacctctacgtcttcaaggacctcacctcccagaggacgtcaggattcactcaatgattacttagatgctatcgaacacaatggccactccaggccggggacagcgacctgctctgagaggtccatgggtgcctctccgaaactgaggagtagttttcccactgacacaagactcaatgccatgcttcatattgattcagatgaagaagatcacgagttccagcaagacctgggttacccatcttccttggaggaggagggaggcctgatcatgtttagcagggcatccagagctgatgatggaagcctgacatctcagacaaagctggaggacaaccctgttgagaatgaggaagcctccacacacgaagctgcttcctttgaggataagccagaaaatcttccagagcttgcagagagctccttacctgcaggcccagccccagaggaaggtgaaggcggcccagagcctcaacccagtgctgaccagggcagtgctgaactgtgtggctctcaagaggtagatcagcccacaagtggcgcagacacagggacttccgatgcatcaggaggaagccgaagagccgtcagtgagaccgagtctctcgatcagggctctgagccttcccaggtgtcctctgaaacagaacccagtgatcctgccaggacagagagtgtgagcgaagccagcaccaggcctgagggagagagtgacctggaatgcgctgacagctcctgcaatgagagtgtgaccacgcagctgtcctctgtggacacacggtgctcctctcttgagagcgcacggtttcctgaaaccccagccttttcttctcaggaggaggaagacggagcctgtgcagcagagcccaccagcagtggccctgccgaagggtcgcaggaatccgtgtgcactgctggttctttacctgtggtacaggtgcccagtggggaggatgaagggccaggggcagaatcggccactgtacctgaccaggaggagctgggggaggtctggcagcggagggggagcctggagggagctgcagctgctgccgagagcccaccgcaagaagaaggcagtgctggggaggcccaaggcacctgtgaaggggcaactgcccaggaggagggcgctactggaggttctcaagccaacggccaccagccactgcgatcactaccttcagtgcgccaggatgttagccggtaccagagggtggacgaggctctcccaccaaactgggaggcacgcattgacagccacggcaggatcttctacgtggatcacgtaaacagaaccacgacgtggcagcgaccgacagctcccccagccccgcaggtgctgcagagatctaactccatacagcaaatggagcagctgaaccggcgatatcagagtatccgcagaaccatgaccaatgagaggcctgaggaaaataccaatgctattgatggggcaggggaggaagctgactttcaccaagccagtgcagatttactgagcactcagcttcgcaagtttgttgatgattatgtgctaggcactgagctaagacctagggatacagagatgacagcaactgtgggccctggcatcccagacttgagagcaattataatgtcataaccagaattacaagtgcaataatggatggctatagaagatacactgctggagtggacgattaactccaaagggaaggcacatggaaggggccatagacaggtttggatttgagattagttttaaaggctgattaagagcttgtcccagaaacaagatgggcaggagtactctaggtagaagaagcatcatttgcaaaacaatcgattcgtgaagctgcaagtctgtcttgataattactgcagaagttctaaaactggattattagtattgtaagcaattcggtgttgctggtgtattgagaacataggacactagtgaaagtcagatttgagcctgggaagggatacagaagctaggctacacaaacctaaactcatatatgggacaattctaggaggtgacaggctttcatgcaaggcagaatgggctaacatttagagttgtcactgtaacacagaaaaaaatcatgctttaataggaagagactcagacttggagtcagaaggcacaagctcccctttgttttttgttcatttgttcatgccttcatttaatcagtatttattaaatgcctgtgatttgcctggtacattctagactctgggaatagagtggtaaataagacagagtagaatatagttaacagactagtgaat

SEQ ID NO: 463374 - DNA, 751 bp, Homo sapiens
cccatagagatgtcttgccctctgttgcactgtgaattggggcaaagaccacatctagagcctaggtctccccaaacccaggcctcctgcatctcctattgtttcagcttgtttctctggtttcctcagccttactccccactctcagaatctgttttggcctcgtatgctgccccctggtcaaaagccctggctgctcgtgcactgataacttcatcttttcggacatctgggaactaccgccacaatgtctggaaaaaaaatgacttcaaactaatgcagcagaggcaaaccatggtttggccaaaaatggaacagaatttacaagggaaaagggaagttcctggagtaatatggtcagatgaggatggaactggtgaatgagcagaagagaaggttggaagagtgcagtggtgatgacagccctccgctgctccttccccagaggaaggagctccaagtttattcacccctcttttaccatgaggcagagggaaaacaatgacaaatacacagtaaacttcgttatcaacaaacagaagttgttaccaaggcaacagaacaagagcatccctgcatccagccatcacagtgtgaagtgagtttcagatgaggagatgccttgaggggcaaggagacccttcaggaaaaagctgacctgataaaggaatcaaggagctgccatcccaactgatgtcttttttccctttctcaataaagagaagagcttgcaagagccctgaaagacaga

SEQ ID NO: 463375 - DNA, 2807 bp, Homo sapiens
ggaggcctggcctctctgtggcactgcccctcacccctctgggctgcagtgactcccagaggtgggatctcattggtccctgagcgcctggcaggactgacaggcgtgggttgatgaacatgaacaggtggggcgggcctacagcaaggagcagcaccagcgcctgtgtgtgtactgtggccgctgctcggccccgggcggtgcactttacctgaaccgtccttccaggcctcccaagccatctgcaggaagtgctgtttccatcccaggcctgagatggtggaaaggctggggactccagggacacagggctggcaggcgggtgaggtgggcaagtacccccggcagtcgggctccggagcccgccttcttgaccaggccgctggcagtgagccagccgggttccgtttccatcgcgggccttatccggggcgtattccttccaggtgcggcctccggggaagcccagtccccagcctggaggtgacgaggccggcgcacccaccaggggtcgctgcaggcaagagctggaggcctgaaggcagtgcggcccccagcaagctgggcctgtgtgctgctcccatggcggccacggcccccttacccaggacaccaccagcccagcagggaggggctgacgccaggtccaaagagtggcccaaaaaaggccctggggcggggatgctgttgggctcggagcctagcgagcaaggggagacgcaggtccaggctggactgggacagatgagagttatgggatctcaggaacagcagctgcaggaagcggctgctacctttagggctgagagggagtcaacaatgaaggaactaagacttccgccccctcgagtggagccccagaccttcaggaggggatgcagctgctgctggaacaccaaaaactgctgctggtggggagatttgccagcccagcccccttggcccagccaaaaggctcccctgaagcagcccccaagcatgagctggtccggactgccctgaggtcctcctgctgccagcttcctcgtgcggaagacagcctgtggatgcctccagttctgcaagagccttccctggctggcacctgggctgatgcagcagatcctcctgtgggcctgggcttccagaggcttcccagtgtgcctgcccgaggtcacatctccagcaggggcagccctgggttgggaacacgggcctctgattccaagcgagctcctccattcctggcggcttcaggagagctcctgggggtgctccgaggcttgttctcctcttctgtctggatgaataagattctggagaatcaaagacaagaggcctgcaattaaattctattttaaacaagaaatgaagacactgcttaaaataagttctgtggagatatgtgaaatgtaatgttaatgaaggtattgggtatttactgagagccaaatactgttgtaagcttgttacaaggtcctgtatcctcaatccttaaaacaactcccttacattggctctggagaggaagccagatggctgctggctttttccttacaaagcaacacctccagacacctggtttgtggctcgggatgccagaaaatggtgctccttttgcacattgcttaattcacagaccctcactatagaatgtaagacagtagaggaaagcatttttccctcccttatagcagtaaggatattcacatcgtgcaactatcaccaccttcctctccagaactctttcattatcccaaactgaaactctatgtccattaaacaataactcaccactcctccttccctccagcccctggcaatcaccgttgtatcatctgtccttttgaatctgactgccttaggctgtagctccctatgccaccacctcgatgccagtcccactccaaccagtaagaaccagagcatctaccccacactgggcatggacactgaaagccaaaacaccctactgtgtgtatgaacctcacttgatgttattcctgtcttcatcagcacgactttattttcccaggagtcaccatcaagcccaggcagatggcttgatagttcttataggaacttctggaaagactcatctactctctgatggaaaacatcaacaggtgctggtgatgctggtggcagctgttgacaccaggcaccacttctgatagctgtcggctgtccagatttcaaaaatctcattgttcttgtcatttgttcctctgggtgtgcaggttgattagtcataatggtaattctatgccttttgctagtggttgtcaaaatgtcgatatgtgacctaattccagccaatagaggttggagtaaatctgcagaggccattacttctgggaaagatgtttctctgtaagaaaagtaattatcaggaggaaatgcccccccccaactggtgtctttttgtgtgatatcaactattcgatggtatgtggctgatgatggttaagtgcaaggatgcaaagctctggggctcagctctgaaaggtcacctccccatcaaagccaggccgcctccatccagcacatctgcatggggccccttggattttgcctgtgggcttgtgcttgtggcaggcctctgcttgcctgtctctctctgtattgttgggctgtgagctctgttttcctgtgtccccctatcctgttgggctgtgagctctgcctccctgtgcccccctgtcctgttgggctgtgagctccctggtgctgcacacttgtcccttactgcccctccccagtgcagtctttacatggtcgggggcatggtggggaagtccctgaaagcagggccgtttcatgaattc

SEQ ID NO: 463376 - DNA, 823 bp, Homo sapiens
ctctgtgtcccacatccagggcacactgacacagggtgcaagctgccaatggatctaccattctgggatctggaggacaatggccctcttcttctcacagctccactaggcagtgtcccagtggagactaaatatgggggttccaaccccacatttcccctctccactgtcctagtagaggttctctgtgagggctctacccctgcaacaagcttctgtctgaatatacaggcttttccatacatcctccatacatacataggcagaggctcccaagcctcaactcttgcattctgtacacccacaggcttaacaccacatgaaagccaccaaagctatggattgcacattttgaagcagctgcctgagctgtacctaggcccctttgagccgaggctggacctggagcagctgggacacagggagcagtgtcccaaggctgtgcagaatgtggtttacactaatttacattcccgctgacagtgtacaaggcttctattttctccacattctcaccagaatttgttttgttttttagaaacaggctcttgttctgtcacccatacttggagtgcagtggtacaatgatagctcactgcagcctcaaactcctggtctcaagcaatcctctcacctcagcctcccagaaaaaaaaggccttatgaagacattgcaaaaggacaactatctgcaaaccaggaagacagacctcaccagaaatcaaccctgctggtggtaccttgatcttagacttccagcctccagaagtatgagaaaataaatatctgtaatttaagtcacctagtctatggtattttgttat

SEQ ID NO: 463377 - DNA, 475 bp, Homo sapiens
ctgacagaaccagagctgttagagcagggacgcgcgaaaggcgggagtacgggcggcgctggagaacctccgcggcggaggggcctgggggtgggaccgcgcccgcgagcccgccctgaccggggtgtctgtgtgcttgtgaagcgctcccttgttagttccttctgtgagactcgggggagactgaagagggaaatcacctgcggggaatgaacaggaaagcaataagaagatttggaaaagaggcactggctactggaggaagggagaaatcaccgagagagcgaaagatgtaacagaaaaaaaaggccttatgaagacattgcaaaaggacaactatctgcaaaccaggaagacagacctcaccagaaatcaaccctgctggtggtaccttgatcttagacttccagcctccagaagtatgagaaaataaatatctgtaatttaagtcacctagtctatggtattttgttat

SEQ ID NO: 463378 - DNA, 857 bp, Homo sapiens
agtggttttcctttgtccctaccccaattaatgattaatttcctttctggttttccacaaacttcaattgtcagttgcctaagtaacaagctgtgggcaaaagaacaaaggcctttgtgggaagtgttcactccccccatacccaatgcaaatattggcatttatcttttgctgggaaccagtatccaaagtcctacagtctatcgtcctggaggcttagctccactcccacacactcagaccactacttacaaactcattttagggatatgcggcttgagacacagagaggttatgcaatgtgtaaaaggtcacacagctagcatatcacgtgcactttcacacacaccaaccacaagtcctttggcagcctctatccagttagaaccttgtgaacaaggtgtgctgtgctccctctcagttgaaggaaagagttggcaaccgggatgctaatttagaagttctaaggtattctccacctgtaatctattgctccagaattctgcaggaacatttgaactggtaaggaaagaatgcctcaagtgagcatgtgtacaactccagtaaacacactgtgcatgcagcctctcccaaattctggcaggctactgggcatgtggaaaacccatcccaagagaagaatcacgggagaaggaatgcaagaacccagaagcatgccaacatataaaaccctgagtcaaagatcaaactgggaacttggatctcttaagtcacctgcttggcccttttccaagtgtactttacttcctttcattcctgctctaaagtttttaataaacttttcctcctactctaaaatttgccatagtctttaactctgccttatgccctgtggt

SEQ ID NO: 463379 - DNA, 4240 bp, Homo sapiens
gcttttgctataacctttagcggctcgtcggtccggcctctcttccctccctggagggtggggagtgggaccccaggttcctagcttctcattgcatgggtggttcctccggtcttgaagctatttagggggcatcagtgtcatttcattagcgtaaacccagagtcttgctctgtcaccaggctggagtgcagtggtgagatctcggctgactgcaacctctacctcccaagcctgtcaatgcccatgctgtgtggatgcccaaagaatgcccacatggggctgcccccaagagtcaagtccacaaatggcgtttggagtcacagggataagaaatggtttgaaaactttggcctaagaacggttaagtgatatggcatttccctaagaacacttttagttataaaagaattagaaatgtttctaggtaaacgattagttgaaatcaccttgaaaagaagcaatcaggtgtgaaagtcaaagtcacgggctctggagatagacaggacttggtcaaagcctggcattcccattgcccagctgagtgacccttagcaggtcacactcctgcaccaaacctgttttgcatcttcagaaacaaagtttgatctcagactgctgtgctagcaatcagcgagactccatgggcgtaggaccctcggagccaggtgcgggatgtaatctcgtggtgcgccgttttttaagcccgtcggaaaagcgcaatattcgggtgggagtgacccgattttccaggtagagacacttttgacttgatctctgcagtcctcaacatggtcgaagtctgaaatcaagtgtgagcagggccacatgggcccattctgaagacccgaaggagagtccccctttccctcttccagcgtctggcagtcctaggccttctttggttgacggcagcctcacttccatctgtgcctgtgactcacatagccctcttctcaaagtctctgactttctcttctcttaaaagaacacctcggctgggtgtggtggcacacgcctgtaatcccagcactttgggagccccaggcaggtgatctgcctgcctcggcctcccaaagtgctaggattataggcatgagccacagcatggggcccagtttcaatcttttaccaatgaaaacctgaacacaaaacaataattcttaaccaatcatgatgaaacacagtaacttttttttttaataaaaggaagaagaaagtgttgaaaattgacatctatgtttacatatcacagcaacacaaagtgccagcaaaaaaaaaaaaagtggaaaaatgaaagtatcttggccccatgagttttgctctgcttcccactgtcatttattcagtacatgtgtcactagatccaggacttgctctagaagttggaggaagtcaatggcactgtgagaaacgtgaattaccaagggactctgtcatgtccttcgttactcatgtgacttccttacatgaaaggaaaatagatcctggggcctccaaatcactcagctaaagggaaaagtcaagctggatctgcttagggcaaacctgcctcccatttattcaaagtcatcccactcttcactgagataaatgcatatctgatggcctcctttggaaaggctcatcagaaactcagaagaatgcaaccatttgtctcttatctacctatgacctggaatttcagtattaaaccaatgtttatcttgcatatattgattgatgtctcatatctctgtagagactacatgaaaattttgttgttgaaataattcgttgtactgagcttcaattgaaatgcttaaataccttgaaaacatttccatttttgcctttactcaaatcaggtggtggctactttctaatgaatgcaaatcccagtatgtgaaaagtgtgggttaggacaataaaaggggaggtgacaccattttaatggtttctcagaagctgtgctccgatgtccttgggcacatgtcatcagtacctcctgaggttatgtcacaggtgcatgtccttaactttggcaaaataaacttcctaaattaactgagatctgtctcagatattcaggcttcagagctatgccagctaaccccttatgctgaaaacgaggacttagaaggaaagggcaagagagccagacttgctttttccttttttttttttttttttaagtctttccttattcatcaataagccaaaagtagaggttgttagtagaaaatgtgtgcaccaagaagtgaaataaagacagttgagttcatgtgttgtagtgtttccaatgttctgctaagaatgaaatatatatgcatgtacaagccacaaaatacaaattgtgtaattttggtgatgctgcatatgagttaaatgtacttatgtttgtatttaaacgtgaaattgcacaatatgaagagtaatggtaaaattcatgctaatgatttaaaattgtattctttctttactcaaaacgacctcaaggagcaaagtaaaaacaccataacaaattgagagactgtagaaaaagggaaaagccttatcttttactacattccatggcacgtttctcctgctttttgaatgagagcacttacagtttcattttgcatttggctgcaaaaacagcgcagcgccccctgcagggagctgtatcacggtgttctgatcagcctctggggaagtggcctcctctggtccaatcagcttgtggactgaggatcacgtgatacaaaatatggccacccctgcatgaacctggagcaactgccctgggtaggtacccgtacaaggaaaggcaatccttcaagcaataatcttttggcagtctccctcacctctgttcacccctgggtatttttggcattgctgtttttaatgatggggtgtgatgtttcctcagcctgttaaacttcattgtgttattttttaactgcttctgagaaactactaaaatgctgttacctccctttttattggcctaagccacacttttcacatactgggcttttcattcattagaaagtaaccacttattttgagtaaaggcaaaaatggaaatggtttcaaggtatttaagcatttcaagtgaagctcagcacagtgaattatttcaacaacaaaatttccatgcagtctcttagaagaaaaatgtatcttaactaaattttaggacttcacattttgttttgttttgtcttggcttatttgttatttaaatgtgcggatctgtgaaataacatcatttctttttaaaagacagcaggttctaactttagtacttcctgagcaaaaagaactaaggttgcagaaagcttctctttcaggctgtctttctggcattgctgcaggcagtgctgcccttgctgggaggtctccaccatccacattagcctgcatgtctctgtccctttgcttcgtttcccacctctacccacctgcccaccacactctcacacttcccctgcccaaccagaattgccatcaggggctattggtccaatcccaaatgctagtaacagaactgaaaagcccaagtttgaagggaatttcttcttccgtgaagtcccctgggagaaaattttctggaagactcaccatcccagaggctacacagctcaggacaacccctgttcttttaagggaaaagtgaaagcctggacttgtaggttttccccaccagttttcacatggagctgatatcggcatctctgcaaggccaggaggagattgagtgacctctctggaactccgaagtttactttccctgcgttttcgtaacttgttctcagctctttgaactgcatccaagtgcctagttcatgatgccataattgctcaccgggttcaagggcagagctctggtttcatattgtaaaattcagtgcacctgggtaccacataatagctgtgctaagacatgtgtgcattacatcagctatgattcattcctgtgatctagtttagaccacaatctgataacacaaaccaattacttaaactgttagaagatgcttaactggaaaaaacatatctttagttttccttccaactttagtctaaaccatatatatatatgtttttatatatatatatatgttcatattccatatatatgtattccaaatactctacatgagttttaacaacaaaacttgggggaatgggatctaaaatgtatttcccaggtctagcttggatggacttcagggtcattaacaagctgtgccaagcagcatatgaaatc

SEQ ID NO: 463380 - DNA, 5370 bp, Homo sapiens
  misc_feature (2)..(2): n is a, c, g, or t
  misc_feature (4)..(4): n is a, c, g, or t
  misc_feature (15)..(16): n is a, c, g, or t
angntttttctaacnntaaacatggaagtgttaggtatggtgtgaatttagactaactgtgtaagtacagccatgcatgagcaccagcagggtgacccaagtgtatatgctgtgctgcggccgaggctaaaggggtacgtggctctggggtggagaaccgggagacagaggtgcttcgatgagaagaaagacattgattacctggtcaatccctgtctcatggcaggcaagctgggaatctacgtccaggatctggacctgccaacgaggctgagggactctaatcaggcagtgaggctggccttagcaatgcagctgggcttcgaaggcccgaggttcagtggggagaaatccaggcaagaagggtgctgggaagtgtgccaggcccagctgagcaaggagagattctttgaggaaaccactaatgggaatgcgatgatgccgtgtttccgaggatggctgctgctagggagggaagcaggctcgtacctggagggtcaaggtattggagattataaaagtacatttttgcaaattgatgcattccagccctactggaaacatactacttttgagccgcaggggctgggtgaggcagtgaatgtgcggggagaggctgagtccacattccagctgctgctcttccggcctctgaaccatttcctacaacacttttgacaccaaatgttgaggggcgtttttccacaccaaccacttctccaacactggccggtgcccttcaattcagttcaattcgcttcaattctaacacgcagctcgcacaagttaacacaccctcttcacctcagacgccaatcagtcacaaatctcagcctcttgcacttctggcccgtcagctctaagtcagggattcccaagaccccctccttagtttgataatttgttagaagggcttatagaactctggaaagtgctttccttaccattactggttcattatagaggatacagctcataaatggtcaacggaagagctgcccagggcgagggtgggcaggggcgtggagcttctatgtcccagccctgaagcaattcgacaacccagaagccctcagaaccccagggtttagggtttctatggaggttccattatgtactcatgactgattaaatcattggccactggcgattagctcaatccccagcctctcttccctccctggagggtggggagtgggaccccaggttcctagcttctcattgcatgggtggttcctccggtcttgaagctatttagggggcatcagtgtcatttcattagcgtaaacccagagtcttgctctgtcaccaggctggagtgcagtggtgagatctcggctgactgcaacctctacctcccaagcctgtcaatgcccatgctgtgtggatgcccaaagaatgcccacatggggctgcccccaagagtcaagtccacaaatggcgtttggagtcacagggataagaaatggtttgaaaactttggcctaagaacggttaagtgatatggcatttccctaagaacacttttagttataaaagaattagaaatgtttctaggtaaacgattagttgaaatcaccttgaaaagaagcaatcaggtgtgaaagtcaaagtcacgggctctggagatagacaggacttggtcaaagcctggcattcccattgcccagctgagtgacccttagcaggtcacactcctgcaccaaacctgttttgcatcttcagaaacaaagtttgatctcagactgctgtgctagcaatcagcgagactccatgggcgtaggaccctcggagccaggtgcgggatgtaatctcgtggtgcgccgttttttaagcccgtcggaaaagcgcaatattcgggtgggagtgacccgattttccaggtagagacacttttgacttgatctctgcagtcctcaacatggtcgaagtctgaaatcaagtgtgagcagggccacatgggcccattctgaagacccgaaggagagtccccctttccctcttccagcgtctggcagtcctaggccttctttggttgacggcagcctcacttccatctgtgcctgtgactcacatagccctcttctcaaagtctctgactttctcttctcttaaaagaacacctcggctgggtgtggtggcacacgcctgtaatcccagcactttgggagccccaggcaggtgatctgcctgcctcggcctcccaaagtgctaggattataggcatgagccacagcatggggcccagtttcaatcttttaccaatgaaaacctgaacacaaaacaataattcttaaccaatcatgatgaaacacagtaacttttttttttaataaaaggaagaagaaagtgttgaaaattgacatctatgtttacatatcacagcaacacaaagtgccagcaaaaaaaaaaaaagtggaaaaatgaaagtatcttggccccatgagttttgctctgcttcccactgtcatttattcagtacatgtgtcactagatccaggacttgctctagaagttggaggaagtcaatggcactgtgagaaacgtgaattaccaagggactctgtcatgtccttcgttactcatgtgacttccttacatgaaaggaaaatagatcctggggcctccaaatcactcagctaaagggaaaagtcaagctggatctgcttagggcaaacctgcctcccatttattcaaagtcatcccactcttcactgagataaatgcatatctgatggcctcctttggaaaggctcatcagaaactcagaagaatgcaaccatttgtctcttatctacctatgacctggaatttcagtattaaaccaatgtttatcttgcatatattgattgatgtctcatatctctgtagagactacatgaaaattttgttgttgaaataattcgttgtactgagcttcaattgaaatgcttaaataccttgaaaacatttccatttttgcctttactcaaatcaggtggtggctactttctaatgaatgcaaatcccagtatgtgaaaagtgtgggttaggacaataaaaggggaggtgacaccattttaatggtttctcagaagctgtgctccgatgtccttgggcacatgtcatcagtacctcctgaggttatgtcacaggtgcatgtccttaactttggcaaaataaacttcctaaattaactgagatctgtctcagatattcaggcttcagagctatgccagctaaccccttatgctgaaaacgaggacttagaaggaaagggcaagagagccagacttgctttttccttttttttttttttttttaagtctttccttattcatcaataagccaaaagtagaggttgttagtagaaaatgtgtgcaccaagaagtgaaataaagacagttgagttcatgtgttgtagtgtttccaatgttctgctaagaatgaaatatatatgcatgtacaagccacaaaatacaaattgtgtaattttggtgatgctgcatatgagttaaatgtacttatgtttgtatttaaacgtgaaattgcacaatatgaagagtaatggtaaaattcatgctaatgatttaaaattgtattctttctttactcaaaacgacctcaaggagcaaagtaaaaacaccataacaaattgagagactgtagaaaaagggaaaagccttatcttttactacattccatggcacgtttctcctgctttttgaatgagagcacttacagtttcattttgcatttggctgcaaaaacagcgcagcgccccctgcagggagctgtatcacggtgttctgatcagcctctggggaagtggcctcctctggtccaatcagcttgtggactgaggatcacgtgatacaaaatatggccacccctgcatgaacctggagcaactgccctgggtaggtacccgtacaaggaaaggcaatccttcaagcaataatcttttggcagtctccctcacctctgttcacccctgggtatttttggcattgctgtttttaatgatggggtgtgatgtttcctcagcctgttaaacttcattgtgttattttttaactgcttctgagaaactactaaaatgctgttacctccctttttattggcctaagccacacttttcacatactgggcttttcattcattagaaagtaaccacttattttgagtaaaggcaaaaatggaaatggtttcaaggtatttaagcatttcaagtgaagctcagcacagtgaattatttcaacaacaaaatttccatgcagtctcttagaagaaaaatgtatcttaactaaattttaggacttcacattttgttttgttttgtcttggcttatttgttatttaaatgtgcggatctgtgaaataacatcatttctttttaaaagacagcaggttctaactttagtacttcctgagcaaaaagaactaaggttgcagaaagcttctctttcaggctgtctttctggcattgctgcaggcagtgctgcccttgctgggaggtctccaccatccacattagcctgcatgtctctgtccctttgcttcgtttcccacctctacccacctgcccaccacactctcacacttcccctgcccaaccagaattgccatcaggggctattggtccaatcccaaatgctagtaacagaactgaaaagcccaagtttgaagggaatttcttcttccgtgaagtcccctgggagaaaattttctggaagactcaccatcccagaggctacacagctcaggacaacccctgttcttttaagggaaaagtgaaagcctggacttgtaggttttccccaccagttttcacatggagctgatatcggcatctctgcaaggccaggaggagattgagtgacctctctggaactccgaagtttactttccctgcgttttcgtaacttgttctcagctctttgaactgcatccaagtgcctagttcatgatgccataattgctcaccgggttcaagggcagagctctggtttcatattgtaaaattcagtgcacctgggtaccacataatagctgtgctaagacatgtgtgcattacatcagctatgattcattcctgtgatctagtttagaccacaatctgataacacaaaccaattacttaaactgttagaagatgcttaactggaaaaaacatatctttagttttccttccaactttagtctaaaccatatatatatatgtttttatatatatatatatgttcatattccatatatatgtattccaaatactctacatgagttttaacaacaaaacttgggggaatgggatctaaaatgtatttcccaggtctagcttggatggacttcagggtcattaacaagctgtgccaagcagcatatgaaatc

SEQ ID NO: 463381 - DNA, 978 bp, Homo sapiens
ggcctcacagagcctatggtgggagtgagacaaatgggttgacaggtgcccacatggttgccaggcacatttcagagagcaggtgtatgctgctcaggcagccaaagggcctcacctggccaaggtgggccacaaggcagcccagaggaggtggcttcaaaccaagtcctggaggacaagcaggagccagctctaactctattatgggtgtgaagatgggctgtctccaatggcgttattcggcaggcactctgaagtgcttccccaaaccctgttgtccactttcctggacttgagtaatggtgctactagtggctttatttgatcttcattaaatttgggaattgttcttaccaactcagtcagagataaaatattgtttttcatatttccaaagtttcttatgataatggtccagggctggagtctgggatttcctctctcatcctctcccgatatcgggttgaaattttgagagactgcagacaagagcagggttgccgatggaaatcttaaacaagtgggatcgagatcctgaagcgtttcttctaagaattgcaatagatgaaatatggctctgccagtatggtcctgaagacaaaagacaatcaaaccagtggctaccaagaggtggaaagggtccagtcaaagctaaggtggacttgtcaagagcaaagaacttggaaacaattccagaaaacctcagaaataggtatttgaaattcataggagtaagctatgaccataaacttcctagtaagccacgtttagcaatgggcaatcttaaacatgcaaacattcaaaatattggctactgtaaaaaaaagacagtaagtgttggcaagggtttggagaaaaggacacccttatacattgttggtgagaatgaaaattggtacagccgttgtggaaaaccgtatggagattcctcaaaaaattaaaaatagaactaccatatcatctggcaatcccacttcc

SEQ ID NO: 463382 - DNA, 3298 bp, Homo sapiens
gctggttcctttaaaagaccagtaaaacagataaaaaatcaaatggggcttccgcccggcatgccggaccgcgcatgcgccgtcggcagcgtcgcgcgcgccctgtcgcgcagccggcgctacgtgtgcgcccgggacgcggacgcaagccgccgacggaggaggccttttaactacggcctctccatcgaagaaaaaaatgaaaatgatgaaaactcattaagcagttcctctgacagtagtgaagacaaggatgaaaaaataagtgaagaatgtgatattgaagaaaagactgaagtgaaagaagaaccggagcttcaaacaaaaagggaaatggaagaaagaacagtaactctagaaatccctgaagttctgaagaggcagctggaggatgattgttactacattaatcggaggaaacggttagtgcaacttccatgccacaccaacatcataacgattttggaatcctatgtgaagcattttgctatcagtgcagccttttcagccaatgagaggcctcgtcaccatcacgctatgccacatgccagcatgaacgtgccttatatcccagcagaaaagaatattgacctttgtaaggagatggtggatggattaagaataacctttgattacactctcccgttggttttactctatccctatgaacaagctcagtataaaaaggtgactgcatctaaggtttttcttgcaattaaggaaagtgccacaaatactaataggagccaggagaagctctctcccagcttacgtttgttgaatccatccaggccgcagtctacagagagtcagtcgaccagcggtgaaccagccacccctaaaaggcgcaaagccgagccgcaagcagtgcagtctctgaggcggtcctcgccccacaccgccaactgtgacaggctttctaagagcagcacctcacctcagcccaagcgctggcagcaggacatgtccaccagtgtgcccaagctgttcctgcacctggaaaagaagacacctgtgcatagcagatcatcttcacctactctgactcctagccaggaagggagtcctgtgtttgctggctttgaagggagaagaactaatgaaataaatgaggtcctctcctggaagctcgtacctgacaattacccaccaggtgaccagccacctccaccctcttacatttacggggcgcaacatttgctgcgattgtttgtcaaacttccagaaattcttggaaaaatgtcctttactgagaagaatctgaaggctttattgaagcactttgatctctttgtgaggtttttagcagaataccacgatgacttcttcccagagtcagcttacgtcgctgcctctgaggtgcattacagcaccaggaacccccaggcagtcaataagtgttgatggttctgtaagaacaactgctccatctagcatggtgttctgagttccaggtaaaaaattaacaaggtggtgggtttttatccagagcacaaaacaaagtgcccaccagggggctttgacagaggtgtgccctgttgtttgagttccccatgtactgtagttactctgtttagaattatttcctaggtgcctgaaagtgttctgacatgacacttgctactttgtaggccatctgtgatggcaggtaaaaagcaactgttcacagtgaaatgttcatggaagtgtacataggttaggccatttcagcagacattgcagttagtcagcaagaaccacattgtttcgttatttgttagcattaaacaaaattttttttgcaaattggtttcattctcttgatgaagctgagcaactgtccaacaaggtttagtttgtacttgaaaactgcaaagtagtctcaaagtattttagagggaatccatattgatggcaaaagaaaatttgcagctataatttgcttctgacggttccttctctgtgaaacattatttttggtgatctaaagaaagcattgcctttcttgtttgcaattttacagctatacttttttgtgtaatgttacggttccctttctgtaaaatgttctttttggtgatctaaataaagcctctcttgtttgaaaaaaaaattaacttggagtcataactacagatataatgacgattggaatataagagaatgctacgtattcatttaaaccagtaaatttgaaagtcttgacaaaaatgattacttaggaaaatatatattatataaactggctccccctgaaaaagtaggtattcctcattgtggcacctgacagccccaaaggtagaaattaaaactaacccacatatttattgcacactatgctgacattttaatgtaaattttagaccacataagatttagtctttagagtcagaaattccttaggtgctagcccacaaattgctacataagagaaaacagaaaagatttcactttctgtgatcctaatagaaagcccacagagacatatcttcccactgtggcttcagtagcatcaaataggaaagtgataatactgtgagagaatgacgtgccacccacaatatctgaagtacaaagacaaagctggatgtatttttggttagttaatttgagcaaaacccgtaagtgtccagatggattcttcctagattatcataattctcttgcatgtccatgaaaggataaggtatgtcacaaggctaagagcttgaactgtgctagtccaaattgagacgtgctctaagtgtgaggttagagcactggagtttgaagacttaatatgtaaaaataaatgtaacatatctcattaataattttcagcattggttaaatgtcgaactgacaatattttagatacattgggttaaataaaatgtttttaaaataacttcacctatttctttttacttttaaaaaatgttaatattttaaaaacttaaaatgaccaatgtgtctcacatatttttaatggacagtgatgctcttaaaagtattacctctatggcatggcatatgtcaaaaactcatggtcttttttagctattctttgatccaatatccaaggcttagcttcatgtatccaagcagttacaggcctctactaaattagtcaaagcatcttttggtcttgtactaggattacctttaaatctgatgttaatatatgcagcaaatccctactgttaatagaaaccacccaacattttttctgccgtttactaatttgattgttactctttccctcacatattaccatattcctatgtacacactcagtctggcagccttctgttactcttatccaatgaaggagaagctc

SEQ ID NO: 463383 - DNA, 1355 bp, Homo sapiens
gtctcataggaactaacggagacagtcaggacggtttggaaaatgctgcaccagaagtgtaacaatggaggatttcatctggcagaaaagtacagaaagttcttcctggcagaaggaatagcatgggtaaagacagatgtcaaactgtatggtttgcttgggaatgacaagcagtttgatgcgactggtgtaggccacatagtggggaagggagtggcaggggatgaggagaaaggggtacactgggggcaaaatctgaaggacttgatcccccagccaatggagccatcagaggtttacagcagtgtagggagtggcactgatagaagagatacagctgctgccacggaggcccaacatctgagttcagaatctaaagaaaaaacatcagcacaaaaatcagggcacccttttggaatcttgaaagcagactttaccatctcaactctgatggacccagaagagatgaaagaccaatttctgagacagatccaggaagtcttaaagcttacattaggtcacgaacaatttagactgaaatgggtcagcttcgaagtgaacaaaaaatagcacaattcttggatatgcagtttctgtttcatgcaatcttctctggattttgagtaaattttaattttttaatccctagtagaacaagattaggaagaactcgacatgtgccaaaaagcacagacctacaactaacacaaaacaagactacacatgaaacctgcatccctggattttacagaatgaaacagggatgcaggagaagatgggtgtatttgggaacaatcatgttgggaatgacaaatgaacttctattaagaaattaaaataaaaaacctgaaccaaacatcaaaaatcctgaaaacaaaccccattaatctaactggaaaattacaagaggatggtagtggtctaggaagctaagtggggctacatttcctaataaaccagatgaaactttctttacctgtcacaagttattaaagagatttcaaattctgcagaattcgaaagtaacagttttatcacaatacatgctaatgctagttatttttcctaaattgaaatcttattacatggaagttgggaaattctaggacagactgttcttaatgttaaaatatatttttagaagaatattccggcatacatttcctttcttgtttctcttcaagtgtcctagtcacccaggtgcatgctagaagacagcaatatgtcaaatatagtagcaactttagtctgaaatgtttaaagttaaagtttatttgtattctttgtaggaatatcaataaaagacctcaaacgtatctatatctgtacatgtacaagaactgtcaaaaattatt

SEQ ID NO: 463384 - DNA, 1807 bp, Homo sapiens
ctggagacatctgtgcttattcggaaatgccctcagatgcagctgttgtgcggctacacaccccaggaaagcggacaacatcaatacataaatgggcacagctgtgttccagtaacactttatttacaaaccagagggtggggcagattggacctgcaggcatcatcttctgcaaaaagcttttcctgaatctctcagtcaaagaaaaggcccctcatgttctatgtgacctgagtgacctagaataccttgatgaagagttccatcagagcctgcagtggatgaaagacaatgatatccatgacatcctagacctcacgttcactgtgaacgaagaagtatttgggcagataactgaacgagaattaaagccagggggtgccaatatcccagttacagagaagaacaagaaggagtacatcgagaggatggtgaagtggaggattgagaggggtgttgtacagcaaacagagagcttagtgcgtggcttctatgagatgagaaactttgctcagtaccaaattgctagtcttcaccaaactctgggcatggcccatgtgtcctcatgttcaatccagttttgatcagccttctctttgatcctttttttctccaaaggggactaaacatcactgaaatggtaaacagtaagattttatctgcagagtcgtttatttggctttcgtaattgaacagctcagcagaataagatggccctagttgtatggtttctggggaacacaggagaattaaatttatatatgtgatttttatgtgtagtgcccttgggcaggtgatatctttctatatgacttttaagatattacaacctgaggagtgtggatagccgtgttgtgtgattcaaactgaatcagctattactgatgcaggtaaggaaccatcagtcaacttctggttactatcaccttcataaaaaagaatggatgatgttcaggaattaccttggaaggattaaccaggaattaacacagaatgggatgttcttttaggaccctaatgctctaaaagataaaattacaacctatttttctttatatgatagcataagtaaaatttggggctgttaatatgttggaaagtgcttaaaattacatgtttttataatagggatgcaggcattccaaaataaatgaataaaaatacatgcatctctctcgcctcttactgaaagtattaatctaattttatagtaatgattactttttaatattaaggctctgtaaaaaaattatttctaagatttcagtagaacacaggtggtgtatttttttaagcttttaatttctcttcaccaacctcagtcattacgttcaccacacagtgtgtcacagttaatagtggtatttcagtttttgcgttgatttaagcttcatatttatttaatgtgacttttaatggagaaataataatgggagatgcttgctgttagcattaaggttatacagctctcacttcaccttatatgtaatttttttttcaaagtaaataatgcagattgttgacatcctagaaatggtttctgggtggtattatatggggcctaggactctgaactgggactagttgtttattttctgggaagtctgtattcttattctcaactgaacccctgactcttttgttgtattttttatgattccgaaatgctttgagggaaagatattttaatgtgtacaatttgttttattttcatactgatctctatttttgtttaaaaccatgttgcatcatgaaatcacttaatccaaaataaatcttctttaaaaaaaatagattatgacttttc

SEQ ID NO: 463385 - DNA, 1142 bp, Homo sapiens
ctggagacatctgtgcttattcggaaatgccctcagatgcagctgttgtgcggctacacaccccaggaaagcggacaacatcaatacataaatgggcacagctgtgttccagtaacactttatttacaaaccagagggtggggcagattggacctgcaggcatcatcttctgcaaaaagcttttcctgaatctctcagtcaaagaaaaggcccctcatgttctatgtgacctgagtgacctagaataccttgatgaagagttccatcagagcctgcagtggatgaaagacaatgatatccatgacatcctagacctcacgttcactgtgaacgaagaagtatttgggcagataactgaacgagaattaaagccagggggtgccaatatcccagttacagagaagaacaagaaggagtacatcgagaggatggtgaagtggaggattgagaggggtgttgtacagcaaacagagagcttagtgcgtggcttctatgagatgagaaactttgctcagtaccaaattgctagtcttcaccaaactctgggcatggcccatgtgtcctcatgttcaatccagttttgatcagccttctctttgatcctttttttctccaaaggggactaaacatcactgaaatggtaaacagtaagattttatctgcagagtcgtttatttggctttcgtaattgaacagctcagcagaataagatggccctagttgtatggtttctggggaacacaggagaattaaatttatatatgtgatttttatgtgtagtgcccttgggcaggtgatatctttctatatgacttttaagatattacaacctgaggagtgtggatagccgtgttgtgtgattcaaactgaatcagctattactgatgcagggtaacaagaggccaatctttaactgcaaccaaatagcaactataacaatgagcacagacaactgcaaaaacaccaagcaatgagaagaatatgaggaagcactgctggttcagtggcagaattctcgcctcccacgcaatgagaagaatctttgcttgataggtaagcaatgttttcatcctaagcaatataattgtgttatagatagtaaatctgatattttgcattaaaagtaaatggagttttttttt

SEQ ID NO: 463386 - DNA, 1120 bp, Homo sapiens
taaggacggaggccattgccatgtgaagaagaacctaccttccgtcttcccaccctgacccactgagaaacctcaagctttggacttgtccatgctgccctctaaccctagatcacagttctgagtgtgaatactgccagcccagaagagaacattcatgctggatgcagtggctcacacctgtaatcccagcactttgggaggctgaggtgctttctggcatgtcctcacctggttattgccaagaactcagcagtgaccaagttcttggtaggcacccacgcctttgaattcctggtgaagtggagggttcctggaaaggccttcggaaacagaaggccactaccaggcttggtgatcacccagccacattcctctccacccccaggcattaactgcatactcacttcgtggtgtagtgggagctgcttcagaggacaaaagtctgacactcctgttatttggcaaatcccatggcttctctgcgactcagtctccatgtctgtaatatggggttttacctaattcagggctgctgtgagaagtgtgagctagtgtgtatttggagagaacaagtacttaataaatgagccatctctttcctccccatgcccgtcttaaactttagaatgatcctgcctggcgggcgggcgagtccccgacgcggctgccgccgccgcccgcggcagagggcacggcggttcccacgctcgggccctggttcgggggcgttctcgggacggcgtggccgcgctcaccaccaccgcggaggccgggctgtaattaggataattgcgctgctcccagcctggggcagctcaggaccccggctgcaccgcgctggcccgggacgggcgggggcagggggtggcggggcccgagcgatacagcccctggcgcagtccgttcctctagacagtggtggtttcaagtctctgggtctttgcatatgctgcagccgcacgtcaggatatccttttccagggccacctggtaaactcctctcacccttcaaggtcctccacaagcccttggctcagtgtttggtgctgcgggaacaggagtggaaggaacacatttttcccctcaaggagcactagtaagggtaggaagcaggtct

SEQ ID NO: 463387 - DNA, 1828 bp, Homo sapiens
agtctcacacgccctgagcagatgaaccggtccctcggtccggtctgccctcccgcaccggcgcctttgggctcagcgggccagtggccagatggcgagagttctggatctcatcagctttgtcctcgtcacccctctgggagttcagcctcctaaggctgtgaaacagcccaaaaggcccggacacgctactccaaaacgtctctcctgggctgtgtgaacaataagagctatttggggacgacaggaaaagatatggcccatagaagggctcctgaaatctaaccttgcgactctttaaaagtttcttgtcccttgtggaaaaggtgccgttttggttttggggaatgggaggtcccttcagacaattcattttagccaaaccctcgcttttgagaaggggaagaaatgggattattgtaacaccatacagtactaatttcaaaataaatcatctagaatagaggagagagagagtccccaaataaacaaccatttaatacctctactcggcgctatcaccttttttgcttcaggatttgaccaagagagcagagattatgtttttctgtcctttcttcactgtttacatcacagtaccccaagagaagcacttctgcctttaacttgatacattggaatcgctatcacagatagtgtttttgtattatttttaagaaatatcacacaccttcctaaactcttggcagagaagaattctttttagttgttagcaccctcctgctactgagatctcagcttctgtttagaagacctattgttgtctttccactgattggaatttgctgcctctgaactgggtttaatctgtaatcgtcttttcagcctactaaatagtaaccccagtcctacagagagtgaatttctagctaccacagggggatttaggttagcatgtgccaatctaaagggatctcttaaagcctttcccttctcagaccaggcctctgtaccctgctaggaaaaacagattaatctgctcctcctgcttttcctcctcctcccttcttctcactcctagggaaccttccacaacagaaggttttagcgactgttgctaggcaaacatgccaacttccttgtttaggtgaagcgagtaactcaacttccattgcaagtaacctagataatgtaatttctttgaactattaatagttataccacagttgaataagtggatgtgtttgttcctcttgactggaccaggtgagtgccattggcccaagaacagcaaacgattgactggctggcttcctatgaaagaacttggagcatttctcttttcatcatctggaaactcttactgctctctggggctctctcttcctgccatcaggggccctggaaaaccagagtttactagtgagaatggaattgtagcaaaggaagtagaaaatttgagagagatttcactttctcttttaacccttctaaccatattattctttacaagggtccccaagccccaggccatggactggtactggtctgtggcctgctgggaaccaggctgcacagcaggagtgaagcgcctctcttcagctgacagcagtctccagagttttgcagctgtgatccagcaatcaatacacctggcagctggggtgccagaccacagcatccactagaccaggggtccccaacccccaggccacagactggtactggtccatggcctgttaggaactgggccacacagcaggagggtttatgtatgttattttatctctaaaattacattgtatttcttggaaaagccactagtaaccatgaatctactctttgtctttatgagatccacttcttt

SEQ ID NO: 463388 - DNA, 3558 bp, Homo sapiens
tgtaaatgaggaagctgaaactactgcaaatgaggtccaacagtcaacaaaagccaaaatcacctagaggaatatggcaggccttgcagaatggccatctctggccatggtccactgcagttttcctgcacctaaaccctctgggctccacacagaaggtagtcaaataattgaaaatattcctgcagattcacttttagaaggtggtcaagtaattaaaaatattcctgaatattcactttcagaagggggtcagataattaaaaatattcctgcagattcatttttagaaagtggaccaggacaatctccagaggtagaagaacatgtctctaaaaaacacttcgaagctgatgagagagattttccaattaaaaaaaatagtagtaccaaaaagaaacatttaataagcgaagtacctaactccaaatcaggttcaagtggcactgtacatgactacattatgaggcaaatattcactgcaccaatattctcagaattggagatagaagtgaaagagccaagtgaaacaccaatgaacttggaaaatcaattacctacaccttggaagagaagtttgtcatcacatattctatttcatgaagaaaatgctgatgaaatagaattgccacagcccagatctgctacaagccagataatacaagcatttcctatagatacacttttagaatctgggataatcaaagtgatagaattagataaagaacaccataagagttctttgctgggtacggggatcacttctcctaaaggaaacctaaaggattcccaagagtattattcagaaatcagaagcgagacagaacctctttctgagcagagtatacccatcattcccaaagacactacttctgttagtagagctgaatttatacaggaagaccaaaatatgttcccacaagattcaagttattattcaatagcaaataaagaactgtatttgccaagaaatggtcagaggctttgtaaagacaaaaatgatctcagttctactttagaaagtttaactaactcattaatggataaacttagtgaatcagatgaaataatgttaaaatcctttttaaaaaacatcttcaatgtttttttcaaatataatcattctgaaagaagaggacaaccagaaaaagaattagaaagactaattcaaccttcttttacaagtgacacagaacaccttgaagaactccaagaggattttgataaagcagacaaattagacagaaaacctattttgagtccaaagttgcgtgtgtttctagaagaactctcagagtcagaagtaaaacatttaaaatctgaattaagtaaacaaatccagcattaccttgtagaaagactttcagaatcaggacatatcaccaaggaggacttaccaaaaatctatcaaaatctgtatctgatgaatgagaaagcagagcagaaagggccaaacagttttcaggggaaatattctgaaactgtgaaagaaatcatgtcttttgtcaacaatttcaatcatcatttcatagataaacatttggaaataaagctgagatcttttttaaaagagattctccaaaactatttcctaaaaaacatttcagaaagcagtttatttaatgagacagcatctgagactatatacccaaacatatcttctctaaggactaaaagtgtctcaatatcttttcatgaactagaacaagatatttcaaaggggagttttggtagaaggtttgaaataaacatgaaatatcctttaagtaaatctctacaaaactatctgatagctttatcagaaaatgaattattacatctaaaagctgatttaagcaaacacctccagagtctttttatagaaaaactttcaaaatcaggactaatgacaaaaaagcaattagaagggatcaaccagcatataaatttgcttaattctagttctataccattaaaatatataaaaacacatttaccttttagagatgactgtcactttgtggagaagcattcagaaaagcaaaataaatattcaagaattgttcaacaaaccactttacaaacggtttctgaggataaacttagagaagcagaattgattcgagagaaagaaaagaaatattttcccttacagaatttaaagggaaattcatctttaattaaggaacagaaaagttattacactaaggaagaagctaaaacaccaagtttaatcaaagtacaaccttcttccaatgaaaatatccaggcaagtccattaagtaagtcatcagaaatacttacagatatactgcttaagaaactaaggaaagaacatgtattcacgcagcttcctcaagcagaaaattctgttcataaaacagagattcaagacccatatagttggggtggtaaatcaaaaataactcaatcaaaagcttggtgtgaaaagacactgaaaatgaagtcccttgatagaaaggagcatgtaaacatctataaatggactgttcaggaaaaacctgaagcagtattaacatcgtatccaagaattcctaatgccagaatgccaagggaagatgagtacttaaacagaatcactttcccttcctggcaaagtagcactttaactcatttcaatacagagactggggaaaaatcaaaattagaagaccagtattgtcagacattgaaaggaaataataacaataataaaaagcatttagtaacatttgcacaatacaaaaaagaaatacaaactctttatataaaaccagatgaaatttgcagtgaaaaatgtgccaagttccctgaaatacagtcattccaatataaggttgtagaagatgagaaaaacttgaaaccacacctcttcccagaattatttaagatagaagatctaaaacccaaggtccgaaaagaaagagaccgtgtcgcccaaccaaaaaagtcatttaacaagatagtcaggatactaccaaccacactgcccaccacaagaattcacctaaagaagtctgttccaaggacactgcttcactggactgcaagaagaactatacatgattgttcagataaatttgaggatttacatgacatgacctcatttacacaccttaaaaaagtaaaatcaagatcaaggcttttaggaaaaagctcagatgatatccataaccatgccagacactctgcaagaccatatactgctccggaggttaacaagcaacgagaaagctacagtggaaagtttacaagtcgtcgaatggtttcatcaggcttagttcatataaatgataaaacatcagattatgaaatgcataaaatgcggccaaaaaaaattaaaagaggatattgaaaaatgttcgctcatttgtgatattataaaacatgtttaactcagaatgatatgtgaggccagcagtcagaatatcacttctccattaacaaaatggtttggagatctcttcttttgtgtgacagaagtcagcaaccaaatttcatcttgttagaaccattttgttttgattaaaatgaaaaacaaacacatttgatgtaaatgtgtttttgttcatgaacctt

SEQ ID NO: 463389 - DNA, 615 bp, Homo sapiens
gtgtgttatagaaatgcagtattttgaggcaaacttctggagtactaaatctgaattggaaaggactgataacatctctttcaactcatagctgattcaggattgttcagataaatttgaggatttacatgacatgacctcatttacacaccttaaaaaagtaaaatcaagatcaaggcttttaggaaaaagctcagatgatatccataaccatgccagacactctgcaagaccatatactgctccggaggttaacaagcaacgagaaagctacagtggaaagtttacaagtcgtcgaatggtttcatcaggcttagttcatataaatgataaaacatcagattatgaaatgcataaaatgcggccaaaaaaaattaaaagaggatattgaaaaatgttcgctcatttgtgatattataaaacatgtttaactcagaatgatatgtgaggccagcagtcagaatatcacttctccattaacaaaatggtttggagatctcttcttttgtgtgacagaagtcagcaaccaaatttcatcttgttagaaccattttgttttgattaaaatgaaaaacaaacacatttgatgtaaatgtgtttttgttcatgaacctt

SEQ ID NO: 463390 - DNA, 1051 bp, Homo sapiens
aagttgcttcatcttggaattttttttaaaacttggattgcctcaatcagtgtatacaaagtttctggttgatgactgtagttaccaaaatttataccaatgcttatacttttttttttctttttcttttttttgagacagagtctcactgtgtctcagctggagtggagtgcagtggcacgatcttggctcactgcagcctccgtctcctgggttcaagagattctcctgcctcagcctcccaagtagctgggattatagatgagcaccagtatgcccagctaagttttgtatttttagtagagatgggatctcaccatgttggccaggctggtcttgaactcctgacctcaaatgatccgcctgcctcagctgcccagagtgctgggattacagaattttcaattcacaaatcatctgaaaaacaggaaattttggagaaacatgcttatgataacaaacaagggatctatcgtgtggtatagaagtttacacaaagaggcatctgattttaagtttttgtttttttttttttttttttttttaccgttctgggcttctggctgcattctaggaagatcattccttaaaagaaatagccatatggcttataagggactatatcttaagactatgtgtcttctgcagttctttgcatagagtcaacgttgaaggacaagcaacttcaaatttccaagcaacaaaattatgttcgggtggttttctgaaagcgagatcttaagaaccacctgtatcagaatcccatgaagagcttgtttagtgtgcaaatttacagattgtcccccctcagaaatgctcatttaggagttcctgtcctttgcggggacatggatgaagctggaaaccatcattctcagcaaactaacacaggaacagaaaaccaaacactgcatgttctcactcaaaagtgggagttgaacaatgagaacacatggacacagggaggggaacgtcacacaccagggcctgtcgggggtgggaggtaaggggagggagaggattaggacaaatacctaatgcatgtggggct

SEQ ID NO: 463391 - DNA, 975 bp, Homo sapiens
cgcttctagtaggccaaactcccaggtgacccccgcaagaaacgcggtccggagagggtctggccccactgctggggcaagggctctaggcgcccggaccccacgcccgcagcctgcggagaacgtgccgacaaggacctgtagggccccactccccctcctccctccctcggcgcagcccggcccaggggtctgtcctcccaggcccaggaaaggaggaaacccacttccgccgcgtccatgatctcccgcggcttctcctgactcttgcggctggcgctggcgctgggcatcgggacacggaactgggcagtggacaccaccctccctcgcaggcttccgtaagaaagtaatttgaaggccttccctgacttaaagtggatgctgctttggaaagcactggaaaaatggatcctgtctttcttagccaaggactggtctcttttctccaatgtgtccctaacagagtggtgaggctggctcttcccaccagtacaggaagatcattccttaaaagaaatagccatatggcttataagggactatatcttaagactatgtgtcttctgcagttctttgcatagagtcaacgttgaaggacaagcaacttcaaatttccaagcaacaaaattatgttcgggtggttttctgaaagcgagatcttaagaaccacctgtatcagaatcccatgaagagcttgtttagtgtgcaaatttacagattgtcccccctcagaaatgctcatttaggagttcctgtcctttgcggggacatggatgaagctggaaaccatcattctcagcaaactaacacaggaacagaaaaccaaacactgcatgttctcactcaaaagtgggagttgaacaatgagaacacatggacacagggaggggaacgtcacacaccagggcctgtcgggggtgggaggtaaggggagggagaggattaggacaaatacctaatgcatgtggggct

SEQ ID NO: 463392 - DNA, 777 bp, Homo sapiens
cgcttctagtaggccaaactcccaggtgacccccgcaagaaacgcggtccggagagggtctggccccactgctggggcaagggctctaggcgcccggaccccacgcccgcagcctgcggagaacgtgccgacaaggacctgtagggccccactccccctcctccctccctcggcgcagcccggcccaggggtctgtcctcccaggcccaggaaaggaggaaacccacttccgccgcgtccatgatctcccgcggcttctcctgactcttgcggctggcgctggcgctgggcatcgggacacggaactgggcagtggacaccaccctccctcgcaggcttccgtaagaaagtaatttgaaggccttccctgacttaaagtggatgctgctttggaaagcactggaaaaatggatcctgtctttcttagccaaggactggtctcttttctccaatgtgtccctaacagagtggtgaggctggctcttcccaccagtacaggtgctaaaaggataataccaaggaaaactatgggtgggggcagtgaatggccagcatgcctataatcccagcacttgaagccaggagttcgagaccagcctggaaacaaagcaagaccctgtgtctaaaaaaatttttttaaaaataagctgggcatggtggcacgtgcctatagtcccagctactcagctactcgggagaccaagctctgtttctggcaggaatctgacaccacttactccttgggtagaaactcccccaagtctgaactatgtgatt

SEQ ID NO: 463393 - DNA, 358 bp, Homo sapiens
tttttgagatggagtctcactcttgtcacccaggctgcagtgcaatggtgcgatctcggctcactgcgacctctgcctcccgggttcaagtgattcttctgcctcagcctcccaagtagctgggattacagcccaagctgtccacttggagagacatctggccagccccccgttgttccagccatccccagttcaggcatcagacatgtggtgaagaagccatcctagatgcccagccccagctaccatctgatgcaaccacactgctcaccccgagcaagaactgcctgcaggagcctagtattatcctctctcacagaaccatggcagggaataataaattgttgtttgaagccac

SEQ ID NO: 463394 - DNA, 785 bp, Homo sapiens
cgcttctagtaggccaaactcccaggtgacccccgcaagaaacgcggtccggagagggtctggccccactgctggggcaagggctctaggcgcccggaccccacgcccgcagcctgcggagaacgtgccgacaaggacctgtagggccccactccccctcctccctccctcggcgcagcccggcccaggggtctgtcctcccaggcccaggaaaggaggaaacccacttccgccgcgtccatgatctcccgcggcttctcctgactcttgcggctggcgctggcgctgggcatcgggacacggaactgggcagtggacaccaccctccctcgcaggcttccgtaagaaagtaatttgaaggccttccctgacttaaagtggatgctgctttggaaagcactggaaaaatggatcctgtctttcttagccaaggactggtctcttttctccaatgtgtccctaacagagtggtgaggctggctcttcccaccagtacaggaagatcattccttaaaagaaatagccatatggcttataagtgttctttcctgtatgaagcccaagctgtccacttggagagacatctggccagccccccgttgttccagccatccccagttcaggcatcagacatgtggtgaagaagccatcctagatgcccagccccagctaccatctgatgcaaccacactgctcaccccgagcaagaactgcctgcaggagcctagtattatcctctctcacagaaccatggcagggaataataaattgttgtttgaagccac

SEQ ID NO: 463395 - DNA, 2508 bp, Homo sapiens
tcatttccgggtccttccaaactcagctgggtgggaaaacttgaactgaatggaatcgaaccaaatggaagcccctaggtctgatcctacccactcggaacggaaggtgaggagaaaaaaacctaagagtgggagttggatctggatttctgtctttttcgaagttcggcagcactctggccccaggcaagttatgcttagatgctcccaaccagaaaatcgtgagaagcctggcgacactgggcagacgcctcccttccgcctgcccggaagacgcgagggcttgatccaaaggagggctgcagccgctgggactccgcctcgggggctcctgccgctcaatcagcaccagtgccctcgctcctccaccttcagttggttgttctgcccggcctttaggtccggggtccggatagaagctgagcaccagcgggttcccggccaacgggtgtggaggggtgcattgggccaggagccgattcgcagcgcccgctgcgcctgcactgtgcagacagacctggctttggatgagggatgactatcgtatcaggacttttaaaataaagtaactgagctttaaggagacaggaggaaaaaaccaaagcagcccccaactaccccaaactcgtcggatttgggagcgcgccgaaacatagcaggaagaaggcaggaaaaatcgtcctggcatttatgccttgaacaccctcccttccccacccccgcacccttgtcccgcccctaccccgaccgcaccgcggcggccgctgcatcgctaccggtgagcgtggcaggcggcttgctgcgggggccgccactgttgctgcgggcagccgagaagtacccgcggacccccaagtgcgcgcgctgtcgcaaccatggcgtggtgtcggccctcaagggccacaaacgctactgtcgctggaaggactgcctgtgcgccaagtgcacgctcatcgcggagcgccagcgtgtcatggcggcgcaggtggcgctgcgcaggcagcaggcgcaggaggagaacgaggcgcgcgagctgcagctgctctacggcactgccgaggggctggcgctggccgccgccaacggcatcatccccccgaggcccgcctacgaggtcttcggttcagtgtgcgccgccgacggcggggggacctggagcgggagcgcccgcggggaccggaggcggagcagctggcgcagggggctcagaggccaagttgcagaagtttgacctgtttcctaagacgctgctgcaggcaggccgcccgggcagcccgctgccgccgccggtgaagcccttatcacccgacggcgcagactcggggcccgggacgtcgtccccagaggtgcggcccggctcaggctcggagaacggcgatggcgagtccttttctggttcgcccctagctcgggcctccaaagaggcaggtggcagctgcccaggcagcgctggccctggcggcggcggcgaggaggacagcccgggctccgctagccctctgggctctgaatccggttcagaggctgacaaagaagagggtgaggccgcgccggcgccagggctgggcggaggctcgggtccacggcagcggacgccgctggatatcttgacacgcgtgttcccaggccaccggcgaggcgtcctggagctggtgttgcagggctgcggcggcgacgtggtgcaggccatcgagcaggtgctgaaccaccaccgtgggggcctggcggccggcctgggccctgcggcgcccccagataaggccgccgtgggtgctgcagcagctgcagacgacgcgtggcccagccgcgtcgacgccgccgccgccgccgccgccgccgccggggggcctgggctgcctgcgccgctgcaggcggggcccgccgcacctccgcaccacagacccttgctggccggcgccatggcgcctggggcgctgggctcgctgagcagccgctcggccttctcgccgctgcagcccaacgccagtcacttcggtgccgacgcgggcgcctacccgctgggcgcgccgctcggcctcagccccctgcgcctggcctactccgcggcggcggcgcacagccgcggtctggccttcatggcgccctactccactgccggcttggtgcccacgctcggcttccgcccacccatggactacgcctttagcgatctcatgcgtgaccgctcggccgccgctgctgcggcggtgcacaaggagccgacctacggcggcggcctgtacgggcctatggtcaacggcgctccggagaagcagtagggcgaggggcctggcagccggccggtccccaaacaggaaccccagccctgttcccgcgggccatcgacccctcttcgcccagcgctctctctgcgccctggctgggcgtcttctcactctaaggtggtttttgggttttgtttaggagggtgggtggggaaggctgagcaaagggggagcagctacagacaggtgcaggtgttctcggagggggtgcgcggcctgggtc

SEQ ID NO: 463396 - DNA, 2190 bp, Homo sapiens
tcatttccgggtccttccaaactcagctgggtgggaaaacttgaactgaatggaatcgaaccaaatggaagcccctaggtctgatcctacccactcggaacggaaggtgaggagaaaaaaacctaagagtgggagttggatctggatttctgtctttttcgaagttcggcagcactctggccccaggcaagttatgcttagatgctcccaaccagaaaatcgtgagaagcctggcgacactgggcagacgcctcccttccgcctgcccggaagacgcgagggcttgatccaaaggagggctgcagccgctgggactccgcctcgggggctcctgccgctcaatcagcaccagtgccctcgctcctccaccttcagttggttgttctgcccggcctttaggtccggggtccggatagaagctgagcaccagcgggttcccggccaacgggtgtggaggggtgcattgggccaggagccgattcgcagcgcccgctgcgcctgcactgtgcagacagacctggctttggatgagggatgactatcgtatcaggacttttaaaataaagtaactgagctttaaggagacaggaggaaaaaaccaaagcagcccccaactaccccaaactcgtcggatttgggagcgcgccgaaacatagcaggaagaaggcaggaaaaatcgtcctggcatttatgccttgaacaccctcccttccccacccccgcacccttgtcccgcccctaccccgaccgcaccgcggcggccgctgcatcgctaccggtgagcgtggcaggcggcttgctgcgggggccgccactgttgctgcgggcagccgagaagtacccgcggacccccaagtgcgcgcgctgtcgcaaccatggcgtggtgtcggccctcaagggccacaaacgctactgtcgctggaaggactgcctgtgcgccaagtgcacgctcatcgcggagcgccagcgtgtcatggcggcgcaggtggcgctgcgcaggcagcaggcgcaggaggagaacgaggcgcgcgagctgcagctgctctacggcactgccgaggggctggcgctggccgccgccaacggcatcatccccccgaggcccgcctacgaggtcttcggttcagtgtgcgccgccgacggcggggggacctggagcgggagcgcccgcggggaccggaggcggagcagctggcgcagggggctcagaggccaagttgcagaagtttgacctgtttcctaagacgctgctgcaggcaggccgcccgggcagcccgctgccgccgccggtgaagcccttatcacccgacggcgcagactcggggcccgggacgtcgtccccagaggtgcggcccggctcaggctcggagaacggcgatggcgagtccttttctggttcgcccctagctcgggcctccaaagaggcaggtggcagctgcccaggcagcgctggccctggcggcggcggcgaggaggacagcccgggctccgctagccctctgggctctgaatccggttcagaggctgacaaagaagagggtgaggccgcgccggcgccagggctgggcggaggctcgggtccacggcagcggacgccgctggatatcttgacacgcgtgttcccaggccaccggcgaggcgtcctggagctggtgcagcccaacgccagtcacttcggtgccgacgcgggcgcctacccgctgggcgcgccgctcggcctcagccccctgcgcctggcctactccgcggcggcggcgcacagccgcggtctggccttcatggcgccctactccactgccggcttggtgcccacgctcggcttccgcccacccatggactacgcctttagcgatctcatgcgtgaccgctcggccgccgctgctgcggcggtgcacaaggagccgacctacggcggcggcctgtacgggcctatggtcaacggcgctccggagaagcagtagggcgaggggcctggcagccggccggtccccaaacaggaaccccagccctgttcccgcgggccatcgacccctcttcgcccagcgctctctctgcgccctggctgggcgtcttctcactctaaggtggtttttgggttttgtttaggagggtgggtggggaaggctgagcaaagggggagcagctacagacaggtgcaggtgttctcggagggggtgcgcggcctgggtc

SEQ ID NO: 463397 - DNA, 2782 bp, Homo sapiens
atgctgtgaagtcataggaacccccaccctggggacacaacccctggtcactgagtgatgtatatctgtttttaacaggatgtcgtgtcaagatttccaacagaaattcatcgccatgtttatatgtagcgaaattccaattaccctggaccatggaaacacactccacgaaggatggtcccaaataatgtttaggaagcaagtgattctaggaaacactgcagtaacagctctttctgatgcaggaggacctcggaatgatgctcaattcaacttctctgtgcaagagccaatggaaggcaccaatgttgtcgtgtgcgtcacagttgctgtcacaccatcaaatttgaaagcagaagatgcaaaatttccactcgatttccaagtgattctgcggttccgggagaaatttccacccgtgtttttttcctcgttcagaaacactgtccaaagctcaaataataaattccgccgcaacttcaccatgacttaccatctgagccctgggaactatgttgtggttgcacagacacggagaaaatcagcggagttcttgctccgaatcttcctgaaaatgccagacagtgacaggcacctgagcagccatttcaacctcagaatgaagggaagcccttcagaacatggctcccaacaaagcattttcaacagatatgctcagcagaggctggacattgatgccacccagcttcagggccttctcaaccaggagcttctaacaggacctccaggggacatgttctccttagatgagtgccgcagcttggtggctctgatggaagtatcctttgcggtcatccctcccatgctctgagcacccctcagctctgtgggcttccccagagacctaattaggacagtagggaacccttttcccactcagtattttctcttcttccctgtccttgagtttctggggattctctactaactcactaacataccacagcaacaatgataatagttaccatctatcaagcacctactatgtgctgatcagtgtactggggtgtgtgtgtgtgtgtgtgtgtgtgtgtgtgtgtgtgtgtccttataattcttgaagcaatccctctgatacaaaaaagtatcatctcataatacagtagaagaaacaggagttcagagaggttaagtaatttgcccagatcacacagctagtcaggactcatgctcagatttgaagttggagctttcagcctccaaagtcgatgctctaaccttatcctaaaccgcccctttatagcaccgttgggaactattttcccttttacccattcacttcccactggaggagtctccattatttaaatttcttacttcaacaagtccccaattcaatcaagataactaccaccaaaacatggaaaactgcctggtctacacagcagttgcaccccagcattgctatgctgcattcacagcgggagacgctgggcagaggcagttcagagactcactccaggcccgtggctacaagtgtaggaccaagaattgaaccccagactcctgaccctcctcctgatttccattccccagtgagccatcctcttcctgcgtacccctggcttggcaagcagaagaggctgactccatgagtgtagacccccagatgctgccctgccagcccctcactcggcagtgtgctgtctcctgagacgcattgccccgctcctgcaccgttgacaaggctgaattgggactgtgaagccggccattgtgaaacaagagggcttttttgatgaaatcataaatcaggccctgtctctgctggctgtgctttggaatctatcagagacacagcccatctcccacagaggaatccaaatggtcctcacagtgccacggcccggggatggcagcccctctgcaccttgcacgctggctggttcactcttaactccttacccagctgaaagtgaatgggcggctagaccaagaggagtttgcgcgactgtggaagcgccttgttcactaccagcatgttttccagaaggttcagacaagccctggagtcctcctgagctcggacttgtggaaggccatagagaatacagacttcctcagagggatcttcatcagccgtgagctgctgcatctggtgaccctcaggtacagcgacagcgtcggcagggtcagcttccccagcctggtctgcttcctgatgcggcttgaagccatggcaaagaccttccgcaacctctctaaggatggaaaaggactctacctgacagaaatggagtggatgagcctggtcatgtacaactgaagcaaagaggaaagcagacccatggctcaggacaagctcccagtgatcactcaagaatctggctctcattctaagaggctgtgctgcccagtatggtggttgtgataaatctaaaccagccctgcatgaaacagagtccaagctgtctcccaacagcctgggttcggtccttggctggcccaggcccagttaagcctgtggccaccaagcagctcatctgagcactttgggatgtattcagcctacgttgccctggaaaaggaagcaggagatgtctccctgtgggaaaggagaagagaagttgtctctgagtcccctgtcaccagttggattcatttcttggaagagccagaatgagccactttgaccaccctcgggtgctatgggtgacacaagagctgtccactgggtgtttgcagaataattacactatcttatgtctggatcctgatgatttcacagctaaatggcaaaaataaaacatgtttcccataa

SEQ ID NO: 463398 - DNA, 1067 bp, Homo sapiens
  misc_feature (449)..(449): n is a, c, g, or t
taagctgggttacttatatttttactacagaggagttatagatgttctttgtatattgtagatacgaattccttatatatgtgatttgcaaaatttttctccccttctgcaggttgtctttgcagtttttgatgccatcatctgtagcatatgagtctttaattttgatggagtctaatttatctattgttttcttttgtcacatatttttggtggtatagctgagaaatcattgcccaacccaaggtcaaactatttattctgttttatagtttagctcttacatttaggtctttgatccattttgagatcattttttatatggtgtgaagtaacgttctaatttcattcttttgcattcattcatttgtcccagcaccagttgctgaaaaaactattcattctcctgtttctttgtcttggaacccttttcaaaaatcaatttaatntaagaatgtatttatggacgttcctttctgttcaattgatttatgtgtgtatcttatgccagtatcacactttgttgattgctacaattttatagtaacttttgaaattaggaagtgtgagttttccaactttattttacttttcaagactattttggctcttctgggttccttgcatttacatataaattttagaatcaatttatcagcttctgggattttgatagagattacattaaatctaaaggtcaatctggggaatattgccatcttcacaatataaaatcttttgttccatgcgtctcttcatttttctatatcttctttaatttttttgaacaatgatttacagttttcagtgtagaagtcttacactttccttgttaaatttattcctaactattgtagtttgggatgcaattttaaataaaattgttaatattattttcagattttcattgctagtgtacagcaataaaaattatttttatattgatcttatatcctgcaaccttgctaaacttgtttattagttccaatatttttaaagggcttccttagaattttatatattcaaaagtcatgtaatctgcaataaagttttatttttccactcca

SEQ ID NO: 463399 - DNA, 727 bp, Homo sapiens
tgaactcaagcttggggcaggacaggtgggggggtgccctttaaggaattttgaagaatggggtagggtcatccattaaggggccatgggcacgttggggtctgtcagccttgccagcaggaagtgccagtgcttcctttactgtgggatgatccagaacagcatctttggaatggggccccacttccatggtcactcaaaggaaggagtttctttactcacccttggccctctgcatttgcacccccgtgtctttctctaggacaagctcccagtgatcactcaagaatctggctctcattctaagaggctgtgctgcccagtatggtggttgtgataaatctaaaccagccctgcatgaaacagagtccaagctgtctcccaacagcctgggttcggtccttggctggcccaggcccagttaagcctgtggccaccaagcagctcatctgagcactttgggatgtattcagcctacgttgccctggaaaaggaagcaggagatgtctccctgtgggaaaggagaagagaagttgtctctgagtcccctgtcaccagttggattcatttcttggaagagccagaatgagccactttgaccaccctcgggtgctatgggtgacacaagagctgtccactgggtgtttgcagaataattacactatcttatgtctggatcctgatgatttcacagctaaatggcaaaaataaaacatgtttcccataa

SEQ ID NO: 463400 - DNA, 2669 bp, Homo sapiens
atgctgtgaagtcataggaacccccaccctggggacacaacccctggtcactgagtgatgtatatctgtttttaacaggatgtcgtgtcaagatttccaacagaaattcatcgccatgtttatatgtagcgaaattccaattaccctggaccatggaaacacactccacgaaggatggtcccaaataatgtttaggaagcaagtgattctaggaaacactgcagtaacagctctttctgatgcaggaggacctcggaatgatgctcaattcaacttctctgtgcaagagccaatggaaggcaccaatgttgtcgtgtgcgtcacagttgctgtcacaccatcaaatttgaaagcagaagatgcaaaatttccactcgatttccaagtgattctgcggttccgggagaaatttccacccgtgtttttttcctcgttcagaaacactgtccaaagctcaaataataaattccgccgcaacttcaccatgacttaccatctgagccctgggaactatgttgtggttgcacagacacggagaaaatcagcggagttcttgctccgaatcttcctgaaaatgccagacagtgacaggcacctgagcagccatttcaacctcagaatgaagggaagcccttcagaacatggctcccaacaaagcattttcaacagatatgctcagcagaggctggacattgatgccacccagcttcagggccttctcaaccaggagcttctaacaggacctccaggggacatgttctccttagatgagtgccgcagcttggtggctctgatggaagtatcctttgcggtcatccctcccatgctctgagcacccctcagctctgtgggcttccccagagacctaattaggacagtagggaacccttttcccactcagtattttctcttcttccctgtccttgagtttctggggattctctactaactcactaacataccacagcaacaatgataatagttaccatctatcaagcacctactatgtgctgatcagtgtactggggtgtgtgtgtgtgtgtgtgtgtgtgtgtgtgtgtgtgtgtccttataattcttgaagcaatccctctgatacaaaaaagtatcatctcataatacagtagaagaaacaggagttcagagaggttaagtaatttgcccagatcacacagctagtcaggactcatgctcagatttgaagttggagctttcagcctccaaagtcgatgctctaaccttatcctaaaccgcccctttatagcaccgttgggaactattttcccttttacccattcacttcccactggaggagtctccattatttaaatttcttacttcaacaagtccccaattcaatcaagataactaccaccaaaacatggaaaactgcctggtctacacagcagttgcaccccagcattgctatgctgcattcacagcgggagacgctgggcagaggcagttcagagactcactccaggcccgtggctacaagtgtaggaccaagaattgaaccccagactcctgaccctcctcctgatttccattccccagtgagccatcctcttcctgcgtacccctggcttggcaagcagaagaggctgactccatgagtgtagacccccagatgctgccctgccagcccctcactcggcagtgtgctgtctcctgagacgcattgccccgctcctgcaccgttgacaaggctgaattgggactgtgaagccggccattgtgaaacaagagggcttttttgatgaaatcataaatcaggccctgtctctgctggctgtgctttggaatctatcagagacacagcccatctcccacagaggaatccaaatggtcctcacagtgccacggcccggggatggcagcccctctgcaccttgcacgctggctggttcactcttaactccttacccagctgaaagtgaatgggcggctagaccaagaggagtttgcgcgactgtggaagcgccttgttcactaccagcatgttttccagaaggttcagacaagccctggagtcctcctgagctcggacttgtggaaggccatagagaatacagacttcctcagagggatcttcatcagccgtgagctgctgcatctggtgaccctcaggtacagcgacagcgtcggcagggtcagcttccccagcctggtctgcttcctgatgcggcttgaagccatggcaaagaccttccgcaacctctctaaggatggaaaaggactctacctgacagaaatggagtggatgagcctggtcatgtacaactgaagcaaagaggaaagcagacccatggctcagacctcctggtgaccattctctatgtgccaatataccttcgaagtatacagttcttcacgcagccgacctgtgatcaatatcacctaaaactcgattgttttggtaaacagtatttaatctcccattcatgtaccttgaagtcaagagacagacactgtctccataaataatgttgtagcataaatatttcctgatgaacgcttgatgctttctaatgatcgcaaatgaatactgcagagatcatagttaatttgacccaatcatatttccttgagttctcctttcactcctttttaaaaacagaacatttgattattttcagttttattgtgtctgttccaatctgcatgac

SEQ ID NO: 463401 - DNA, 663 bp, Homo sapiens
tgccctgccagcccctcactcggcagtgtgctgtctcctgagacgcattgccccgctcctgcaccgttgacaaggctgaattgggactgtgaagccggccattgtgaaacaagagggcttttttgatgaaatcataaatcaggccctgtctctgctggctgtgctttggaatctatcagagacacagcccatctcccacagaggaatccaaatggtcctcacagtgccacggcccggggtgagtaacccgaggggaggtcacatttgctggacccctgcaaagcggacaggtctctttcagccttcttcctactcatggctccccttccagttctcagaggttaatgcttttcccttcattagtcatcactgaacccatcatacggcatggccagggctggctttaacatgcccacgagatgcattccctctacacttgtgcacgcaggactctatgtgctcgcctgtggctgctgcttctggggttgccatgacccttcgtgctcctccccaacttctggagccagagggcccactccaactggtgaaggccgtgttctagacccctctcttccctcagatgcaagtgatattggcctcctttcctcagggcttccttcttccaattgcccatttttctttgtaaaacaaatctaagccagg

SEQ ID NO: 463402 - DNA, 3272 bp, Homo sapiens
  misc_feature (2654)..(2654): n is a, c, g, or t
atgctgtgaagtcataggaacccccaccctggggacacaacccctggtcactgagtgatgtatatctgtttttaacaggatgtcgtgtcaagatttccaacagaaattcatcgccatgtttatatgtagcgaaattccaattaccctggaccatggaaacacactccacgaaggatggtcccaaataatgtttaggaagcaagtgattctaggaaacactgcagtaacagctctttctgatgcaggaggacctcggaatgatgctcaattcaacttctctgtgcaagagccaatggaaggcaccaatgttgtcgtgtgcgtcacagttgctgtcacaccatcaaatttgaaagcagaagatgcaaaatttccactcgatttccaagtgattctgcggttccgggagaaatttccacccgtgtttttttcctcgttcagaaacactgtccaaagctcaaataataaattccgccgcaacttcaccatgacttaccatctgagccctgggaactatgttgtggttgcacagacacggagaaaatcagcggagttcttgctccgaatcttcctgaaaatgccagacagtgacaggcacctgagcagccatttcaacctcagaatgaagggaagcccttcagaacatggctcccaacaaagcattttcaacagatatgctcagcagaggctggacattgatgccacccagcttcagggccttctcaaccaggagcttctaacaggacctccaggggacatgttctccttagatgagtgccgcagcttggtggctctgatggaagtatcctttgcggtcatccctcccatgctctgagcacccctcagctctgtgggcttccccagagacctaattaggacagtagggaacccttttcccactcagtattttctcttcttccctgtccttgagtttctggggattctctactaactcactaacataccacagcaacaatgataatagttaccatctatcaagcacctactatgtgctgatcagtgtactggggtgtgtgtgtgtgtgtgtgtgtgtgtgtgtgtgtgtgtgtccttataattcttgaagcaatccctctgatacaaaaaagtatcatctcataatacagtagaagaaacaggagttcagagaggttaagtaatttgcccagatcacacagctagtcaggactcatgctcagatttgaagttggagctttcagcctccaaagtcgatgctctaaccttatcctaaaccgcccctttatagcaccgttgggaactattttcccttttacccattcacttcccactggaggagtctccattatttaaatttcttacttcaacaagtccccaattcaatcaagataactaccaccaaaacatggaaaactgcctggtctacacagcagttgcaccccagcattgctatgctgcattcacagcgggagacgctgggcagaggcagttcagagactcactccaggcccgtggctacaagtgtaggaccaagaattgaaccccagactcctgaccctcctcctgatttccattccccagtgagccatcctcttcctgcgtacccctggcttggcaagcagaagaggctgactccatgagtgtagacccccagatgctgccctgccagcccctcactcggcagtgtgctgtctcctgagacgcattgccccgctcctgcaccgttgacaaggctgaattgggactgtgaagccggccattgtgaaacaagagggcttttttgatgaaatcataaatcaggccctgtctctgctggctgtgctttggaatctatcagagacacagcccatctcccacagaggaatccaaatggtcctcacagtgccacggcccggggatggcagcccctctgcaccttgcacgctggctggttcactcttaactccttacccagctgaaagtgaatgggcggctagaccaagaggagtttgcgcgactgtggaagcgccttgttcactaccagcatgttttccagaaggttcagacaagccctggagtcctcctgagctcggacttgtggaaggccatagagaatacagacttcctcagagggatcttcatcagccgtgagctgctgcatctggtgaccctcaggtacagcgacagcgtcggcagggtcagcttccccagcctggtctgcttcctgatgcggcttgaagccatggcaaagaccttccgcaacctctctaaggatggaaaaggactctacctgacagaaatggagtggatgagcctggtcatgtacaactgaagcaaagaggaaagcagacccatggctcaggttgtctttgcagtttttgatgccatcatctgtagcatatgagtctttaattttgatggagtctaatttatctattgttttcttttgtcacatatttttggtggtatagctgagaaatcattgcccaacccaaggtcaaactatttattctgttttatagtttagctcttacatttaggtctttgatccattttgagatcattttttatatggtgtgaagtaacgttctaatttcattcttttgcattcattcatttgtcccagcaccagttgctgaaaaaactattcattctcctgtttctttgtcttggaacccttttcaaaaatcaatttaatntaagaatgtatttatggacgttcctttctgttcaattgatttatgtgtgtatcttatgccagtatcacactttgttgattgctacaattttatagtaacttttgaaattaggaagtgtgagttttccaactttattttacttttcaagactattttggctcttctgggttccttgcatttacatataaattttagaatcaatttatcagcttctgggattttgatagagattacattaaatctaaaggtcaatctggggaatattgccatcttcacaatataaaatcttttgttccatgcgtctcttcatttttctatatcttctttaatttttttgaacaatgatttacagttttcagtgtagaagtcttacactttccttgttaaatttattcctaactattgtagtttgggatgcaattttaaataaaattgttaatattattttcagattttcattgctagtgtacagcaataaaaattatttttatattgatcttatatcctgcaaccttgctaaacttgtttattagttccaatatttttaaagggcttccttagaattttatatattcaaaagtcatgtaatctgcaataaagttttatttttccactcca

SEQ ID NO: 463403 - DNA, 887 bp, Homo sapiens
atgctgtgaagtcataggaacccccaccctggggacacaacccctggtcactgagtgatgtatatctgtttttaacaggatgtcgtgtcaagatttccaacagaaattcatcgccatgtttatatgtagcgaaattccaattaccctggaccatggaaacacactccacgaaggatggtcccaaataatgtttaggaagcaagtgattctaggaaacactgcagtaacagctctttctgatgcaggaggacctcggaatgatgctcaattcaacttctctgtgcaagagccaatggaaggcaccaatgttgtcgtgtgcgtcacagttgctgtcacaccatcaaatttgaaagcagaagatgcaaaatttccactcgatttccaagtgattctgcggttccgggagaaatttccacccgtgtttttttcctcgttcagaaacactgtccaaagctcaaataataaattccgccgcaacttcaccatgacttaccatctgagccctgggaactatgttgtggttgcacagacacggagaaaatcagcggagttcttgctccgaatcttcctgaaaatgccagacagtgacaggcacctgagcagccatttcaacctcagaatgaagggaagcccttcagaacatggctcccaacaaagcattttcaacagatatgctcagcagaggctggacattgatgccacccagcttcagggccttctcaaccaggagcttctaacaggacctccaggggacatgttctccttagatgagtgccgcagcttggtggctctgatggaactgaaagtgaatgggcggctagaccaagaggagtttgcgcgactgtggaagcgccttgttcactaccaggtacgggcacattctctgt

SEQ ID NO: 463404 - DNA, 539 bp, Homo sapiens
taattttcatgtattttatttcactcaaataactaaaacatgatcatttcaacatgtaatcagtataaaaactattattgtgatattttacaatttttggggtaccatcttaaaacccagggggcactttaccttaattcagaccagccacacttgaagtgctgcagggttacacatggcttgtggctaccatgttggacagcacaggttctctggtcagatgggatatgaaaaatataactggtggccagtggtccttcacttgccagctactcacctgctgtgtgacgctgggatgggcgcttgccctctctgatgcatcttggtgatgggaacacgcttgatgaatgacagcccattgtcagggtctcatcctccaaagctgtgtgtatcacttactttttgcagactcggaaaaagccggctgttctctaccgcttcttgctagaaacaatggcctatgttaaaaataacttgtcaagaatcagaatcgctgcttgcaacttggcaggtgagcagagagacgtctcctgactcaa

SEQ ID NO: 463405 - DNA, 1748 bp, Homo sapiens
ctgcccaatgtcctcccttccagttcatgagcggcccagttctgtaccaggagaagctgctgaagccggcagctttgctgctggagaagggtgccgaccaggaggaagacgaggccctgcgggtgctgtccctgcgcgccctcggcaacatggccctgggcgcccccaagaaggtgaagcagtaccggaaggtcttgctggagaagtgcctgggccccctgagggagcccgtgagcaacagcgtgactgccgagggcatggaggccctgaccaagatcctggctgagctccgggaaggggatgtggggtcctctttcgacgccatgtctgagcagtgcaggatcttcttcgacaacgagagcgagctgctgcgtctgaaagccttcatcctctttggaaagctggcaagggtggtcgggatgtccaagaagcatttcttcaaaggggaggtgaagaaggcctggatccccctcatgctgcactcccaggacccctgctccaatgcagcccaagcctgtatggctaccatgtttcagtgtgtgcacttctggggctggaagtccctggagcatccctcagggccaagtgataccgctactgatgacaagatgaccgttttccagacaaccatgtgctccatcctggtgaggaagccaaagggggaaccagcccgtcccaggtggccacacgctggcttggagctggggggtcgagattgccacagctctttcttggggccctatgtttaccttccacacatgccatgtcgagaccggcactgtgcagcagaaatagaaggcaagtcatgtgcctatttcagctgtctgatgtttcttttagtaggcacatccagaaaagtgcagaggtgaaactaattttcatgtattttatttcactcaaataactaaaacatgatcatttcaacatgtaatcagtataaaaactattattgtgatattttacaatttttggggtaccatcttaaaacccagggggcactttaccttaattcagaccagccacacttgaagtgctgcagggttacacatggcttgtggctaccatgttggacagcacaggttctctggtcagatgggatatgaaaaatataactggtggccagtggtccttcacttgccagctactcacctgctgtgtgacgctgggatgggcgcttgccctctctgatgcatcttggtgatgggaacacgcttgatgaatgacagcccattgtcagggtctcatcctccaaagctgtgtgtatcacttactttttgcagactcggaaaaagccggctgttctctaccgcttcttgctagaaacaatggcctatgttaaaaataacttgtcaagaatcagaatcgctgcttgcaacttggcaggaattattatgaagcagatgtctacacattatctgaaaaagctggacttcccagcattacggaattccctccaggaactacagctggacccggatcccggggtcaggagggcagccctggagacgctcacagtcttggatagctgtagtcagcatgggtttctggcttcaccccaaggaatgtcctaggtggtccaaacataagacgtaaactgtcttcttagtgccaaatgcaagccctttttaatttagtttgtaagaagtttagtttgtaggaaaaacactattgtaaaataactagtatccttttgtttccttccgttgaaataaacctccactgtcgttggagtagacttgtgactgtaa

SEQ ID NO: 463406 - DNA, 1077 bp, Homo sapiens
  misc_feature (1)..(2): n is a, c, g, or t
  misc_feature (5)..(5): n is a, c, g, or t
  misc_feature (7)..(7): n is a, c, g, or t
  misc_feature (11)..(12): n is a, c, g, or t
  misc_feature (16)..(17): n is a, c, g, or t
nnagngnaganntgannaagctggcaggggtggaaatacatcaagggcttgcaaattgcctgcctgaaggaaagaaacacagactggttctattctctttacccagtagtaagtaaatctggcatgagagagagagagacagacagacagactctaggaaagaaaaaaagtgagttgtttgacacaaaggggaggttctgtatctatgttccttatctgaatacagtcagaatccgatggcttcaggttggcctccctaggatggcactttactcccaagtcctggtcattgtcaccaaaacgcagagctccccctgccctgctcttacccaagtctcccttctcagttctgatcatccatcctacctggagctttggaggcaggttgccttgttagcagggccagctgtttctccagaatttttaaatggagtgattgaatttaaacaagtcaacattttgatttcaaacatcaaaaaaggtgtccagaaatctcaagaatttgagacatcctaaggaactttaagtgctgtgagccacaagtaacatcaagaaaagacagggatgaagaaccgcacttacaagctaagtgtaagctcatcctacacatgtcatttggaccagaccaaggctgctgtcatggaggacccacaccacagcttgggaaccattcatctaccagagggtcacatgacttcaaatgactcttctaggggccacctgccatgatagggtaccagctcttcctctgaattcccaatccatttcttgagaactactgtttctaataagaggggaagaaggtcatgtgggaatcagttaaatcacgtgtggatagaagacaagttccagctttgtgggaaatcctgtagccttcgccaggtacaccctgacaatctcagaactgatcagagtttttgttccatgtgagatacccacgccactttaaaaaacaaactatcctgacatctaattactttgtgaatgattgtaatggcaataacaatagagatggaagaattttggaaacaatactagtttcacagctttcatgtgagatgccaaggttttagcatc

SEQ ID NO: 463407 - DNA, 2151 bp, Homo sapiens
  misc_feature (1)..(2): n is a, c, g, or t
  misc_feature (5)..(5): n is a, c, g, or t
  misc_feature (7)..(7): n is a, c, g, or t
  misc_feature (11)..(12): n is a, c, g, or t
  misc_feature (16)..(17): n is a, c, g, or t
nnagngnaganntgannaagctggcaggggtggaaatacatcaagggcttgcaaattgcctgcctgaaggaaagaaacacagactggttctattctctttacccagtagtaagtaaatctggcatgagagagagagagacagacagacagactctaggaaagaaaaaaagtgagttgtttgacacaaaggggaggttctgtatctatgttccttatctgaatacagtcagaatccgatggcttcaggttggcctccctaggatggcactttactcccaagtcctggtcattgtcaccaaaacgcagagctccccctgccctgctcttacccaagtctcccttctcagttctgatcatccatcctacctggagctttggaggcaggttgccttgttagcagggccagctgtttctccagaatttttaaatggagtgattgaatttaaacaagtcaacattttgatttcaaacatcaaaaaaggtgtccagaaatctcaagaatttgagacatcctaaggaactttaagtgctgtgagccacaagtaacatcaagaaaagacagggatgaagaaccgcacttacaagctaagtaagattaaacccagcatggagatatatgaattaatatgaactctgagaaagaaattggtcagctaaaaaatatatggctttcctgaatagacaaaagaacaaagattttccctttgagattcggcaggaagcttgcaccgagtgaaggatttataaagattataggagataacacaaagctattttatctctttaaaaaaaatcaaaggtgtaagctcatcctacacatgtcatttggaccagaccaaggctgctgtcatggaggacccacaccacagcttgggaaccattcatctaccagagggtcacatgacttcaaatgactcttctaggggccacctgccatgatagggtaccagctcttcctctgaattcccaatccatttcttgagaactactgtttctaataaggatttgctcaaaatggatttgcaaagagaaaaaaaatttaatgtcacactgccatgataagtcaaccaaccatctcatgtatcaaaggagagaggcagagaaagaaaaggaggaggataaagaagaggaggaggaggacgaaaggaaaaccaagaggaggggaagccacttcttactttggattaatgtgaaactaaatagtttactacattttaagtgggaaaatgttagttgaaaagatatttgtcaaccacaaacatttgaaagggaagcattccaaagattttcactgtttatgttcaaattacaacatgtgcagaaagttgtgcaactgaaaatcctttcaaacaacagctacaaaagagattggtcagttaggacaggaatagaaagtggaaacttagaagactggctactccttgtgtatgattgctggggtgagtctgtgctgagaactttttacaaagggtgtcctttgctgatatgagaggggggtgtcaaacttttgagtgatcactgtgggtcctcagcttagacatcttctctggcccaagatggcaccccttgctctctttccatgggacacagggaccttgccatccttccatcttataagccttctgtcatgatttttacttcatcctagatagccttaatttgggccaggtctccaggttcctccactttcttctgtcccatccatacccctcaccaatcctctgtaaattcctttccaggattttactgagaactacagagaaacaggctgggaataacaaacatggggagttatgtagttaacatacactttgacatcacctagtcattttcctgagtatatagataactctgttattactggttataaggtccatgagaagcctttatccttttctggaaaccaagaaagcacctgccctccctcagtcctaaggggagaatctttatgggtgtaacaataaaatggataatgggaaattctgatgtcctcaagcatacattcagatgtccccaatgagcatcatttgtatatcaagggaactccagagagatgatccacaattcagtgtgtccctttggccagtagagaggtcaccttagtctggaaataatgatgataataatgttaaagaaacctaactaaacaag

SEQ ID NO: 463408 - DNA, 141 bp, Homo sapiens
taccagctcttcctctgaattcccaatccatttcttgagaactactgtttctaataaggtactgtttctaatacctttccaacaatggtttattcatttatccatacatttaaaatacagattttttttagcatctgccat

SEQ ID NO: 463409 - DNA, 5307 bp, Homo sapiens
tgctctggctaagactttcagttctgtgttggaaaagagtgaaccacttctcccactccgtgggatatagacttgaatattatgtactggaaatgaagaggaaagaccaaaatcatgaattatttaggagacagaatccatatgatttgggaactgatattgtggtatgaagtatcaattggctgggaaggaggtgtttatgtacaaacctgtggtcacacattacatatagattgtcataaatcttacatggaatcattacggaatgaccaggttcttcagggcttctcggtggacaaaggagaattcacgtgtccactctgtaggcagtttgctaacagtgttcttccatgttatcctggaagcaatgtggaaaataacccttggcaacgtcctagcaacaaaagcatacaagatctcataaaggaagtggaggagctgcagggacgaccgggagctttcccagtaagcatcagtatcttaatgatgccacaacccttacgcaaagaagttactgttggcactggctttcaacagaagacgaagttcatgctcaaagaggatgcaatacatgaaattaaccaaacttactgaatttaattcagtagaaacagagtttaaaaactatatcataaagtaactccctcagtcttgctggtcatttctaggttcttgctgtaatagtgctgtactggatgtcttgtacatatagctattttttttcttttggattatatccctggaaagaattcccaggggtgggaattacttggtcaaaaaacatgatttacatatgtttatttacatataattatgtaatttatatgctgtcttttaaagaagtgttggaatagctttgaccaactacccagtttcattgtgaatccagaggtgtacagttttacccaaattttgaagaattgaagctcatatgcttgaaaaataatataatcacagttttactctactcattaaaaattatttccaatgtaaattttttataattttcagtgaccagtgtaaccaatattttaattttttcagagtacatgtgatgcagaaaagtcttacgaagtattactgagctttgtgataagtgaactatttaaaggaaagttataccatgaagaaggaactcaggaatgtgcaatggtatgtttctgcaaaaatcagatgtagcggttatttagtaaaaaatttacattttcttgccattatgaatgtaatttttaaaaactctttattgtagactgacttgttcaaattttcttttttaactttaggttaaccctattgcttggtctcctgaatccatggaaaaatgcttacaggacttctgcttaccttttctcagaatcaccagccttcttcagcaccacctttttggggaagatttacctagctgccaggaagaagaagaattttcagttcttgccagctgcctgggacttctgccaacgttttaccaaacagaacatccattcatcagtgcctcctgtctggattggccagttccagcatttgatattataactcagtggtgttttgagataaaatcatttactgaaagacatgcagaacaaggaaaggccttgcttatccaagagtcaaaatggaaattaccacacctactacagttgcctgagaattataacaccatttttcagtactaccacagaaaaacctgtagtgtctgcaccaaggttcctaaagatcctgctgtttgccttgtgtgtggtacttttgtatgcctgaaaggactttgctgcaagcaacaaagttactgtgaatgtgtactgcactctcagaactgtggtgcaggaacaggtattttccttttgatcaatgcatcggtaattatcatcattcgaggtcaccgcttctgcctctggggttccgtgtatttggatgctcatggagaggaagaccgggatcttaggcgaggcaaacctctctacatttgtaaggaaagatacaaagttcttgagcaacagtggatttctcatacttttgatcacatcaataaaagatggggtccacattacaatgggctgtgactctccacctcagcattgcatcgtatcatcattttcgctacgaatttatttttcaacaataagctttaacttaatttgggggattaacacttttgctgagggagaaaaagaaaacatacattatgaagcctttccaaaattaggtgcttggtaatcacgttaatggtataattttttttttttaatatctggagaacattaataacaagttaaattattctttagtggtcattttttaagtgcacaattaataagaagcacaacttgttcacaaactcattcagaaatgattctcccaacaatgcgtatcagctattcattgatacttagagtgggtgtgatttatttgacattttactgcttctttctgtctgtgtgttttaatttgcatctgccaagcataatgcatcttttttcctctgccattcttgtgttgattggagaatttttctgtatgtaattagaaaaaaatgtaaaacatgatttatgtgaaatactgtatagtaaaagttggtctaatagtagaactttaaaattttttcttattgtgaggaatctgttaaaagtttaaagctttgctgaaaactgaattcattctcaggaatttcataaatcttctccccaggtaaataattgaaatagctgtaaaataagtagatagctgctgttaatataatacagtacattttggggggcatatgtgtggttggggggtccttaaaaatcaaaatttgccatttcagttggatgaattactagaggtaataacaaatcttactatgaaatcaagaggtttaagaacatacactgggcagatgttgattccgtgcatgcccaccttttattaccaaacaaggttttgtttatatgattgtattagaaatgctcagacttccccagaaatgaaccataaattttggaacttcctttcagctcaagaggttcagctatattgtatttgtgcagtgtaatcactactatttctgctcggtttcctaaaaggaaaaaaaaggcgcagtggtgatgaccctcatgaatgagccacgcttctgcattcttcttagaaactgctgtgaaaaacaatttatgtttgcagggtttaaaaatcagtaaaaatgggaatgattgagctaaaacccactctatgagaaggaagattactgaaaagcatgtgacatattgctacaaagattttttttcctaaatgattcagtaattgaatgattatttaatatatagtgctatcaagcaatccctggtactttggacttccatggcttgttatataaaattacatttttacatgtaaaaataaactaaacaaatctaatgataaaatatgtcagatccatgttctaaaaaatttttgtaatgacatgacattacaagagtataaaaatggacattaaatcatggccttgcattaaaatatggaaagcagagcagtacatattcaaatgtattcagaaagtcaaaagattacctatcgttctacaataaaatacatggaaatagcttgctatttttatatacatttccaaaatattaagataactttctgtaagagtcaatgattctgttcgactaaatagctgtcctttccaacacattgctacttttttaaatactgtatcataagttcagcctgtcatactttttgcattgatcgttatgaataccagaccatttgtaagtgtggttgaagagcaaaatgctaattgacatctctagtaaatactgttacaggattcatgaacttgaataattctacagtttgaaactctgatgctatatatacatggtataatgtattcagactttgattactacttatttaaaatggaatgttttatggttgtgcatatggatgtgaagtgaaaatattagccttaactttaaaatttgggtgtttgatagtgtttattttgatattggtgaattagtcaccagtaaattttaaaaaagcacttggttgaaaattgtacttgaatacatacatgcatgctgctaaactagaactttaatttttccccataacttttataagtcccatttataaacccacttttaaaaataacaggtccaagttagagtgatgtgtgtatattattcaaaaaaatgtactggtgtgatatcttgtatgaatgatcatttaaatacagtacattactgtagaagctaaattgatctttataattaagcagaaattacaaaactaggaataatcaacattgtaagatatgttaataaaaacctgctgtcatttggtttgtgaaaggtccttaaaatgtttactgcttacatgtttttttttcccccaaagatattgacagtaatatatgtgagtgaacatggctgaaaagatcaaagcacaacataattagtagttgctttagggtggagtaagtgtaaagggtttgctttgctttttttcttttatttgcagagtgagttcttgcttcttcagtccttgtctcataatcaatgcacattctttgctaagtgtgtgtgtttggtagggggagaaggaaatgggtatgtagatctgaggaattgtgatctctgttcttttctgaaagttcccagccagacttcagaaatgtttagtgctttatgagaatgtttattttgagtggtttgcattcttgtttgaattgacagtcctcacccctacctctccatcctgaagctcaccagccatttatcagctagcagtccatttctcttcagacctttctctgttttatgtattccgatatttactgatttctgtgacttagaaaaagatgctgactaaaagcactgaaggcttagaggaaacagcaatatgggaagagatgtggtctaagactctctgtattatctccaggattctaattgctgactctcaaatggctgttgatggcttatatttgagatcatatttggggttgggggggacacaaagcatggttttaaccactagaatcaaatcaccgagagaagatgaattcattggtgaggatgcctgatgattgatgattgtgggagagcagatgacttatgactgtgtctcagtcccattcacagcacatagttctttcctctgccttatgatctggctagatgatatcaagcactgcttagttcaacagggatgagctggagtgggcaaaacagcaacatgatcacttctctatttatgacacttcaagctccctattaattaggcatatcaggtatggaagagctatgacctgccatcttagtg

SEQ ID NO: 463410 - DNA, 3916 bp, Homo sapiens
ctagcagtgagtctttaaactgctcgtctgagcagccaggaaattgggtgttatggttattaccataactctcaaagaacgaaaacagttgagttcagaactaggagctggtgctgctatagacaggttcatggctggctgtgacacatgccagctgattgatgtcatagaacatcaggagaccatcaaaaagcatatcaaaatgcaaaaggacaagttgggaccatttctttcaggagccaatagatctccctcactagaccccgtgcactactgctgcacagaagaagagagaagaaaggttttgaataattgtatcatgggtagtttttggattccactacttgtgggctacttctgctggataaatgtgttgcctacatacagtattctcttaaccctgcttctcaaaatcctatattttctgttgtcaagtcaagaattacaaagccacactttggcatggagaatactactctacagttactcatccttaatgacctgtagtacagaaaagtgaaaacattgtggaggagataaattaccaaaatagaagataagctgaaaaggcaatggaaaatatatcatacatatcaaagttgctcatttatgctattttgccataacaatgcatacaactgaagcacttcccttctccattggagttttgtctctagaggtattaaatattaatcttataaagaaaagaaagcaaaaaaaaaaaaccctgaacacatgttaataggttagggttttaagagcaaatcacaaaagcagaataagtacttggaggaaaaaaacaggaagagagagaaagagggagagagagagagaggtggggtaaattgtggaccctccttttaaagaaacaaaattttccacagagttgcattaatacttaaattggactaactccatgtgaatcctcgtaagaaatactatttcctttcaattaactcatctatcctacaattacatgtcatgaaatctaaaggcaaatatgtttacccagtaagggaataacattcgaggcaaaagtgatgtcacaaacagatgggaattccaagtaatactgagtcatggttctaggggaataaaacaattactttacagctcagtgcaatgtagtatttaaagaaaaggtatttcaatagaatagcccagacaattattcaacatttaacagagattatattagtctagatatgttaatttggattttattctgttttttatttatgttaataggtttggttactggtttaaagaaatattagaagtttatcttttatttttacaaatagattaacatttgtcttagagggagttctgcccttcatggataatacctttacctgctaaatctagatttctttttctataaataatttttttgccctttgggagcaatgaatatgtatgatttagatattatacctctatgtttctccaaaacctttcaagtcactcttattgcttacaattgtatgggcttagagctttagatttttagcttaaagtttttcagtgtgttaaaatgcaaatatatagaaaacgttgatgaaccacaacaagccatttgtatcctggtgtaaaatagaagctcagaaagccagtttgataagggaaaggagaagaatgggaggtcactctgtattggggcagggaaggggaagagcggagagcctctggtgttgaaatgcctgcgtcacaactgtacttcagtccagtcccgttgaacatattaacacaagtatttgaagaaaagatgctagctcctattcatgatgaacaagaaaacttagtcataagccaccttagtggccatcaccctattattgtgtaaatattaggtttcctgcttgtaaagaatttgctgtttggttcctttcaggcctgtttgcgtgttcccaactgctatgtggccaagaataagtaagtttatgtaacgttccaaagaaactgctcaaaaccgtggctcattttaactaagatatgaatagaaggcagaaatgaattcacaaacacttctttcacatgcactgcaaaatataactttttactcctccaggccaaaatggtcttaaccattgaagtaattatagctcacaactataatttaaagttagatctggttgattctaaattcacacaggaaaataattcactcatcttactggaacattgacgtaaataactttataaaacccatacagtttcagcaatcctagaaagtgttgtgaatccaaatagaaacagttgataaattaataagacagttgataaaataatttagtaagacaacaataattgtctaccatttattggttaaagtattatgcttgacactttataaatattacctatttaatcgttacagcaatctttaatattggtatccttatttacaaagaaaatgagtgcagaaaggacaagtagttttcgtgaaaccacttggaagtggaggagaagggttttgaactcccatcatctcaagctcatgctttgccatctcaccacagtgaaatgatggaaaactcaagtctgcaaaccttaaattttcaatcaaagggaggaaaccttgggcaaatgaagaggtcatggattgagtgtgagccttcacaaactcctccttgtatcttaagtctgctggagtactggcctgactccactcactcactgtgtacttcgtttgaaactaacaaacaatacagtgactgtcagtagatgttgcctcctcagtctacagagccaacaaaaattatggaaaagtaagttacttcactggagtttgagatgtaaattctgaattgatcatgctgtttctttaaaattcccaagtaaaattttctactcaattcacaaagtatttttaaaatacttgctttatttttatttcttctgttttccattccactaatatttgcttatctttattaatgtctgcttccaagttcttttactttgataaactttttccagtttttatgatgcatcttatctcaccaatgataagaaaatacagatatatttattattcgcaccagtgaaaaactgtcctaaactgaccctggcttacagatgtaccactggatcttggactaaatgcaaagaagaacagcagaatggttggtggagattcctatgctttcgacccatggcggggtcactaagtcaggtgaatcacctcccacccctaaagattcccacccagttatgccttctaatgtgctgttcacagtttatcaactgattctgaaattctgagacttaacagttttaaactgactgtttatgtttcttatttatgcttttgcctaccccatcagtctaaacctgatccctgatttctctccattttgttttaacttcatttgaaactcacgactttaaagtgactgtacgttagttttgaccacaactaaacctggctaataaatggctccactttctttctcactttctttcttttaagaaataaacttttcactttgaaataattataaaatttgtaccatttactttggataatgaagttatgtttattttaggaatgcaagattggttaaacattccaaaatcaatctaattcttactatttcaacagaatagaggagaaaaatcatgtgatcatctcaagaaatgtagaaaaggcattttaaaaagtgaaacttccacttttgacaaaaaagcttagtaaacaattacatcttcattctctggttagtagcaaataacaagaaacactatctcctaaagaaaacaagaaagccttaggttacctaaactcaccttctaaacttgtttcacttcaaaaaggtaaaataaaatattcatgtgctaccattatgtggtttaacaaagaggaaggcatttcctcttacacatattaatccatgattgtccataggcttat

SEQ ID NO: 463411 - DNA, 4013 bp, Homo sapiens
ctagcagtgagtctttaaactgctcgtctgagcagccaggaaattgggtgttatggttattaccataactctcaaagaacgaaaacagttgagttcagaactaggagctggtgctgctatagacaggttcatggctggctgtgacacatgccagctgattgatgtcatagaacatcaggagaccatcaaaaagcatatcaaaatgcaaaaggacaagttgggaccatttctttcaggagccaatagatctccctcactagaccccgtgcactactgctgcacagaagaagagagaagaaaggttttgaataattgtatcatgggtagtttttggattccactacttgtgggctacttctgctggataaatgtgttgcctacatacagtattctcttaaccctgcttctcaaaatcctatattttctgttgtcaagtcaagaattacaaagccacactttggcatggagaatactactctacagttactcatccttaatgacctgtagtacagaaaagtgaaaacattgtggaggagataaattaccaaaatagaagataagctgaaaaggcaatggaaaatatatcatacatatcaaagttgctcatttatgctattttgccataacaatgcatacaactgaagcacttcccttctccattggagttttgtctctagaggtattaaatattaatcttataaagaaaagaaagcaaaaaaaaaaaaccctgaacacatgttaataggttagggttttaagagcaaatcacaaaagcagaataagtacttggaggaaaaaaacaggaagagagagaaagagggagagagagagagaggtggggtaaattgtggaccctccttttaaagaaacaaaattttccacagagttgcattaatacttaaattggactaactccatgtgaatcctcgtaagaaatactatttcctttcaattaactcatctatcctacaattacatgtcatgaaatctaaaggcaaatatgtttacccagtaagggaataacattcgaggcaaaagtgatgtcacaaacagatgggaattccaagtaatactgagtcatggttctaggggaataaaacaattactttacagctcagtgcaatgtagtatttaaagaaaaggtatttcaatagaatagcccagacaattattcaacatttaacagagattatattagtctagatatgttaatttggattttattctgttttttatttatgttaataggtttggttactggtttaaagaaatattagaagtttatcttttatttttacaaatagattaacatttgtcttagagggagttctgcccttcatggataatacctttacctgctaaatctagatttctttttctataaataatttttttgccctttgggagcaatgaatatgtatgatttagatattatacctctatgtttctccaaaacctttcaagtcactcttattgcttacaattgtatgggcttagagctttagatttttagcttaaagtttttcagtgtgttaaaatgcaaatatatagaaaacgttgatgaaccacaacaagccatttgtatcctggtgtaaaatagaagctcagaaagccagtttgataagggaaaggagaagaatgggaggtcactctgtattggggcagggaaggggaagagcggagagcctctggtgttgaaatgcctgcgtcacaactgtacttcagtccagtcccgttgaacatattaacacaagtatttgaagaaaagatgctagctcctattcatgatgaacaagaaaacttagtcataagccaccttagtggccatcaccctattattgtgtaaatattaggtttcctgcttgtaaagaatttgctgtttggttcctttcaggcctgtttgcgtgttcccaactgctatgtggccaagaataagtaagtttatgtaacgttccaaagaaactgctcaaaaccgtggctcattttaactaagatatgaatagaaggcagaaatgaattcacaaacacttctttcacatgcactgcaaaatataactttttactcctccaggccaaaatggtcttaaccattgaagtaattatagctcacaactataatttaaagttagatctggttgattctaaattcacacaggaaaataattcactcatcttactggaacattgacgtaaataactttataaaacccatacagtttcagcaatcctagaaagtgttgtgaatccaaatagaaacagttgataaattaataagacagttgataaaataatttagtaagacaacaataattgtctaccatttattggttaaagtattatgcttgacactttataaatattacctatttaatcgttacagcaatctttaatattggtatccttatttacaaagaaaatgagtgcagaaaggacaagtagttttcgtgaaaccacttggaagtggaggagaagggttttgaactcccatcatctcaagctcatgctttgccatctcaccacagtgaaatgatggaaaactcaagtctgcaaaccttaaattttcaatcaaagggaggaaaccttgggcaaatgaagaggtcatggatatgatatgaaaatattttatgattttgcatgtgagaagctactgcatagatgaattcaactgcaggatcccttttaaaaaatatgtatcttcaagattgagtgtgagccttcacaaactcctccttgtatcttaagtctgctggagtactggcctgactccactcactcactgtgtacttcgtttgaaactaacaaacaatacagtgactgtcagtagatgttgcctcctcagtctacagagccaacaaaaattatggaaaagtaagttacttcactggagtttgagatgtaaattctgaattgatcatgctgtttctttaaaattcccaagtaaaattttctactcaattcacaaagtatttttaaaatacttgctttatttttatttcttctgttttccattccactaatatttgcttatctttattaatgtctgcttccaagttcttttactttgataaactttttccagtttttatgatgcatcttatctcaccaatgataagaaaatacagatatatttattattcgcaccagtgaaaaactgtcctaaactgaccctggcttacagatgtaccactggatcttggactaaatgcaaagaagaacagcagaatggttggtggagattcctatgctttcgacccatggcggggtcactaagtcaggtgaatcacctcccacccctaaagattcccacccagttatgccttctaatgtgctgttcacagtttatcaactgattctgaaattctgagacttaacagttttaaactgactgtttatgtttcttatttatgcttttgcctaccccatcagtctaaacctgatccctgatttctctccattttgttttaacttcatttgaaactcacgactttaaagtgactgtacgttagttttgaccacaactaaacctggctaataaatggctccactttctttctcactttctttcttttaagaaataaacttttcactttgaaataattataaaatttgtaccatttactttggataatgaagttatgtttattttaggaatgcaagattggttaaacattccaaaatcaatctaattcttactatttcaacagaatagaggagaaaaatcatgtgatcatctcaagaaatgtagaaaaggcattttaaaaagtgaaacttccacttttgacaaaaaagcttagtaaacaattacatcttcattctctggttagtagcaaataacaagaaacactatctcctaaagaaaacaagaaagccttaggttacctaaactcaccttctaaacttgtttcacttcaaaaaggtaaaataaaatattcatgtgctaccattatgtggtttaacaaagaggaaggcatttcctcttacacatattaatccatgattgtccataggcttat

SEQ ID NO: 463412 - DNA, 1197 bp, Homo sapiens
cctagagctgccgtggatcccaaatgcctgtccagtttggatctctgggaggcctggctcttagctttccccaggatcccgtctcttttaaagcaatgtgtattcttacagcaaattcccattacttgtgggtggttgagaggatcttacattctttaacatccaaaggttctgtcataccatccacattttcagacaggttggtcagattcattagatggaatcctaccatccggattgctcagaaccccagcctagggggctgtgactccatgtgggagtctgaacctcctcaaggggcctcagctaagcagcaagggggtggagagagcagctcagagctcagggacacagagcttctgcactccgcccctctgctggtcctgacttcggagacttagaaatgggctgtcctcagcggtgctctgacttcaggaagccagtgaaccggtgtctgagtcactgcagttagcttgagtctctcccagacccagccattcatccacatcaaataaagacagtccaggccccagctgggcctgccccggggcacctcacaacactcctgggagaggaaatcctgagtcaacctggctgggaaccaactggaaaccagggactttagtcatggctgtctgctcttgggcgggccttgctgtgctacctgcttcatctgaagtaccggtgacaagtcttccacctccaggtgtctttctgtgaaaacgtttcattgcgagtagctaaaagaaggcaagataaggaaactgaggcatggaaaagttacacaactttccctcactgctcagaaaacagggccctggagacagatcgctaccctcccacctgagttcagaatcaccctgcaaaccgcctcctggtagataagagatgtacaaagaatcatcaaaaagatgccaacaagaagtgaaattccacgaggaacttgaaaaatatgttcgcctgtctatctcagggctctggttccagctctagctctgtgtctagtgatttccttttgggtttgtttgttgcttatcctgtagatcattggctgccaaaaatgagacaaagatgtggtcctggattgtaccatctttctctgctttaaagtcagtacaaatcacttaaaaacaaaatgaaacaaaacatgttgcctggcccttcaggggaagctgagcctgctggtcaggagccagg

SEQ ID NO: 463413 - DNA, 546 bp, Homo sapiens
tgtttgtacaactcttgttttctcttttttaaaaataataaaacagtaaatgaagaaaagacacagagaaggatgtgacatgcctgggccgtggagcactctgagatctcatcgcggacaccactgcccacacctccatcccgtcctgcgcaggccgacactcactgacgttgaaggctgccttcagtgcctggatgtctgcggccaccccagacatgcggtagatgcccacctcctccatgcctcggcgctcgatctcctccacgcactggcgcacgatgtagggcaccttggacctctctctcctgtccaccaaccaatgaaaggatgaagggacttcagcatacagacatgatgaaatatgcctcatgcataaaaattcatgacaacatgtcatttgcaaaaacacagacgaaccatgcaggaaaaatgccagggaaaagtgcatggcagcttcctcctcagcactcagggcccagacaggagcggttttctccccaggacacagctccaagtcgtccagaagcctccgtgatgcccctcctg

SEQ ID NO: 463414 - DNA, 2305 bp, Homo sapiens
tgtttgtacaactcttgttttctcttttttaaaaataataaaacagtaaatgaagaaaagacacagagaaggatgtgacatgcctgggccgtggagcactctgagatctcatcgcggacaccactgcccacacctccatcccgtcctgcgcaggccgacactcactgacgttgaaggctgccttcagtgcctggatgtctgcggccaccccagacatgcggtagatgcccacctcctccatgcctcggcgctcgatctcctccacgcactggcgcacgatgtagggcaccttggacctctctctcctgcgggaggagggaatgttctcagtgtcctaacagccctgcttgggccataacacaggagacctgctccctatgtgcacacccggaggtggggtgaggacggtgatgaaggtacccaggtctggggctgcacacagagccttctgcatgcctgtcctccctctgcaagctctgtcctcattgcatgtgctttctcaggaacctttcaagcggccagaacccctgcaaatcacacatgacctttgtgggaaggtcaggaggcctgtctaagtcaagtcagcacgggaagggcatctgacagattccaggcctggggtgagcagcctgtgcccccggctgggaggtcagacccggtgttggtcctgccacccacgtgctgtgtgagaggagaatccgtgacccctgccctgggccttaacacacatccgacgaatgaatgaagggttgcctcagcaccggtgctccaagtcctgcgatgctaagtgcttttctcctctgagtcttagcaatggacaattccaatacctccacacaggacactagagtaagaatccttcacagttagaacgcagtgctgtgcggaggccttaacttgagttctgttttgcacctggatttaccagcacatcaaagctgcttcgcaagccccctcatcagcagggctcatgtgggggagctgctgatggagtcctcgctgctcatgcccacagccctcccagagtgctatgcgagtggctgccgtgcagttgggggtggggcgtggtgtttagacacagataggagtccagggtatgactgatggaggccccggcccacgtgaccagcaaggtcagaggcccagccagattccatcctgaggaagcaaatgaattctcagaggaagtggtctgtgtctgcatgaactgctctcaaaccaacaaataggcttctcttggcaactgactcgtgacaaagggttcaagattgtttgaaaaaaaaaaaggggggggggggacagggaggcagtaggtcctggaaaagtaaattctttattttacaataagaaagtgattacatattttatttttttttacaatggtggaaaattagaagtgattgtgaaaatgatgtctacccgccttgctgatgagtaggatgtgatttggctctttaggaaactgaatttgcagaacttaagaatattgatttataaagggcatggccattgacccagtccatcttatgcaaatctggatgccataaataatatttaaaaatgaaagtattggggtggaggttgcagtgagcggagatcgccccactacactccagcctggtcaacagagtgagactctgtctcaaaacaaaaaaaaaaaaaaaaaaagaagaagtcattcccaacattgctcatcaaattatgaccataaatttccaggatcagactaacggctaaagagactgatgcatcaacaccaggcagagaataaagcagattttttttgttttgttttggagagcctctaggaacttgaaaaatacatatgccacactcttaagacccggtggttcttaatcagggatgttcattaaaatgctggaaaactctaaagatttccaggtcccatccaaggagattttgcttctgattgactggctagtggcctggccattggtattttgaaaaatccctccaagtgattcttttacatcccagctagaaaaccctaaattaaaggtgaaaaaccagacaccaagtggcatttaaataaatgtcaactttaactccacaaagcatctggttgcatgtggacagaaagagaaggaaagagggccctatatctggataacttggaaatgtgctccccctagcaagatatctaccaaaattaaaaccatatttgaggatgctggcactgtgagcaatatataaatgatgcatgtaacatcatttaatatgatcttatttttaaaaatgagtagagtggtgttttctagctgttagtgtttccaaatatcaatgt

SEQ ID NO: 463415 - DNA, 3432 bp, Homo sapiens
gacaacaggttgagcatgcagctcttctttgcaactgggtctgaaagagctgcaggaggcagtgggtcactcccctgggttacgacaagccggagacctctcccgaggtggtcacatggagcgcccgggacacgagtccttgcgcagtttaggcttgtcatcatcgtcacacccacagcgctggccgccagtgaggaccctgtgaggggcacctgtgtggggtgtgaaccacctgaacgccttttctctgcctcgcaggggtcagcagcacccggcaaacagcagcaggaggagccgctagagcagctgctcatgggcagagctgccctcgggcaactcctgccaccaccccctccccagggagcccaaggcaggggaggctcagcatggaatgaaacaggggagtgagggacacaaggaggtgggaagtgggagggtcccagccccaccaagtacgcagagaacccctcgttgtcctggacaccacaggggcacctgcaggctgggagaccaggtcctctgtgcatgggcccgggaggcagacctgccctaagggtgatgcacaggctacaggtgctgcacgctccagcgcccactctagacatcagcctccaggttgactaagggtcaggtcatgtttgaaaccatgcttggctggaccaggacccatggcaagagcacctgggcaccagtgtttagccctggtctgcaggaaggaggacagcagactttaggaccccacagcacggcagtgctgaccatttcacccacttggcctccttgagaaatatggatggggacccctctggggatgggcaaggccttccaggataggctcagttttggtcccctgctttttgaggttgggttaaaattccgaccatggcagaggaagcacagctcaggttcccacacctcacttttcacagcctctgagggcagcagtgcacgtggaggagacgtctcccatgaggccaaggcctccagtgctcaccgatgccctctgcgaagttggggtagaactcgtcagtgaagaggggctcgggcagctcacggaaatacagcttcagcgtgcctgcgatggcgttcacgtccatctcgctcatcatcaccgacacgtccttgttatctggaaagagcacggaaatgcagcggcctccttgaagatcctgataaatgaagaaaagacacagagaaggatgtgacatgcctgggccgtggagcactctgagatctcatcgcggacaccactgcccacacctccatcccgtcctgcgcaggccgacactcactgacgttgaaggctgccttcagtgcctggatgtctgcggccaccccagacatgcggtagatgcccacctcctccatgcctcggcgctcgatctcctccacgcactggcgcacgatgtagggcaccttggacctctctctcctgcgggaggagggaatgttctcagtgtcctaacagccctgcttgggccataacacaggagacctgctccctatgtgcacacccggaggtggggtgaggacggtgatgaaggtacccaggtctggggctgcacacagagccttctgcatgcctgtcctccctctgcaagctctgtcctcattgcatgtgctttctcaggaacctttcaagcggccagaacccctgcaaatcacacatgacctttgtgggaaggtcaggaggcctgtctaagtcaagtcagcacgggaagggcatctgacagattccaggcctggggtgagcagcctgtgcccccggctgggaggtcagacccggtgttggtcctgccacccacgtgctgtgtgagaggagaatccgtgacccctgccctgggccttaacacacatccgacgaatgaatgaagggttgcctcagcaccggtgctccaagtcctgcgatgctaagtgcttttctcctctgagtcttagcaatggacaattccaatacctccacacaggacactagagtaagaatccttcacagttagaacgcagtgctgtgcggaggccttaacttgagttctgttttgcacctggatttaccagcacatcaaagctgcttcgcaagccccctcatcagcagggctcatgtgggggagctgctgatggagtcctcgctgctcatgcccacagccctcccagagtgctatgcgagtggctgccgtgcagttgggggtggggcgtggtgtttagacacagataggagtccagggtatgactgatggaggccccggcccacgtgaccagcaaggtcagaggcccagccagattccatcctgaggaagcaaatgaattctcagaggaagtggtctgtgtctgcatgaactgctctcaaaccaacaaataggcttctcttggcaactgactcgtgacaaagggttcaagattgtttgaaaaaaaaaaaggggggggggggacagggaggcagtaggtcctggaaaagtaaattctttattttacaataagaaagtgattacatattttatttttttttacaatggtggaaaattagaagtgattgtgaaaatgatgtctacccgccttgctgatgagtaggatgtgatttggctctttaggaaactgaatttgcagaacttaagaatattgatttataaagggcatggccattgacccagtccatcttatgcaaatctggatgccataaataatatttaaaaatgaaagtattggggtggaggttgcagtgagcggagatcgccccactacactccagcctggtcaacagagtgagactctgtctcaaaacaaaaaaaaaaaaaaaaaaagaagaagtcattcccaacattgctcatcaaattatgaccataaatttccaggatcagactaacggctaaagagactgatgcatcaacaccaggcagagaataaagcagattttttttgttttgttttggagagcctctaggaacttgaaaaatacatatgccacactcttaagacccggtggttcttaatcagggatgttcattaaaatgctggaaaactctaaagatttccaggtcccatccaaggagattttgcttctgattgactggctagtggcctggccattggtattttgaaaaatccctccaagtgattcttttacatcccagctagaaaaccctaaattaaaggtgaaaaaccagacaccaagtggcatttaaataaatgtcaactttaactccacaaagcatctggttgcatgtggacagaaagagaaggaaagagggccctatatctggataacttggaaatgtgctccccctagcaagatatctaccaaaattaaaaccatatttgaggatgctggcactgtgagcaatatataaatgatgcatgtaacatcatttaatatgatcttatttttaaaaatgagtagagtggtgttttctagctgttagtgtttccaaatatcaatgt

SEQ ID NO: 463416 - DNA, 1633 bp, Homo sapiens
gctttgaaatgcgataaagccggtatggtttggttcagggcgcccagggtttgtgacacccgcctatctgttacactgatgctgttacacaactgtctgggaattcatctgtgtcctcgtgtgtgcaacgatgccaacctaccccaaagtggacaattggatgaagaagttggcttccaggatgatgctcagtttggttctttacaacatttggccacagagtttcccatgatggggcagttaatgggcaaagaaaaagaccttcttttcatggccaggaactttttgggagcctccgtttttaacagcagtaacttgctctacactgactctgagctggcccacatccctgaaggtatggtcttaatgggattagggaaaccatggctgacagggcttccttgggatgacttctcagcacaaatgttctgcctccctggatccagcccagagacttgacttgggataggaaaagagtgaaaggtgaacgaaagaccataaaccacttctctatgtttcctacaaatgctggggtgtctattattctgcatagtggggcgcattaagcaaattctcctttttcaggatgactgaagctgaatttctgtttacttttgtttatgcatctccgttaaaccaggatcatatcctcaacccccaaagaggaacaggccacctttgccatcatgctcagcctggtcaccagcctgaggctttcacagccacccagatcttcccctcacctttctcctggagtgtagagattccatattctctttcatctggctcctgacatcacttctccgtattgactgtggggctcttttttggcttggatttttctctttgttaagaccctgtgggaccacagaaagcagaaaatagtcattcaggggagcttgcttcctgacttcctcagctgatgttgttggttacatctgcaaccatactgcgatacggtgtagcactggcatcatgggtaagattcgtccccttatgtgaataagtctaatgacggtactgctgttgatgatcaaatatatcaagaagctaagtgaaagcctcctcaggatataatactgatggaaaatgactggcctgaggaaacactagatttcattaatcgtcatctaattgctatgttaaatagttctggccaggtacggtggctcacacctgtaatctcagcattttgggaggctgatgtgggaggatcacttgaacccaggagtttgagagaccagcctgggcaatataatgagatcctgtctctacaaaaactaaaagctgaaaaataaaattagtcaggtatggtggtgtgcacctgtacttccagctacttaggaggctgaggagagaggatcacttgagcttgagctcgggagatcaaggctacagtgagctgtgatcacaccactgcactccagcctgggcaacagagatcctgtctctaaaacgaaaacaaaacaatagttctgcacaagtgtatcatgagatatagatggtagtagaacaagtcatcatatcaggacaaaaatatgaaaatgtatgtaatgactttctagatagataagttgtttcttttttaaaatttaattttaattgaaaataaaaattttatatatttgttgtg

SEQ ID NO: 463417 - DNA, 1415 bp, Homo sapiens
  misc_feature (1)..(1): n is a, c, g, or t
  misc_feature (9)..(9): n is a, c, g, or t
  misc_feature (11)..(13): n is a, c, g, or t
  misc_feature (16)..(16): n is a, c, g, or t
nccaatttncnnncanactttcgacgaaacaattcgaaagcccatcagtttgggttgtggccatactgtctgcaagatgtgcctgaataaactccaccgcaaggcttgcccatttgaccagaccactatcaatacagacattgagctcctccctgtgaactcagcattgctgcagctcgtgggtgctcaggagaaaaacttcttcaacccaaaggacatggatgaaaaacccacagctaacatactgaatggtgaaagactagatgctttttctgtccctgagcagcagcctattactttgtgtagtggggttgaagacacaaagcattatgaggaagccaagaaatgtgtagaagaattagcattgtacttaaaaccgctcagcagtgctagaggagtgggtctgaacagcactactcagagtgttctgagtcgcccaatgcagaggaagcttgtgactctagtccactgtcaactagtagaagaagaaggcaggattcgtgccatgagggcagctcgatctttaggtgaacgaacagttacagagctcattctccagcaccagaatcctcagcaactctcttccaatctttgggcagcagtaagggctaggggatgccagttccttggaccaggtacataattaactttaggtatttattctgctgcaggaagttcattcattttgatagaagtttttcttaaatttattaatcactttatctgttttctttataaaatatatagaatgtaatacaaaattgctcacaaaaatggtgtaaaagtgtgttgctggttaatcttaactgtattgccagttaattgaatagctgcagaaatgattaaatattccccttctaataaatggatttatcttatctatgtacttgataaattttggttttgcccaactttccctagcaatgcaggaggaagctttaaagttggttctgctggccttagaagatggttctgctttgtcaagaaaagtattggttctgtttgtggtgcaaagattggagccacggtttcctcaagcctctaaaactagcattgggcatgttgttcagctcctttatagagcctcctgtttcaaggtcaccaaacgtgatgaagactcttctttgatgcagctgaaagaagaatttagaacctatgaagctctgcggcgagaacatgactcccagatagtgcagattgctatggaagcaggcttacgaattgcaccggaccagtggtcctctttgctttatggagaccagtctcacaaatctcatatgcagtccattattgacaagttgcagactccagcctcttttgcacagagtgttcaggaactaacaattgctctccagcgaactggagacccagcaaacttgaaccgactaagaccccatttggagctgttagcaaac

SEQ ID NO: 463418 - DNA, 2354 bp, Homo sapiens
  misc_feature (1)..(1): n is a, c, g, or t
  misc_feature (9)..(9): n is a, c, g, or t
  misc_feature (11)..(13): n is a, c, g, or t
  misc_feature (16)..(16): n is a, c, g, or t
nccaatttncnnncanactttcgacgaaacaattcgaaagcccatcagtttgggttgtggccatactgtctgcaagatgtgcctgaataaactccaccgcaaggcttgcccatttgaccagaccactatcaatacagacattgagctcctccctgtgaactcagcattgctgcagctcgtgggtgctcaggagaaaaacttcttcaacccaaaggacatggatgaaaaacccacagctaacatactgaatggtgaaagactagatgctttttctgtccctgagcagcagcctattactttgtgtagtggggttgaagacacaaagcattatgaggaagccaagaaatgtgtagaagaattagcattgtacttaaaaccgctcagcagtgctagaggagtgggtctgaacagcactactcagagtgttctgagtcgcccaatgcagaggaagcttgtgactctagtccactgtcaactagtagaagaagaaggcaggattcgtgccatgagggcagctcgatctttaggtgaacgaacagttacagagctcattctccagcaccagaatcctcagcaactctcttccaatctttgggcagcagtaagggctaggggatgccagttccttggaccaggtacataattaactttaggtatttattctgctgcaggaagttcattcattttgatagaagtttttcttaaatttattaatcactttatctgttttctttataaaatatatagaatgtaatacaaaattgctcacaaaaatggtgtaaaagtgtgttgctggttaatcttaactgtattgccagttaattgaatagctgcagaaatgattaaatattccccttctaataaatggatttatcttatctatgtacttgataaattttggttttgcccaactttccctagcaatgcaggaggaagctttaaagttggttctgctggccttagaagatggttctgctttgtcaagaaaagtattggttctgtttgtggtgcaaagattggagccacggtttcctcaagcctctaaaactagcattgggcatgttgttcagctcctttatagagcctcctgtttcaaggtcaccaaacgtgatgaagactcttctttgatgcagctgaaagaagaatttagaacctatgaagctctgcggcgagaacatgactcccagatagtgcagattgctatggaagcaggcttacgaattgcaccggaccagtggtcctctttgctttatggagaccagtctcacaaatctcatatgcagtccattattgacaaggtaggaccttttttgttccttacttcttagactaatcttggcattttggtaattcatttaacaaatgtatattaaagtgaatactgtatagcttttgtaaattgtatttatagccagtgtcatgtcataaccaatcacgttataataccactttgttcatttaaagatttgattagtttatattttttattttacttattttatattttattgtatttttactagaatcacagagatgaaggccaactctagagaccactctacatttaatttagagaaatagagtcaaatagtaagagtaacctaaaaaaaaaataatgaacatttactaaaatcttaatatgtatctagtggttttaaataattcatttaatcctctcaacagccctgtattatccattttagacaaagacaaagggaagttaatatgtttttccagcatcacatagataataaatgacagaagtggatttgaacttgaccattctcagtgtagagtacactaaccttttaccagactattcccccccaccttttttttttttttttttttcctatttctaaagatagaattccttgaatgggttagttcactttaatatttatttaatactttttatactgttgctcatttcatcaggaaaatagatttctctgggcttctttatgtttcttctttctcccgtcacaaaattgtgttgtattttaccattcttacctcttccaaatctcgtttttctcatttttttctgtattatgtatccttagttgcatttccttgatcctgtttttgccctctccatgatatcttgttccttcaagtatcctgtcttgtatatctttacttaggctttttctgctccttctccgtaacctgaaaatatacccaaccttcatttttcaacttgcacttacatctaagttattttagcttctctgtgtttattcctactactgatctgaagctctcttaatattcactagtagattcccagtctctgattccaaaagctttgtcttagtctttaaatcactcccatttgttttcagcatttc

SEQ ID NO: 463419 - DNA, 1666 bp, Homo sapiens
accagaagagcaaatggttgttgattgatccacatttttactgtaagcagaaacttaggacccaagattataatgctgcagaggatgctgatcgatgtgttcttcttcctgttcctctttgcggtgtggatggtggcctttgcgtggccaggcaagggatccttaggcagaatgagcagcgctggaggtggatattccgttcggtcatctacgagccctacctggccatgttcggccaggtgcccagtgacgtggatggtaagcctgacttggctcagatggaaacagcttggaggaggcatttgctccctgaaccaacccccagggctgccccggagaccgcacttcagaagcacgcgcgtgaaacggagtccaacataacagagtaccacgtatgactttgcccactgcaccttcactgggaatgagtccaagccactgtgtgtggagctggatgagcacaacctgccccggttccccgagtggatcaccatccccctggtgtgcatctacatgttatccaccaacatcctgctggtcaacctgctggtcgccatgtttggctacacggtgggcaccgtccaggagaacaatgaccaggtctggaagttccagaggtacttcctggtgcaggagtactgcagccgcctcaatatccccttccccttcatcgtcttcgcttacttctacatggtggtgaagaagtgcttcaagtgttgctgcaaggagaaaaacatggagtcttctgtctgctgtttcaaaaatgaagacaatgagactctggcatgggagggtgtcatgaaggaaaactaccttgtcaagatcaacacaaaagccaacgacacctcagaggaaatgaggcatcgatttagacaactggatacaaagcttaatgatctcaagggtcttctgaaagagattgctaataaaatcaaataaaactgtatgaactctaatggagaatcgactactaaatgagagattttcagacccctgggtacatggtggatgattttaaatcaccctagtgtgctgagaccttgagaataaagtgtgtgattggtttcatacttgaagacggatataaaggaagaatatttcctttatgtgtttctccagaatggtgcctgtttctctctgtgtctcaatgcctgggactggaggttgatagtttaagtgtgttcttaccgcctcctttttcctttaatcttatttttgatgaacacatatataggagaacatctatcctatgaataagaacctggtcatgctttactcctgtattgttattttgttcatttccaattgattctctacttttcccttttttgtattatgtgactaattagttggcatattgttaaaagtctctcaaattaggccagattctaaaacatgctgcagcaagaggaccccgctctcttcaggaaaagtgttttcatttctcaggatgcttcttacctgtcagaggaggtgacaaggcagtctcttgctctcttggactcaccaggctcctattgaaggaaccacccccattcctaaatatgtgaaaagtcgcccaaaatgcaaccttgaaaggcactactgactttgttcttattggatactcctcttattatttttccattaaaaataatagctggctattatagaaaatttagaccat

SEQ ID NO: 463420 - DNA, 1719 bp, Homo sapiens
accagaagagcaaatggttgttgattgatccacatttttactgtaagcagaaacttaggacccaagattataatgctgcagaggatgctgatcgatgtgttcttcttcctgttcctctttgcggtgtggatggtggcctttgcgtggccaggcaagggatccttaggcagaatgagcagcgctggaggtggatattccgttcggtcatctacgagccctacctggccatgttcggccaggtgcccagtgacgtggatggtaagcctgacttggctcagatggaaacagcttggaggaggcatttgctccctgaaccaacccccagggctgccccggagaccgcacttcagaagcacgcgcgtgaaacggagtccaacataacagagtaccacgtatgactttgcccactgcaccttcactgggaatgagtccaagccactgtgtgtggagctggatgagcacaacctgccccggttccccgagtggatcaccatccccctggtgtgcatctacatgttatccaccaacatcctgctggtcaacctgctggtcgccatgtttggctacacggtgggcaccgtccaggagaacaatgaccaggtctggaagttccagaggtacttcctggtgcaggagtactgcagccgcctcaatatccccttccccttcatcgtcttcgcttacttctacatggtggtgaagaagtgcttcaagtgttgctgcaaggagaaaaacatggagtcttctgtctgctgtttcaaaaatgaagacaatgagactctggcatgggagggtgtcatgaaggaaaactaccttgtcaagatcaacacaaaagccaacgacacctcagaggaaatgaggcatcgatttagacaactggatacaaagcttaatgatctcaagggtcttctgaaagagattgctaataaaatcaaataaaactgtatgaactctaatggagaaaaatctaattatagcaagatcatattaaggaatgctgatgaacaattttgctatcgactactaaatgagagattttcagacccctgggtacatggtggatgattttaaatcaccctagtgtgctgagaccttgagaataaagtgtgtgattggtttcatacttgaagacggatataaaggaagaatatttcctttatgtgtttctccagaatggtgcctgtttctctctgtgtctcaatgcctgggactggaggttgatagtttaagtgtgttcttaccgcctcctttttcctttaatcttatttttgatgaacacatatataggagaacatctatcctatgaataagaacctggtcatgctttactcctgtattgttattttgttcatttccaattgattctctacttttcccttttttgtattatgtgactaattagttggcatattgttaaaagtctctcaaattaggccagattctaaaacatgctgcagcaagaggaccccgctctcttcaggaaaagtgttttcatttctcaggatgcttcttacctgtcagaggaggtgacaaggcagtctcttgctctcttggactcaccaggctcctattgaaggaaccacccccattcctaaatatgtgaaaagtcgcccaaaatgcaaccttgaaaggcactactgactttgttcttattggatactcctcttattatttttccattaaaaataatagctggctattatagaaaatttagaccat

SEQ ID NO: 463421 - DNA, 836 bp, Homo sapiens
aggcatataatgaatacttatgtgagtctcctgagggcagcagatgattggttgtgtttgttgtctcttttctgggtctagccacctagtgactctactcagctccgggctggcactgggggttgtctgcacggagtactgtgatgtgaaccgtctattggtctctcagccatggataccagttcctgttccagtggaggtggtggggagtgcaatggactccagccttcggagagagtgtgactctgatgacactttgattttggacttctggcctcaaaaaccattaagacgacacattcctctgattttaagccaccaagtttgtggcaacttttatggcaagtccagaaaatggatacaaccatgtctgtccctacgttccacagagacctggaaccaaacccagaacttcacttccctgtgccagaaggattccagtgagcttttcccacaggccctacagtcttctccagagtcacactctgtcacccagggtgaagtgcaatggcacaatctcggctcaccacaacctccacctcctgggtttaagagattctcctgcctcagccttccaagtagctgggattacaggcatatgccaccgggtccggaattttgtgtattcacaacaacatttgctgcattggtacagtgtgacagatacagcactgagtactgacaaactggggatataattattaatgaataaaggcaaaagcatgacacttaaggacataatctagtagactgtaatgtgatggtaaggaaatgcatgtatgcatgtgatatatacatatgatatataacatacataaaataaataattatatata

SEQ ID NO: 463422 - DNA, 467 bp, Homo sapiens
gagcttaccccactcccacaagtgacttaggaattcagaatggttcctggtctttgttctcattttgtccttgaatgttgctttcttctttgtttttttgagatggagtttcgctcttgttgcccaggctggagtgcagtgtcacagtctcggctcactgcaacctctgcctcctggatgcaagtgattctcctgcctcagcctcctgagtagctgggattacaagcatgtgccaccatgctcagaattttgtgtattcacaacaacatttgctgcattggtacagtgtgacagatacagcactgagtactgacaaactggggatataattattaatgaataaaggcaaaagcatgacacttaaggacataatctagtagactgtaatgtgatggtaaggaaatgcatgtatgcatgtgatatatacatatgatatataacatacataaaataaataattatatata

SEQ ID NO: 463423 - DNA, 1349 bp, Homo sapiens
aacagagtaagaccctgccgtaataataataacttttttttttttgagatagagttttgctctttcccccagactagagtgcaatggcgcgatcttggctcactgcaacttgtccccccgggttcaagcgattcttctgccacagcctcccgagtagctgggattataggcgcccactaccacgcctggctaatttttgtatttttagtagagacggggtttcgccatgttggcctggctggcctctaactcgtaacctcaggtgatccgcccgccttggcctcccaaagtgctaggattataggcgtgagccactgtgcccagccaataataacttataaaacatgaaacgatttagtgagaaaagtggccggttttttggggggaattactttctgtcataaagaagatagatgggttctcatgtcttctacattcagtctgttgtgcagtcacatatcatgtagactctggaaaacacctctgtatactggtgaaagaatgaaaagaagcaaataatgccttagtatgattatgaaaaacgttttgacttcacagtgccctgaatgggtcttgggaatctccagggatccctcaggcacactttgagaaccaatctatataaagtgatggttcacaatgattctgaagccttagtttcagaatcatttggggcagcttttcaaaaatgccattcctgccacctaccacaaagattctgattcactgtatctgtgatgggtctcagatctctgcatttttaatctcacgtgattcttaagtatgtggtggaagtacctttcttcaggaaattctgtcctaagcttttaccctgagaaaataaaacctgcatgctttcaccatggacggtgggagactccactgaaacacatctgctagaccactaagtttatccttgtcacccagtttgctcttggaaagagtctgttcccttttgtcactgaaccaatcatgacataaacttgtgctttacctcctatagcacagccgagacaaggctggaacatttaattaaggtttttactaaggactcaggaataacaacagggaaatatctatgtaactagatgacctgacataaaatctatcttctgattgcagtctattgtgagaatgctgcttttcctagctcccagccttccatggggcagaaggctcttttaattaggaagagagggaggacaaaggagagccttttcttttgtccattactcttagaaatgaacaggtacataatagaaaataaataattattgttggtaatgtttacacagcagtgttagagcctctctgtagtgaaacaaaaataatgttcttaccaaaaaaaa

SEQ ID NO: 463424 - DNA, 271 bp, Homo sapiens
gtcgactctacagatccttaaaagtgacactcttctatatctacccagagtctagactaggaagtgccacaccaaaaattgtttctaaagcaaagaatattgaagttgaaaataaaaataatttgtctgctgttccactgaacaacttggaacccattactaatatacagatctggttggccaatggaaaaaggattgtccagaaatttaacattactcatagtaaggcgaaagagaatgaaagacgtagatatagaagagtgcacttttg

SEQ ID NO: 463425 - DNA, 3779 bp, Homo sapiens
cggccgcggaacctgaggcggtctggggcggcggcgctccggctctgaagggctccagccaaacggagcccgcggccaaacggtgcctgcggtgcctgagctgagtgaggccgaggccgggaggccgtgcccggagtaaggcgaaagagaatgaaagacgtagataacctcaaaagtataaaagaagaatgggtttgtgaaacaggatctgataatcaacctcttggtaataatcaacaatcaaattgtgaatattttgttgatagcctttttgaggaagctcagaaggttagttccaaatgtgtgtctcccgctgaacagaagaaacaggtagatgtaaatataaaattatggaaaaacggattcaccgtcaacgacgatttcagaagttattccgatggtgccagtcagcagtttttgaactccatcaaaaagggggaattaccttcagaattacagggaatttttgataaagaagaggtggacgttaaagttgaagacaagaaaaatgaaatatgtttgtctacgaagcctgtgttccagcccttttcaggacagggtcacagactaggaagtgccacaccaaaaattgtttctaaagcaaagaatattgaagttgaaaataaaaataatttgtctgctgttccactgaacaacttggaacccattactaatatacagatctggttggccaatggaaaaaggattgtccagaaatttaacattactcatagagtaagccatatcaaagacttcattgaaaaataccaaggatctcaaagaagtcctccgttttccctggcaacagctcttcctgtcctcaggttgctagatgagacactcacactggaagaagcagatttacagaatgctgtcatcattcagagactccaaaaaactgcatcttttagagaactttcagagcactgatttttgatagactaagtggaaaatttgcagagaaatgatggttgtaagtggacatgcaaaccaaaattggggattggagaagtcagactcactagacttttggttcgagtactattgaactctctcctgatgagaagatgtttagataagtacaagttaagaaagtagcatatgactggaaactatattcagtgcactttctccaaaagactacccagaaaaatagacttattttcaaataccagttatcaagatatattaaatagctgtattgtttagaatcttaatatggtataaattagcatatgtattcacaatattcattcagacatcattcccagacagcagggatttatttaaatgttagctgtctgagtttttaaatagctaatacgaccgggtacagtggttcatgcctgtaatcccagaacttcgggaggccgagacaggcagatcacgaggtcaacagattgagaccatcctggcaaacatggtgaaaccccatctctagtaaaaatacaaaaattagctgggcgtggcggtgcgcaactgtagtcccagctactcgggaggctgaggcaggagaatctcttgaacctggcaagtgtaggttgcagtgagctgagattgagcaactgtactccagcttggcgacagagcaagaccccctctcaaaaataaataaaataaagtaaaataaatataaataattgtggccgggtgcaatggctcatgcctgtaatcccagcactttgggaggctgagatgggaggatcacttgaagccaggagtttaaaaccagaatgatcaacagagtgagacccctgtctatatatttttttaatttaaaaaataaaagaataaaattgtgtagctcagtatagtatcaagattaatctgcctactcacatttctacactttataaaaatgtaataaaagaaaattatctttctaaaaagcctattccctttccattttattttctttcaaaaattatggatttgtttttggctaacatttgggattagccattcatttgccaccactcacttagaatataatgccggtgtgtgtcacattactagtattttttaaatgcatcatataaagtatggttttctgtttctttttcgtttgtttgagatggagtttcgctcttgttgcccaggctggagtgcagtggcgcaatctcagctcaccacaacctccacctcccgggttcaagagattctcctgctcagcctcccaagtagctgggattacaggcatgcgccaccatgcttggctaattttgcatttttagtagacacgggatttcaccatgttggtcaggctggtctcgaactcccgacctcaggggatctgcctgcctaggcctcctgaagtgctgggattacaagtgtgaaccaccgtgcccagctggttttctgtttcatacatcagagtcaacttgtgaatacatttaaagattatttcattttgatatcacgaagaaaaacaggctttatatctcagactttaactaaatccagttagacctcaatttttcactgtcagattaaatccccatacctgaaaataagtttaacatttttttttgcaaatgatctattgaatcagatttaaaatgaagcatgcattgagtgtgccaaggaactaagtggtccatagcagcagtaatgttcatagggtgcgagatgcctgctatgaaacagcaactctcaaacatttttatctcaagaccatttgtttatgtgagctatatatattattatattaaatattaaatttttaaaatatttatttatggccactgtgcccagccaataataacttataaaacatgaaacgatttagtgagaaaagtggccggttttttggggggaattactttctgtcataaagaagatagatgggttctcatgtcttctacattcagtctgttgtgcagtcacatatcatgtagactctggaaaacacctctgtatactggtgaaagaatgaaaagaagcaaataatgccttagtatgattatgaaaaacgttttgacttcacagtgccctgaatgggtcttgggaatctccagggatccctcaggcacactttgagaaccaatctatataaagtgatggttcacaatgattctgaagccttagtttcagaatcatttggggcagcttttcaaaaatgccattcctgccacctaccacaaagattctgattcactgtatctgtgatgggtctcagatctctgcatttttaatctcacgtgattcttaagtatgtggtggaagtacctttcttcaggaaattctgtcctaagcttttaccctgagaaaataaaacctgcatgctttcaccatggacggtgggagactccactgaaacacatctgctagaccactaagtttatccttgtcacccagtttgctcttggaaagagtctgttcccttttgtcactgaaccaatcatgacataaacttgtgctttacctcctatagcacagccgagacaaggctggaacatttaattaaggtttttactaaggactcaggaataacaacagggaaatatctatgtaactagatgacctgacataaaatctatcttctgattgcagtctattgtgagaatgctgcttttcctagctcccagccttccatggggcagaaggctcttttaattaggaagagagggaggacaaaggagagccttttcttttgtccattactcttagaaatgaacaggtacataatagaaaataaataattattgttggtaatgtttacacagcagtgttagagcctctctgtagtgaaacaaaaataatgttcttaccaaaaaaaa

SEQ ID NO: 463426 - DNA, 3242 bp, Homo sapiens
tgcgtggcacttacgcaggacaggccacagacaggaagtgccacaccaaaaattgtttctaaagcaaagaatattgaagttgaaaataaaaataatttgtctgctgttccactgaacaacttggaacccattactaatatacagatctggttggccaatggaaaaaggattgtccagaaatttaacattactcatagagtaagccatatcaaagacttcattgaaaaataccaaggatctcaaagaagtcctccgttttccctggcaacagctcttcctgtcctcaggttgctagatgagacactcacactggaagaagcagatttacagaatgctgtcatcattcagagactccaaaaaactgcatcttttagagaactttcagagcactgatttttgatagactaagtggaaaatttgcagagaaatgatggttgtaagtggacatgcaaaccaaaattggggattggagaagtcagactcactagacttttggttcgagtactattgaactctctcctgatgagaagatgtttagataagtacaagttaagaaagtagcatatgactggaaactatattcagtgcactttctccaaaagactacccagaaaaatagacttattttcaaataccagttatcaagatatattaaatagctgtattgtttagaatcttaatatggtataaattagcatatgtattcacaatattcattcagacatcattcccagacagcagggatttatttaaatgttagctgtctgagtttttaaatagctaatacgaccgggtacagtggttcatgcctgtaatcccagaacttcgggaggccgagacaggcagatcacgaggtcaacagattgagaccatcctggcaaacatggtgaaaccccatctctagtaaaaatacaaaaattagctgggcgtggcggtgcgcaactgtagtcccagctactcgggaggctgaggcaggagaatctcttgaacctggcaagtgtaggttgcagtgagctgagattgagcaactgtactccagcttggcgacagagcaagaccccctctcaaaaataaataaaataaagtaaaataaatataaataattgtggccgggtgcaatggctcatgcctgtaatcccagcactttgggaggctgagatgggaggatcacttgaagccaggagtttaaaaccagaatgatcaacagagtgagacccctgtctatatatttttttaatttaaaaaataaaagaataaaattgtgtagctcagtatagtatcaagattaatctgcctactcacatttctacactttataaaaatgtaataaaagaaaattatctttctaaaaagcctattccctttccattttattttctttcaaaaattatggatttgtttttggctaacatttgggattagccattcatttgccaccactcacttagaatataatgccggtgtgtgtcacattactagtattttttaaatgcatcatataaagtatggttttctgtttctttttcgtttgtttgagatggagtttcgctcttgttgcccaggctggagtgcagtggcgcaatctcagctcaccacaacctccacctcccgggttcaagagattctcctgctcagcctcccaagtagctgggattacaggcatgcgccaccatgcttggctaattttgcatttttagtagacacgggatttcaccatgttggtcaggctggtctcgaactcccgacctcaggggatctgcctgcctaggcctcctgaagtgctgggattacaagtgtgaaccaccgtgcccagctggttttctgtttcatacatcagagtcaacttgtgaatacatttaaagattatttcattttgatatcacgaagaaaaacaggctttatatctcagactttaactaaatccagttagacctcaatttttcactgtcagattaaatccccatacctgaaaataagtttaacatttttttttgcaaatgatctattgaatcagatttaaaatgaagcatgcattgagtgtgccaaggaactaagtggtccatagcagcagtaatgttcatagggtgcgagatgcctgctatgaaacagcaactctcaaacatttttatctcaagaccatttgtttatgtgagctatatatattattatattaaatattaaatttttaaaatatttatttatggccactgtgcccagccaataataacttataaaacatgaaacgatttagtgagaaaagtggccggttttttggggggaattactttctgtcataaagaagatagatgggttctcatgtcttctacattcagtctgttgtgcagtcacatatcatgtagactctggaaaacacctctgtatactggtgaaagaatgaaaagaagcaaataatgccttagtatgattatgaaaaacgttttgacttcacagtgccctgaatgggtcttgggaatctccagggatccctcaggcacactttgagaaccaatctatataaagtgatggttcacaatgattctgaagccttagtttcagaatcatttggggcagcttttcaaaaatgccattcctgccacctaccacaaagattctgattcactgtatctgtgatgggtctcagatctctgcatttttaatctcacgtgattcttaagtatgtggtggaagtacctttcttcaggaaattctgtcctaagcttttaccctgagaaaataaaacctgcatgctttcaccatggacggtgggagactccactgaaacacatctgctagaccactaagtttatccttgtcacccagtttgctcttggaaagagtctgttcccttttgtcactgaaccaatcatgacataaacttgtgctttacctcctatagcacagccgagacaaggctggaacatttaattaaggtttttactaaggactcaggaataacaacagggaaatatctatgtaactagatgacctgacataaaatctatcttctgattgcagtctattgtgagaatgctgcttttcctagctcccagccttccatggggcagaaggctcttttaattaggaagagagggaggacaaaggagagccttttcttttgtccattactcttagaaatgaacaggtacataatagaaaataaataattattgttggtaatgtttacacagcagtgttagagcctctctgtagtgaaacaaaaataatgttcttaccaaaaaaaa

SEQ ID NO: 463427 - DNA, 3086 bp, Homo sapiens
gttgagttcctatgtacgtaatttgagataagtaaagataggaaactgctgatttgttttgatgcgaatgcagaaaataatcttgcctaatctgggcctagaagcagttattctctctccatattgggctttgatttgtgctgaaggtcagcttttggctcctccttcctgggatattggaaacaatgccagctctgtggcttctgccctggggactggggacagagtctctctctgtcgccaggctggagtgcagtggcatgatctcggctcactgcaacctccgcctcccaggttcaagcgattcttctgcctcagcctcctgagtagctgggactacagggtttgtgaaacaggatctgataatcaacctcttggtaataatcaacaatcaaattgtgaatattttgttgatagcctttttgaggaagctcagaaggttagttccaaatgtgtgtctcccgctgaacagaagaaacaggtagatgtaaatataaaattatggaaaaacggattcaccgtcaacgacgatttcagaagttattccgatggtgccagtcagcagtttttgaactccatcaaaaagggggaattaccttcagaattacagggaatttttgataaagaagaggtggacgttaaagttgaagacaagaaaaatgaaatatgtttgtctacgaagcctgtgttccagcccttttcaggacagggtcacagactaggaagtgccacaccaaaaattgtttctaaagcaaagaatattgaagttgaaaataaaaataatttgtctgctgttccactgaacaacttggaacccattactaatatacagatctggttggccaatggaaaaaggattgtccagaaatttaacattactcatagagtaagccatatcaaagacttcattgaaaaataccaaggatctcaaagaagtcctccgttttccctggcaacagctcttcctgtcctcaggttgctagatgagacactcacactggaagaagcagatttacagaatgctgtcatcattcagagactccaaaaaactgcatcttttagagaactttcagagcactgatttttgatagactaagtggaaaatttgcagagaaatgatggttgtaagtggacatgcaaaccaaaattggggattggagaagtcagactcactagacttttggttcgagtactattgaactctctcctgatgagaagatgtttagataagtacaagttaagaaagtagcatatgactggaaactatattcagtgcactttctccaaaagactacccagaaaaatagacttattttcaaataccagttatcaagatatattaaatagctgtattgtttagaatcttaatatggtataaattagcatatgtattcacaatattcattcagacatcattcccagacagcagggatttatttaaatgttagctgtctgagtttttaaatagctaatacgaccgggtacagtggttcatgcctgtaatcccagaacttcgggaggccgagacaggcagatcacgaggtcaacaggatttcaccatgttggtcaggctggtctcgaactcccgacctcaggggatctgcctgcctaggcctcctgaagtgctgggattacaagtgtgaaccaccgtgcccagctggttttctgtttcatacatcagagtcaacttgtgaatacatttaaagattatttcattttgatatcacgaagaaaaacaggctttatatctcagactttaactaaatccagttagacctcaatttttcactgtcagattaaatccccatacctgaaaataagtttaacatttttttttgcaaatgatctattgaatcagatttaaaatgaagcatgcattgagtgtgccaaggaactaagtggtccatagcagcagtaatgttcatagggtgcgagatgcctgctatgaaacagcaactctcaaacatttttatctcaagaccatttgtttatgtgagctatatatattattatattaaatattaaatttttaaaatatttatttatggccactgtgcccagccaataataacttataaaacatgaaacgatttagtgagaaaagtggccggttttttggggggaattactttctgtcataaagaagatagatgggttctcatgtcttctacattcagtctgttgtgcagtcacatatcatgtagactctggaaaacacctctgtatactggtgaaagaatgaaaagaagcaaataatgccttagtatgattatgaaaaacgttttgacttcacagtgccctgaatgggtcttgggaatctccagggatccctcaggcacactttgagaaccaatctatataaagtgatggttcacaatgattctgaagccttagtttcagaatcatttggggcagcttttcaaaaatgccattcctgccacctaccacaaagattctgattcactgtatctgtgatgggtctcagatctctgcatttttaatctcacgtgattcttaagtatgtggtggaagtacctttcttcaggaaattctgtcctaagcttttaccctgagaaaataaaacctgcatgctttcaccatggacggtgggagactccactgaaacacatctgctagaccactaagtttatccttgtcacccagtttgctcttggaaagagtctgttcccttttgtcactgaaccaatcatgacataaacttgtgctttacctcctatagcacagccgagacaaggctggaacatttaattaaggtttttactaaggactcaggaataacaacagggaaatatctatgtaactagatgacctgacataaaatctatcttctgattgcagtctattgtgagaatgctgcttttcctagctcccagccttccatggggcagaaggctcttttaattaggaagagagggaggacaaaggagagccttttcttttgtccattactcttagaaatgaacaggtacataatagaaaataaataattattgttggtaatgtttacacagcagtgttagagcctctctgtagtgaaacaaaaataatgttcttaccaaaaaaaa

SEQ ID NO: 463428 - DNA, 2291 bp, Homo sapiens
ttttcttttttttttttttgagacagagtctcgctctgttgcccaggctggagttgcagtgagctgagattgagcaactgtactccagcttggcgacagagcaagaccccctctcaaaaataaataaaataaagtaaaataaatataaataattgtggccgggtgcaatggctcatgcctgtaatcccagcactttgggaggctgagatgggaggatcacttgaagccaggagtttaaaaccagaatgatcaacagagtgagacccctgtctatatatttttttaatttaaaaaataaaagaataaaattgtgtagctcagtatagtatcaagattaatctgcctactcacatttctacactttataaaaatgtaataaaagaaaattatctttctaaaaagcctattccctttccattttattttctttcaaaaattatggatttgtttttggctaacatttgggattagccattcatttgccaccactcacttagaatataatgccggtgtgtgtcacattactagtattttttaaatgcatcatataaagtatggttttctgtttctttttcgtttgtttgagatggagtttcgctcttgttgcccaggctggagtgcagtggcgcaatctcagctcaccacaacctccacctcccgggttcaagagattctcctgctcagcctcccaagtagctgggattacaggcatgcgccaccatgcttggctaattttgcatttttagtagacacgggatttcaccatgttggtcaggctggtctcgaactcccgacctcaggggatctgcctgcctaggcctcctgaagtgctgggattacaagtgtgaaccaccgtgcccagctggttttctgtttcatacatcagagtcaacttgtgaatacatttaaagattatttcattttgatatcacgaagaaaaacaggctttatatctcagactttaactaaatccagttagacctcaatttttcactgtcagattaaatccccatacctgaaaataagtttaacatttttttttgcaaatgatctattgaatcagatttaaaatgaagcatgcattgagtgtgccaaggaactaagtggtccatagcagcagtaatgttcatagggtgcgagatgcctgctatgaaacagcaactctcaaacatttttatctcaagaccatttgtttatgtgagctatatatattattatattaaatattaaatttttaaaatatttatttatggccactgtgcccagccaataataacttataaaacatgaaacgatttagtgagaaaagtggccggttttttggggggaattactttctgtcataaagaagatagatgggttctcatgtcttctacattcagtctgttgtgcagtcacatatcatgtagactctggaaaacacctctgtatactggtgaaagaatgaaaagaagcaaataatgccttagtatgattatgaaaaacgttttgacttcacagtgccctgaatgggtcttgggaatctccagggatccctcaggcacactttgagaaccaatctatataaagtgatggttcacaatgattctgaagccttagtttcagaatcatttggggcagcttttcaaaaatgccattcctgccacctaccacaaagattctgattcactgtatctgtgatgggtctcagatctctgcatttttaatctcacgtgattcttaagtatgtggtggaagtacctttcttcaggaaattctgtcctaagcttttaccctgagaaaataaaacctgcatgctttcaccatggacggtgggagactccactgaaacacatctgctagaccactaagtttatccttgtcacccagtttgctcttggaaagagtctgttcccttttgtcactgaaccaatcatgacataaacttgtgctttacctcctatagcacagccgagacaaggctggaacatttaattaaggtttttactaaggactcaggaataacaacagggaaatatctatgtaactagatgacctgacataaaatctatcttctgattgcagtctattgtgagaatgctgcttttcctagctcccagccttccatggggcagaaggctcttttaattaggaagagagggaggacaaaggagagccttttcttttgtccattactcttagaaatgaacaggtacataatagaaaataaataattattgttggtaatgtttacacagcagtgttagagcctctctgtagtgaaacaaaaataatgttcttaccaaaaaaaa

SEQ ID NO: 463429 - DNA, 2210 bp, Homo sapiens
gagacggagtcctgctctgtcgcccaggctggagtgcagtggcgcaatctcggctcactgcaacctctgcctcccaggttcaagcgattctcctgcctcagcctcccagcactttgggaggctgagatgggaggatcacttgaagccaggagtttaaaaccagaatgatcaacagagtgagacccctgtctatatatttttttaatttaaaaaataaaagaataaaattgtgtagctcagtatagtatcaagattaatctgcctactcacatttctacactttataaaaatgtaataaaagaaaattatctttctaaaaagcctattccctttccattttattttctttcaaaaattatggatttgtttttggctaacatttgggattagccattcatttgccaccactcacttagaatataatgccggtgtgtgtcacattactagtattttttaaatgcatcatataaagtatggttttctgtttctttttcgtttgtttgagatggagtttcgctcttgttgcccaggctggagtgcagtggcgcaatctcagctcaccacaacctccacctcccgggttcaagagattctcctgctcagcctcccaagtagctgggattacaggcatgcgccaccatgcttggctaattttgcatttttagtagacacgggatttcaccatgttggtcaggctggtctcgaactcccgacctcaggggatctgcctgcctaggcctcctgaagtgctgggattacaagtgtgaaccaccgtgcccagctggttttctgtttcatacatcagagtcaacttgtgaatacatttaaagattatttcattttgatatcacgaagaaaaacaggctttatatctcagactttaactaaatccagttagacctcaatttttcactgtcagattaaatccccatacctgaaaataagtttaacatttttttttgcaaatgatctattgaatcagatttaaaatgaagcatgcattgagtgtgccaaggaactaagtggtccatagcagcagtaatgttcatagggtgcgagatgcctgctatgaaacagcaactctcaaacatttttatctcaagaccatttgtttatgtgagctatatatattattatattaaatattaaatttttaaaatatttatttatggccactgtgcccagccaataataacttataaaacatgaaacgatttagtgagaaaagtggccggttttttggggggaattactttctgtcataaagaagatagatgggttctcatgtcttctacattcagtctgttgtgcagtcacatatcatgtagactctggaaaacacctctgtatactggtgaaagaatgaaaagaagcaaataatgccttagtatgattatgaaaaacgttttgacttcacagtgccctgaatgggtcttgggaatctccagggatccctcaggcacactttgagaaccaatctatataaagtgatggttcacaatgattctgaagccttagtttcagaatcatttggggcagcttttcaaaaatgccattcctgccacctaccacaaagattctgattcactgtatctgtgatgggtctcagatctctgcatttttaatctcacgtgattcttaagtatgtggtggaagtacctttcttcaggaaattctgtcctaagcttttaccctgagaaaataaaacctgcatgctttcaccatggacggtgggagactccactgaaacacatctgctagaccactaagtttatccttgtcacccagtttgctcttggaaagagtctgttcccttttgtcactgaaccaatcatgacataaacttgtgctttacctcctatagcacagccgagacaaggctggaacatttaattaaggtttttactaaggactcaggaataacaacagggaaatatctatgtaactagatgacctgacataaaatctatcttctgattgcagtctattgtgagaatgctgcttttcctagctcccagccttccatggggcagaaggctcttttaattaggaagagagggaggacaaaggagagccttttcttttgtccattactcttagaaatgaacaggtacataatagaaaataaataattattgttggtaatgtttacacagcagtgttagagcctctctgtagtgaaacaaaaataatgttcttaccaaaaaaaa

SEQ ID NO: 463430 - DNA, 682 bp, Homo sapiens
cggccgcggaacctgaggcggtctggggcggcggcgctccggctctgaagggctccagccaaacggagcccgcggccaaacggtgcctgcggtgcctgagctgagtgaggccgaggccgggaggccgtgcccggagtaaggcgaaagagaatgaaagacgtagataacctcaaaagtataaaagaagaatgggtttgtgaaacaggatctgataatcaacctcttggtaataatcaacaatcaaattgtgaatattttgttgatagcctttttgaggaagctcagaaggttagttccaaatgtgtgtctcccgctgaacagaagaaacaggtagatgtaaatataaaattatggaaaaacggattcaccgtcaacgacgatttcagaagttattccgatggtgccagtcagcagtttttgaactccatcaaaaaggggtgagtagccaggtgtggtaggtcaagcctgtaaacccaaaactttggcaggctgtggcgagaggattgcctgagctcaggagttcaaggccagccggggaacatagccagacctcatctctacttaaaaaaagaaaattaccagccagcccagctactcaggattgcttgcacttgggagactgaggctacagtgagccatgcttgcactactgcactccagcctgggcaacagcacgatgccc

SEQ ID NO: 463431 - DNA, 3210 bp, Homo sapiens
gttgagttcctatgtacgtaatttgagataagtaaagataggaaactgctgatttgttttgatgcgaatgcagaaaataatcttgcctaatctgggcctagaagcagttattctctctccatattgggctttgatttgtgctgaaggtcagcttttggctcctccttcctgggatattggaaacaatgccagctctgtggcttctgccctggggactggggacagagtctctctctgtcgccaggctggagtgcagtggcatgatctcggctcactgcaacctccgcctcccaggttcaagcgattcttctgcctcagcctcctgagtagctgggactacagggtttgtgaaacaggatctgataatcaacctcttggtaataatcaacaatcaaattgtgaatattttgttgatagcctttttgaggaagctcagaaggttagttccaaatgtgtgtctcccgctgaacagaagaaacaggtagatgtaaatataaaattatggaaaaacggattcaccgtcaacgacgatttcagaagttattccgatggtgccagtcagcagtttttgaactccatcaaaaagggggaattaccttcagaattacagggaatttttgataaagaagaggtggacgttaaagttgaagacaagaaaaatgaaatatgtttgtctacgaagcctgtgttccagcccttttcaggacagggtcacagactaggaagtgccacaccaaaaattgtttctaaagcaaagaatattgaagttgaaaataaaaataatttgtctgctgttccactgaacaacttggaacccattactaatatacagatctggttggccaatggaaaaaggattgtccagaaatttaacattactcatagagtaagccatatcaaagacttcattgaaaaataccaaggatctcaaagaagtcctccgttttccctggcaacagctcttcctgtcctcaggttgctagatgagacactcacactggaagaagcagatttacagaatgctgtcatcattcagagactccaaaaaactgcatcttttagagaactttcagagcactgatttttgatagactaagtggaaaatttgcagagaaatgatggttgtaagtggacatgcaaaccaaaattggggattggagaagtcagactcactagacttttggttcgagtactattgaactctctcctgatgagaagatgtttagataagtacaagttaagaaagtagcatatgactggaaactatattcagtgcactttctccaaaagactacccagaaaaatagacttattttcaaataccagttatcaagatatattaaatagctgtattgtttagaatcttaatatggtataaattagcatatgtattcacaatattcattcagacatcattcccagacagcagggatttatttaaatgttagctgtctgagtttttaaatagctaatacgaccgggtacagtggttcatgcctgtaatcccagaacttcgggaggccgagacaggcagatcacgaggtcaacagattgagaccatcctggcaaacatggtgaaaccccatctctagtaaaaatacaaaaattagctgggcgtggcggtgcgcaactgtagtcccagctactcgggaggctgaggcaggagaatctcttgaacctggcaagtgtaggttgcagtgagctgagattgagcaactgtactccagcttggcgacagagcaagaccccctctcaaaaataaataaaataaagtaaaataaatataaataattgtggccgggtgcaatggctcatgcctgtaatcccagcactttgggaggctgagatgggaggatcacttgaagccaggagtttaaaaccagaatgatcaacagagtgagacccctgtctatatatttttttaatttaaaaaataaaagaataaaattgtgtagctcagtatagtatcaagattaatctgcctactcacatttctacactttataaaaatgtaataaaagaaaattatctttctaaaaagcctattccctttccattttattttctttcaaaaattatggatttgtttttggctaacatttgggattagccattcatttgccaccactcacttagaatataatgccggtgtgtgtcacattactagtattttttaaatgcatcatataaagtatggttttctgtttctttttcgtttgtttgagatggagtttcgctcttgttgcccaggctggagtgcagtggcgcaatctcagctcaccacaacctccacctcccgggttcaagagattctcctgctcagcctcccaagtagctgggattacaggcatgcgccaccatgcttggctaattttgcatttttagtagacacgggatttcaccatgttggtcaggctggtctcgaactcccgacctcaggggatctgcctgcctaggcctcctgaagtgctgggattacaagtgtgaaccaccgtgcccagctggttttctgtttcatacatcagagtcaacttgtgaatacatttaaagattatttcattttgatatcacgaagaaaaacaggctttatatctcagactttaactaaatccagttagacctcaatttttcactgtcagattaaatccccatacctgaaaataagtttaacatttttttttgcaaatgatctattgaatcagatttaaaatgaagcatgcattgagtgtgccaaggaactaagtggtccatagcagcagtaatgttcatagggtgcgagatgcctgctatgaaacagcaactctcaaacatttttatctcaagaccatttgtttatgtgagctatatatattattatattaaatattaaatttttaaaatatttatttatgggccaggcacgggtgttacgcctgtaatcccagcactttgggaggctgaggcaggcggatcacaaggtcaagtgattgagaccatcctgtccaacatggtgaatccccgtctctactaaaaatacaaaaaaaattagctgggtgtggtggcatgcgcctgtagtcccagctacgtgggaggctgagggaggagaatggcttgaacccgggaggtggaggtttcagtgagccgagattgcgcccctgcactccagcctggtctatgatgcatttttagttaatgtgtacccctgttactggtggaaggtatctgagtcac

SEQ ID NO: 463432 - DNA, 3930 bp, Homo sapiens
gttgagttcctatgtacgtaatttgagataagtaaagataggaaactgctgatttgttttgatgcgaatgcagaaaataatcttgcctaatctgggcctagaagcagttattctctctccatattgggctttgatttgtgctgaaggtcagcttttggctcctccttcctgggatattggaaacaatgccagctctgtggcttctgccctggggactggggacagagtctctctctgtcgccaggctggagtgcagtggcatgatctcggctcactgcaacctccgcctcccaggttcaagcgattcttctgcctcagcctcctgagtagctgggactacagggtttgtgaaacaggatctgataatcaacctcttggtaataatcaacaatcaaattgtgaatattttgttgatagcctttttgaggaagctcagaaggttagttccaaatgtgtgtctcccgctgaacagaagaaacaggtagatgtaaatataaaattatggaaaaacggattcaccgtcaacgacgatttcagaagttattccgatggtgccagtcagcagtttttgaactccatcaaaaagggggaattaccttcagaattacagggaatttttgataaagaagaggtggacgttaaagttgaagacaagaaaaatgaaatatgtttgtctacgaagcctgtgttccagcccttttcaggacagggtcacagactaggaagtgccacaccaaaaattgtttctaaagcaaagaatattgaagttgaaaataaaaataatttgtctgctgttccactgaacaacttggaacccattactaatatacagatctggttggccaatggaaaaaggattgtccagaaatttaacattactcatagagtaagccatatcaaagacttcattgaaaaataccaaggatctcaaagaagtcctccgttttccctggcaacagctcttcctgtcctcaggttgctagatgagacactcacactggaagaagcagatttacagaatgctgtcatcattcagagactccaaaaaactgcatcttttagagaactttcagagcactgatttttgatagactaagtggaaaatttgcagagaaatgatggttgtaagtggacatgcaaaccaaaattggggattggagaagtcagactcactagacttttggttcgagtactattgaactctctcctgatgagaagatgtttagataagtacaagttaagaaagtagcatatgactggaaactatattcagtgcactttctccaaaagactacccagaaaaatagacttattttcaaataccagttatcaagatatattaaatagctgtattgtttagaatcttaatatggtataaattagcatatgtattcacaatattcattcagacatcattcccagacagcagggatttatttaaatgttagctgtctgagtttttaaatagctaatacgaccgggtacagtggttcatgcctgtaatcccagaacttcgggaggccgagacaggcagatcacgaggtcaacagattgagaccatcctggcaaacatggtgaaaccccatctctagtaaaaatacaaaaattagctgggcgtggcggtgcgcaactgtagtcccagctactcgggaggctgaggcaggagaatctcttgaacctggcaagtgtaggttgcagtgagctgagattgagcaactgtactccagcttggcgacagagcaagaccccctctcaaaaataaataaaataaagtaaaataaatataaataattgtggccgggtgcaatggctcatgcctgtaatcccagcactttgggaggctgagatgggaggatcacttgaagccaggagtttaaaaccagaatgatcaacagagtgagacccctgtctatatatttttttaatttaaaaaataaaagaataaaattgtgtagctcagtatagtatcaagattaatctgcctactcacatttctacactttataaaaatgtaataaaagaaaattatctttctaaaaagcctattccctttccattttattttctttcaaaaattatggatttgtttttggctaacatttgggattagccattcatttgccaccactcacttagaatataatgccggtgtgtgtcacattactagtattttttaaatgcatcatataaagtatggttttctgtttctttttcgtttgtttgagatggagtttcgctcttgttgcccaggctggagtgcagtggcgcaatctcagctcaccacaacctccacctcccgggttcaagagattctcctgctcagcctcccaagtagctgggattacaggcatgcgccaccatgcttggctaattttgcatttttagtagacacgggatttcaccatgttggtcaggctggtctcgaactcccgacctcaggggatctgcctgcctaggcctcctgaagtgctgggattacaagtgtgaaccaccgtgcccagctggttttctgtttcatacatcagagtcaacttgtgaatacatttaaagattatttcattttgatatcacgaagaaaaacaggctttatatctcagactttaactaaatccagttagacctcaatttttcactgtcagattaaatccccatacctgaaaataagtttaacatttttttttgcaaatgatctattgaatcagatttaaaatgaagcatgcattgagtgtgccaaggaactaagtggtccatagcagcagtaatgttcatagggtgcgagatgcctgctatgaaacagcaactctcaaacatttttatctcaagaccatttgtttatgtgagctatatatattattatattaaatattaaatttttaaaatatttatttatggccactgtgcccagccaataataacttataaaacatgaaacgatttagtgagaaaagtggccggttttttggggggaattactttctgtcataaagaagatagatgggttctcatgtcttctacattcagtctgttgtgcagtcacatatcatgtagactctggaaaacacctctgtatactggtgaaagaatgaaaagaagcaaataatgccttagtatgattatgaaaaacgttttgacttcacagtgccctgaatgggtcttgggaatctccagggatccctcaggcacactttgagaaccaatctatataaagtgatggttcacaatgattctgaagccttagtttcagaatcatttggggcagcttttcaaaaatgccattcctgccacctaccacaaagattctgattcactgtatctgtgatgggtctcagatctctgcatttttaatctcacgtgattcttaagtatgtggtggaagtacctttcttcaggaaattctgtcctaagcttttaccctgagaaaataaaacctgcatgctttcaccatggacggtgggagactccactgaaacacatctgctagaccactaagtttatccttgtcacccagtttgctcttggaaagagtctgttcccttttgtcactgaaccaatcatgacataaacttgtgctttacctcctatagcacagccgagacaaggctggaacatttaattaaggtttttactaaggactcaggaataacaacagggaaatatctatgtaactagatgacctgacataaaatctatcttctgattgcagtctattgtgagaatgctgcttttcctagctcccagccttccatggggcagaaggctcttttaattaggaagagagggaggacaaaggagagccttttcttttgtccattactcttagaaatgaacaggtacataatagaaaataaataattattgttggtaatgtttacacagcagtgttagagcctctctgtagtgaaacaaaaataatgttcttaccaaaaaaaa

SEQ ID NO: 463433 - DNA, 3488 bp, Homo sapiens
gttgagttcctatgtacgtaatttgagataagtaaagataggaaactgctgatttgttttgatgcgaatgcagaaaataatcttgcctaatctgggcctagaagcagttattctctctccatattgggctttgatttgtgctgaaggtcagcttttggctcctccttcctgggatattggaaacaatgccagctctgtggcttctgccctggggactggggacagagtctctctctgtcgccaggctggagtgcagtggcatgatctcggctcactgcaacctccgcctcccaggttcaagcgattcttctgcctcagcctcctgagtagctgggactacagggtttgtgaaacaggatctgataatcaacctcttggtaataatcaacaatcaaattgtgaatattttgttgatagcctttttgaggaagctcagaaggttagttccaaatgtgtgtctcccgctgaacagaagaaacaggtagatgtaaatataaaattatggaaaaacggattcaccgtcaacgacgatttcagaagttattccgatggtgccagtcagcagtttttgaactccatcaaaaagggggaattaccttcagaattacagggaatttttgataaagaagaggtggacgttaaagttgaagacaagaaaaatgaaatatgtttgtctacgaagcctgtgttccagcccttttcaggacagggtcacagactaggaagtgccacaccaaaaattgtttctaaagcaaagaatattgaagttgaaaataaaaataatttgtctgctgttccactgaacaacttggaacccattactaatatacagatctggttggccaatggaaaaaggattgtccagaaatttaacattactcatagagtaagccatatcaaagacttcattgaaaaataccaaggatctcaaagaagtcctccgttttccctggcaacagctcttcctgtcctcaggttgctagatgagacactcacactggaagaagcagatttacagaatgctgtcatcattcagagactccaaaaaactgcatcttttagagaactttcagagcactgatttttgatagactaagtggaaaatttgcagagaaatgatggttgtaagtggacatgcaaaccaaaattggggattggagaagtcagactcactagacttttggttcgagtactattgaactctctcctgatgagaagatgtttagataagtacaagttaagaaagtagcatatgactggaaactatattcagtgcactttctccaaaagactacccagaaaaatagacttattttcaaataccagttatcaagatatattaaatagctgtattgtttagaatcttaatatggtataaattagcatatgtattcacaatattcattcagacatcattcccagacagcagggatttatttaaatgttagctgtctgagtttttaaatagctaatacgaccgggtacagtggttcatgcctgtaatcccagaacttcgggaggccgagacaggcagatcacgaggtcaacagattgagaccatcctggcaaacatggtgaaaccccatctctagtaaaaatacaaaaattagctgggcgtggcggtgcgcaactgtagtcccagctactcgggaggctgaggcaggagaatctcttgaacctggcaagtgtaggttgcagtgagctgagattgagcaactgtactccagcttggcgacagagcaagaccccctctcaaaaataaataaaataaagtaaaataaatataaataattgtggccgggtgcaatggctcatgcctgtaatcccagcactttgggaggctgagatgggaggatcacttgaagccaggagtttaaaaccagaatgatcaacagagtgagacccctgtctatatatttttttaatttaaaaaataaaagaataaaattgtgtagctcagtatagtatcaagattaatctgcctactcacatttctacactttataaaaatgtaataaaagaaaattatctttctaaaaagcctattccctttccattttattttctttcaaaaattatggatttgtttttggctaacatttgggattagccattcatttgccaccactcacttagaatataatgccggtgtgtgtcacattactagtattttttaaatgcatcatataaagtatggttttctgtttctttttcgtttgtttgagatggagtttcgctcttgttgcccaggctggagtgcagtggcgcaatctcagctcaccacaacctccacctcccgggttcaagagattctcctgctcagcctcccaagtagctgggattacaggcatgcgccaccatgcttggctaattttgcatttttagtagacacgggatttcaccatgttggtcaggctggtctcgaactcccgacctcaggggatctgcctgcctaggcctcctgaagtgctgggattacaagtgtgaaccaccgtgcccagctggttttctgtttcatacatcagagtcaacttgtgaatacatttaaagattatttcattttgatatcacgaagaaaaacaggctttatatctcagactttaactaaatccagttagacctcaatttttcactgtcagattaaatccccatacctgaaaataagtttaacatttttttttgcaaatgatctattgaatcagatttaaaatgaagcatgcattgagtgtgccaaggaactaagtggtccatagcagcagtaatgttcatagggtgcgagatgcctgctatgaaacagcaactctcaaacatttttatctcaagaccatttgtttatgtgagctatatatattattatattaaatattaaatttttaaaatatttatttatggccactgtgcccagccaataataacttaagtatgtggtggaagtacctttcttcaggaaattctgtcctaagcttttaccctgagaaaataaaacctgcatgctttcaccatggacggtgggagactccactgaaacacatctgctagaccactaagtttatccttgtcacccagtttgctcttggaaagagtctgttcccttttgtcactgaaccaatcatgacataaacttgtgctttacctcctatagcacagccgagacaaggctggaacatttaattaaggtttttactaaggactcaggaataacaacagggaaatatctatgtaactagatgacctgacataaaatctatcttctgattgcagtctattgtgagaatgctgcttttcctagctcccagccttccatggggcagaaggctcttttaattaggaagagagggaggacaaaggagagccttttcttttgtccattactcttagaaatgaacaggtacataatagaaaataaataattattgttggtaatgtttacacagcagtgttagagcctctctgtagtgaaacaaaaataatgttcttaccaaaaaaaa

SEQ ID NO: 463434 - DNA, 3173 bp, Homo sapiens
gttgagttcctatgtacgtaatttgagataagtaaagataggaaactgctgatttgttttgatgcgaatgcagaaaataatcttgcctaatctgggcctagaagcagttattctctctccatattgggctttgatttgtgctgaaggtcagcttttggctcctccttcctgggatattggaaacaatgccagctctgtggcttctgccctggggactggggacagagtctctctctgtcgccaggctggagtgcagtggcatgatctcggctcactgcaacctccgcctcccaggttcaagcgattcttctgcctcagcctcctgagtagctgggactacagggtttgtgaaacaggatctgataatcaacctcttggtaataatcaacaatcaaattgtgaatattttgttgatagcctttttgaggaagctcagaaggttagttccaaatgtgtgtctcccgctgaacagaagaaacaggtagatgtaaatataaaattatggaaaaacggattcaccgtcaacgacgatttcagaagttattccgatggtgccagtcagcagtttttgaactccatcaaaaagggggaattaccttcagaattacagggaatttttgataaagaagaggtggacgttaaagttgaagacaagaaaaatgaaatatgtttgtctacgaagcctgtgttccagcccttttcaggacagggtcacagactaggaagtgccacaccaaaaattgtttctaaagcaaagaatattgaagttgaaaataaaaataatttgtctgctgttccactgaacaacttggaacccattactaatatacagatctggttggccaatggaaaaaggattgtccagaaatttaacattactcatagagtaagccatatcaaagacttcattgaaaaataccaaggatctcaaagaagtcctccgttttccctggcaacagctcttcctgtcctcaggttgctagatgagacactcacactggaagaagcagatttacagaatgctgtcatcattcagagactccaaaaaactgcatcttttagagaactttcagagcactgatttttgatagactaagtggaaaatttgcagagaaatgatggttgtaagtggacatgcaaaccaaaattggggattggagaagtcagactcactagacttttggttcgagtactattgaactctctcctgatgagaagatgtttagataagtacaagttaagaaagtagcatatgactggaaactatattcagtgcactttctccaaaagactacccagaaaaatagacttattttcaaataccagttatcaagatatattaaatagctgtattgtttagaatcttaatatggtataaattagcatatgtattcacaatattcattcagacatcattcccagacagcagggatttatttaaatgttagctgtctgagtttttaaatagctaatacgaccgggtacagtggttcatgcctgtaatcccagaacttcgggaggccgagacaggcagatcacgaggtcaacagattgagaccatcctggcaaacatggtgaaaccccatctctagtaaaaatacaaaaattagctgggcgtggcggtgcgcaactgtagtcccagctactcgggaggctgaggcaggagaatctcttgaacctggcaagtgtaggttgcagtgagctgagattgagcaactgtactccagcttggcgacagagcaagaccccctctcaaaaataaataaaataaagtaaaataaatataaataattgtggccgggtgcaatggctcatgcctgtaatcccagcactttgggaggctgagatgggaggatcacttgaagccaggagtttaaaaccagaatgatcaacagagtgagacccctgtctatatatttttttaatttaaaaaataaaagaataaaattgtgtagctcagtatagtatcaagattaatctgcctactcacatttctacactttataaaaatgtaataaaagaaaattatctttctaaaaagcctattccctttccattttattttctttcaaaaattatggatttgtttttggctaacatttgggattagccattcatttgccaccactcacttagaatataatgccggtgtgtgtcacattactagtattttttaaatgcatcatataaagtatggttttctgtttctttttcgtttgtttgagatggagtttcgctcttgttgcccaggctggagtgcagtggcgcaatctcagctcaccacaacctccacctcccgggttcaagagattctcctgctcagcctcccaagtagctgggattacaggcatgcgccaccatgcttggctaattttgcatttttagtagacacgggatttcaccatgttggtcaggctggtctcgaactcccgacctcaggggatctgcctgcctaggcctcctgaagtgctgggattacaagtgtgaaccaccgtgcccagctggttttctgtttcatacatcagagtcaacttgtgaatacatttaaagattatttcattttgatatcacgaagaaaaacaggctttatatctcagactttaactaaatccagttagacctcaatttttcactgtcagattaaatccccatacctgaaaataagtttaacatttttttttgcaaatgatctattgaatcagatttaaaatgaagcatgcattgagtgtgccaaggaactaagtggtccatagcagcagtaatgttcatagggtgcgagatgcctgctatgaaacagcaactctcaaacatttttatctcaagaccatttgtttatgtgagctatatatattattatattaaatattaaatttttaaaatatttatttatgggccaggcacgggtgttacgcctgtaatcccagcactttgggaggctgaggcaggcggatcacaaggtcaagtgattgagaccatcctgtccaacatggtgaatccccgtctctactaaaaatacaaaaaaaattagctgggtgtggtggcatgcgcctgtagtcccagctacgtgggaggctgagggaggagaatggcttgaacccgggaggtggaggtttcagtgagccgagattgcgcccctgcactccagcctggtgacggagcgagactctttctca

SEQ ID NO: 463435 - DNA, 738 bp, Homo sapiens
tacatccccagaaatggtttgtcctgcttctgctatttttaaaaagcactctgtttaggtagtagttgagagcacagacttgggagccaaactgcttaaacacatcaaaaatgtgccaggctgtgaccattgtgcagaagaaggcaacatgcccagcttccagaagaggccgatgcacaggccagcagttacagtgccaggtggtgactccttcgtttctggactcagggcctgatcctggccccagatctgacaagcggcagggccttggccaggtcactcctgcaggccacaccatttgtgacacctgtgacatgagaagtaaggccctgtgcctgccaggagcggcacggcacctgcagcagcacagccaccaagcacagccacagtcccagcacccatgtgccgggcaggggttctggaccgagacactactgacatgtggggctgggtcattcttcggtgtggcgctggctggtgcaccgcttagtggcatccctggcctctgcccactagacgctagaacccacccccagacattcccaaatgtcaccatctggcagagagaatggcagaatcacccccagaagtggacaactgccacagagcagttctgagaaaaggctcctccttcctgaagaaggtgaagatccgaattctgacaccaaacacacacaaatacgcacgcatgcacacgtgcaggaagctagcaggagggaggtgccccgcacaaatctg

SEQ ID NO: 463436 - DNA, 800 bp, Homo sapiens
cttcccatagacctgtttaaaatttctttcctctcgtcttccacacctaattttactattgtcttatttcactaggcaaagtttcaatgttcttgaaatatggatgttaaaacactcaggagattgctttcattggagaacaaatcttaggctgcaaatctagtatcacctgcatagtacttacatgtagaaatttcagattcagaactcaatcaaaatgcatatttcaagtgttatattaatgtgtttcttttatatttaggtgttttcattcacggattatttctggatggagcttcctggaatagaaagatcaagaaacttgcagaatcgcatcccaaaattctttatgatacagtgcctgtgatgtggctaaagccctgtaagagggcagatataccaaaacggccaagttatgttgctccattgtataagacaagtgagcggagaggagtattatccaccactggccattccacgaattttgtgattgccatgactcttccctctgaccaacccaaggaacactggattggacgaggtgtagcactgttatgtcaacttaattcataaccagaagacatcatttccttgttcctatttcttgttggctggctgagtagagaaagcatattattttactacttaaacctttttttttgtttgtttaaatacatttgactaaagttataattatgaatttacttatgagcaaatgcagctaaacttaatatgactcatacttaaatgtaaggaaatgttctgaaataaataaagactaaagaaaacaaaatggcata

SEQ ID NO: 463437 - DNA, 4611 bp, Homo sapiens
  misc_feature (2265)..(2265): n is a, c, g, or t
cgaattaatctccaccttcaaactgttgttagaaaagaaaagaagtgaagtaatgaaaatgaaaaagagatatgaagtgggtttggagaaactggattctgcttcatctcaagtagccacaatgcagatggagttggaggcactacatcctcaattaaaagttgctagcaaagaggttgatgaaatgatgataatgattgagaaagagtctgtagaagttgccaaaactgaaaaaatagtgaaagctgatgaaacaatagcgaatgaacaagctatggcttccaaagccatcaaagatgagtgcgatgctgacctggcaggtgccttgccaatattagagtcagcactggccgcccttgatactcttactgcacaggatattacagtggtaaaatccatgaagagtcctcctgctggtgtcaagcttgttatggaagctatatgcatcttgaaaggaatcaaagctgacaaaatccctgacccaacaggttcagggaaaaaaattgaggatttctggggcccagctaagagacttcttggtgacatgaggtttctgcagtcacttcatgaatatgacaaggacaatattcctccagcttatatgaatatcataagaaaaaattatattccaaatccagattttgtaccagaaaaaatcagaaatgcttctacagcggccgaaggtctgtgcaaatgggtcatagcaatggattcatatgataaagtggcaaaaatagtagctcccaaaaagataaaactggctgcagctgaaggggagcttaaaattgccatggatggtcttagaaagaagcaggcagcccttaaggaagttcaggacaagctggccaggcttcaagacacacttgaattaaataaacaaaagaaggctgacctggaaaaccaggttgacctttgcagcaaaaaactagaacgagctgaacagttgattggaggccttggaggtgagaaaactcgatggagccacacagctctggagctaggtcagctgtacatcaacttgactggggatatcctcatttcctccggagtggttgcttacctcggagccttcacatccacctatagacagaatcaaactaaagagtggacaactttgtgcaaaggaagagatatcccctgctcagatgattgctctcttatgggtaccctgggagaagctgtgacaattcgaacttggaatattgctggattaccttctgactcattttccattgataatgggataatcataatgaatgcaagaaggtggcctctgatgatagatcctcaaagtcaggctaataaatggatcaagaacatggaaaaagccaatagtctttatgtgattaaacttagtgaacctgactatgtcaggactctggaaaattgcatccagtttggtactcctgtgttgctagaaaatgttggcgaagaactagatcctattttggaacctcttctactaaaacaaacctttaagcagggtgggagtacatgtatccggcttggggactccacaattgaatatgcacctgacttccgcttctatattactaccaagttaagaaatcctcattatcttcctgaaacatcagtaaaggtaacattattaaacttcatgataacccctgagggaatgcaagatcagcttctgggaattgtggtggcacaagaaaggccagaccttgaagaagaaaagcaagccttgatattacaaggagctgaaaataaaaggcagttaaaagaaatagaagacaagattttagaagttctttcatcttcggaaggcaatatattagaagatgaaactgctattaagatattatcttcctccaaggccttggctaatgagatttctcagaagcaggaagtagccgaagagacagagaaaaagattgacaccacccgcatgggctatcgtcctattgccatccattcttccatcctatttttttctcttgctgatttagccaacattgagcccatgtaccagtattcactgacctggtttattaaccttttcatcctgtctattgaaaattcagagaaatcagaaattttggcaaaaaggcttcagattctcaaggatcactttacttattcactgtatgttaatgtctgccggtcactctttgaaaaggataagctgctcttttccttttgtctaaccataaatctactgctgcatgagcgggcgattaataaagctgagtggagatttctgctaactggtggcattggactggataatccttatgccaaccnttgtacatggcttcctcagaaatcctgggatgaaatatgtcgattagatgatttgcctgccttcaaaaccattcgtagagagtttatgcgcttaaaggatggatggaagaaagtatatgatagtttggaaccacaccatgaggttttccctgaagaatgggaagataaagcaaatgagtttcaaaggatgcttattattcgttgcttgaggccagacaaggttattccaatgttgcaggaatttataatcaacagattgggacgtgcattcattgaaccacccccctttgatttagccaaggcatttggagacagtaactgctgtgcaccactgattttcgtgctctctcctggagcagatcccatggctgcccttctaaaatttgctgatgaccagggatatgggggatcaaaacttagctctttatctcttggtcaaggccaagggcccattgctatgaagatgttagaaaaagctgtcaaggaaggaacatgggttgttcttcagaattgtcaccttgccacctcttggatgccaacccttgagaaagtctgtgaggagttaagcccagagtcaacacatccagatttccgaatgtggctaacgagttacccatctccaaatttccctgtgtcagtactgcagaatggagtgaaaatgaccaatgaagcaccaaaaggtttacgggctaatatcattcgatcatacctcatggacccgatctctgatccggagttctttggcagctgcaaaaagcctgaggaattcaagaaattgctttatggcctgtgtttctttcatgctttggtacaagaaagacggaaatttggacccctagggtggaatattccttatgagttcaatgagacagatctgagaatcagcgtacagcagctccacatgttcctgaaccagtatgaggaactgccgtatgaggctctgcggtacatgactggcgaatgcaattacggaggcagagtgaccgatgactgggaccggcgcacgctgcgcagcattctaaacaaattcttcaatcccgaattagttgaaaattcagactataagttcgactcaagtggcatctattttgttcctccttctggtgatcacaaaagctacatcgaatacacaaagactctgccactgaccccagcaccagaaatctttgggatgaatgccaatgcagatatcactaaggatcagtcagaaactcagctgctatttgataacattcttcttacacagtctcgttcagcaggtgctggtgcaaaatcatcagatgaagtagtgaatgaggtcgctagtgacatcttgggcaaacttccaaacaacttcgacatcgaggctgccatgaggaggtacccaacaacttatactcagagcatgaacactgtacttgtccaagagatgggacggttcaataagttactgaagaccataagagattcgtgcgtaaatattcaaaaagcaatcaaggggcttgcagtcatgtctacagatcttgaagaagtggttagcagcattttgaatgtcaaaattccagaaatgtggatgggtaaatcctacccaagccttaaaccacttggcagctatgtgaatgacttccttgcaagactaaaattcttgcagcaatggtatgaggttggtcctcctccagtcttctggctttctggcttcttcttcacacaagccttcctgaccggtgcccagcagaactacgccaggaaatacacaattcctattgatcttcttgggtttgactatgaagtgatggaagacaaagaatacaagcatcctcctgaggatggtgttttcattcacggattatttctggatggagcttcctggaatagaaagatcaagaaacttgcagaatcgcatcccaaaattctttatgatacagtgcctgtgatgtggctaaagccctgtaagagggcagatataccaaaacggccaagttatgttgctccattgtataagacaagtgagcggagaggagtattatccaccactggccattccacgaattttgtgattgccatgactcttccctctgaccaacccaaggaacactggattggacgaggtgtagcactgttatgtcaacttaattcataaccagaagacatcatttccttgttcctatttcttgttggctggctgagtagagaaagcatattattttactacttaaacctttttttttgtttgtttaaatacatttgactaaagttataattatgaatttacttatgagcaaatgcagctaaacttaatatgactcatacttaaatgtaaggaaatgttctgaaataaataaagactaaagaaaacaaaatggcata

SEQ ID NO: 463438 - DNA, 723 bp, Homo sapiens
gtgaacatgattaagtagtgtagaaacaaatcatggcttgaccagcatcgtctttctcctccttttcaggaatgcaagaaggtggcctctgatgatagatcctcaaagtcaggctaataaatggatcaagaacatggaaaaagccaatagtctttatgtgattaaacttagtgaacctgactatgtcaggactctggaaaattgcatccagtttggtactcctgagacaggagctcgccatgttgcctaggctggtcttgaactcctggactcaagcaatcctcctgcctcgtcctctcaaagtgctggaattacaggcatgagccactgtgcctggcctttgtgtcatttttctatcaatctatatactgttgttgctagaaaatgttggcgaagaactagatcctattttggaacctcttctactaaaacaaacctttaagcagggtgggagtacatgtatccggcttggggactccacaattgaatatgcacctgacttccgcttctatattactaccaagttaagaaatcctcattatcttcctgaaacatcagtaaaggtaacattattaaacttcatgataacccctgagggaatgcaagatcagcttctgggaattgtggtggcacaagaaaggccagaccttgaagaagaaaagcaagccttgatattacaaggagctgaaaataaaaggttttaaatgtcataaacagaactat

SEQ ID NO: 463439 - DNA, 1824 bp, Homo sapiens
agcgccagtttgttctggccgtgtctcccactagaatgagttaagcccagagtcaacacatccagatttccgaatgtggctaacgagttacccatctccaaatttccctgtgtcagtactgcagaatggagtgaaaatgaccaatgaagcaccaaaaggtttacgggctaatatcattcgatcatacctcatggacccgatctctgatccggagttctttggcagctgcaaaaagcctgaggaattcaagaaattgctttatggcctgtgtttctttcatgctttggtacaagaaagacggaaatttggacccctagggtggaatattccttatgagttcaatgagacagatctgagaatcagcgtacagcagctccacatgttcctgaaccagtatgaggaactgccgtatgaggctctgcggtacatgactggcgaatgcaattacggaggcagagtgaccgatgactgggaccggcgcacgctgcgcagcattctaaacaaattcttcaatcccgaattagttgaaaattcagactataagttcgactcaagtggcatctattttgttcctccttctggtgatcacaaaagctacatcgaatacacaaagactctgccactgaccccagcaccagaaatctttgggatgaatgccaatgcagatatcactaaggatcagtcagaaactcagctgctatttgataacattcttcttacacagtctcgttcagcaggtgctggtgcaaaatcatcagatgaagtagtgaatgaggtcgctagtgacatcttgggcaaacttccaaacaacttcgacatcgaggctgccatgaggaggtacccaacaacttatactcagagcatgaacactgtacttgtccaagagatgggacggttcaataagttactgaagaccataagagattcgtgcgtaaatattcaaaaagcaatcaaggggcttgcagtcatgtctacagatcttgaagaagtggttagcagcattttgaatgtcaaaattccagaaatgtggatgggtaaatcctacccaagccttaaaccacttggcagctatgtgaatgacttccttgcaagactaaaattcttgcagcaatggtatgaggttggtcctcctccagtcttctggctttctggcttcttcttcacacaagccttcctgaccggtgcccagcagaactacgccaggaaatacacaattcctattgatcttcttgggtttgactatgaagtgatggaagacaaagaatacaagcatcctcctgaggatggtgttttcattcacggattatttctggatggagcttcctggaatagaaagatcaagaaacttgcagaatcgcatcccaaaattctttatgatacagtgcctgtgatgtggctaaagccctgtaagagggcagatataccaaaacggccaagttatgttgctccattgtataagacaagtgagcggagaggagtattatccaccactggccattccacgaattttgtgattgccatgactcttccctctgaccaacccaaggaacactggattggacgaggtgtagcactgttatgtcaacttaattcataaccagaagacatcatttccttgttcctatttcttgttggctggctgagtagagaaagcatattattttactacttaaacctttttttttgtttgtttaaatacatttgactaaagttataattatgaatttacttatgagcaaatgcagctaaacttaatatgactcatacttaaatgtaaggaaatgttctgaaataaataaagactaaagaaaacaaaatggcata

SEQ ID NO: 463440 - DNA, 1864 bp, Homo sapiens
agcgccagtttgttctggccgtgtctcccactagaatgagttaagcccagagtcaacacatccagatttccgaatgtggctaacgagttacccatctccaaatttccctgtgtcagtactgcagaatggagtgaaaatgaccaatgaagcaccaaaaggtttacgggctaatatcattcgatcatacctcatggacccgatctctgatccggagttctttggcagctgcaaaaagcctgaggaattcaagaaattgctttatggcctgtgtttctttcatgctttggtacaagaaagacggaaatttggacccctagggtggaatattccttatgagttcaatgagacagatctgagaatcagcgtacagcagctccacatgttcctgaaccagtatgaggaactgccgtatgaggctctgcggtacatgactggcgaatgcaattacggaggcagagtgaccgatgactgggaccggcgcacgctgcgcagcattctaaacaaattcttcaatcccgaattagttgaaaattcagactataagttcgactcaagtggcatctattttgttcctccttctggtgatcacaaaagctacatcgaatacacaaagactctgccactgaccccagcaccagaaatctttgggatgaatgccaatgcagatatcactaaggatcagtcagaaactcagctgctatttgataacattcttcttacacagtctcgttcagcaggtgctggtgcaaaatcatcagatgaagtagtgaatgaggtcgctagtgacatcttgggcaaacttccaaacaacttcgacatcgaggctgccatgaggaggtacccaacaacttatactcagagcatgaacactgtacttgtccaagagatgggacggttcaataagttactgaagaccataagagattcgtgcgtaaatattcaaaaagcaatcaaggggcttgcagtcatgtctacagatcttgaagaagtggttagcagcattttgaatgtcaaaattccagaaatgtggatgggtaaatcctacccaagccttaaaccacttggcagctatgtgaatgacttccttgcaagactaaaattcttgcagcaatggtatgaggttggtcctcctccagtcttctggctttctggcttcttcttcacacaagccttcctgaccggtgcccagcagaactacgccaggaaatacacaattcctattgatcttcttgggtttgactatgaagtgatggaagacaaagaatacaagcatcctcctgaggatggtgttttcattcacggattatttctggatggagcttcctggaatagaaagatcaagaaacttgcagaatcgcatcccaaaattctttatgatacagtgcctgtgatgtggctaaagccctgtaagagggcagatataccaaaacggccaagttatgttgctccattgtataagacaagtgagcggagaggagtattatccaccactggccattccacgaattttgtgattgccatgactcttccctctgaccaacccaaggaacactggattggacgaggtgtagcactgttatgtcaacttaattcataaccagaagacatcatttccttgttcctatttcttgttggctggctgagtagagaaagcatattattttactacttaaacctttttttttgtttgtttaaatacatttgactaaagttataattatgaatttacttatgagcaaatgcagctaaacttaatatgactcatacttaaatgtaaggaaatgttctgaaataaataaataaagcacggaaccggagtagttcccttatgtgtctatgtagggtaacgttatgtcgtatgaat

SEQ ID NO: 463441 - DNA, 1045 bp, Homo sapiens
gcagtgcccagcgtggcctctcagccagcgccacctgtgagcacccagcaccctcatcaacccagaggctggtaccagcaccatacatatccaccttccccttgccttcgtctaactcctttctctccagttatgtctttcactatttctgaaatcttttatctgtaaactcaacttggatactgacttctgactttctgaacacgaaccttggcttgtagtaccgcccgggttcctgagcatcctacagactgtcccccaggtaacattattaaacttcatgataacccctgagggaatgcaagatcagcttctgggaattgtggtggcacaagaaaggccagaccttgaagaagaaaagcaagccttgatattacaaggagctgaaaataaaaggcagttaaaagaaatagaagacaagattttagaagttctttcatcttcggaaggcaatatattagaagatgaaactgctattaagatattatcttcctccaaggccttggctaatgagatttctcagaagcaggaagtagccgaagagacagagaaaaagattgacaccacccgcatgggctatcgtcctattgccatccattcttccatcctatttttttctcttgctgatttagccaacattgagcccatgtaccagtattcactgacctggtttattaaccttttcatcctgtctattgaaaattcagagaaatcagaaattttggcaaaaagattgggacgtgcattcattgaaccacccccctttgatttagccaaggcatttggagacagtaactgctgtgcaccactgattttcgtgctctctcctggagcagatcccatggctgcccttctaaaatttgctgatgaccaggtaccttacaatagatgaagttatcggatattattttaaaaaagcaatacttgcttataattgaaattttaaggatgagggaaaggtagaaatttgtcattcaacctttgaaagttatcacaagttgacagaatcccaagaaaatgatactaaaatggcagcactgacact

SEQ ID NO: 463442 - DNA, 3574 bp, Homo sapiens
  misc_feature (1228)..(1228): n is a, c, g, or t
gtgaacatgattaagtagtgtagaaacaaatcatggcttgaccagcatcgtctttctcctccttttcaggaatgcaagaaggtggcctctgatgatagatcctcaaagtcaggctaataaatggatcaagaacatggaaaaagccaatagtctttatgtgattaaacttagtgaacctgactatgtcaggactctggaaaattgcatccagtttggtactcctgagacaggagctcgccatgttgcctaggctggtcttgaactcctggactcaagcaatcctcctgcctcgtcctctcaaagtgctggaattacaggcatgagccactgtgcctggcctttgtgtcatttttctatcaatctatatactgttgttgctagaaaatgttggcgaagaactagatcctattttggaacctcttctactaaaacaaacctttaagcagggtgggagtacatgtatccggcttggggactccacaattgaatatgcacctgacttccgcttctatattactaccaagttaagaaatcctcattatcttcctgaaacatcagtaaaggtaacattattaaacttcatgataacccctgagggaatgcaagatcagcttctgggaattgtggtggcacaagaaaggccagaccttgaagaagaaaagcaagccttgatattacaaggagctgaaaataaaaggcagttaaaagaaatagaagacaagattttagaagttctttcatcttcggaaggcaatatattagaagatgaaactgctattaagatattatcttcctccaaggccttggctaatgagatttctcagaagcaggaagtagccgaagagacagagaaaaagattgacaccacccgcatgggctatcgtcctattgccatccattcttccatcctatttttttctcttgctgatttagccaacattgagcccatgtaccagtattcactgacctggtttattaaccttttcatcctgtctattgaaaattcagagaaatcagaaattttggcaaaaaggcttcagattctcaaggatcactttacttattcactgtatgttaatgtctgccggtcactctttgaaaaggataagctgctcttttccttttgtctaaccataaatctactgctgcatgagcgggcgattaataaagctgagtggagatttctgctaactggtggcattggactggataatccttatgccaaccnttgtacatggcttcctcagaaatcctgggatgaaatatgtcgattagatgatttgcctgccttcaaaaccattcgtagagagtttatgcgcttaaaggatggatggaagaaagtatatgatagtttggaaccacaccatgaggttttccctgaagaatgggaagataaagcaaatgagtttcaaaggatgcttattattcgttgcttgaggccagacaaggttattccaatgttgcaggaatttataatcaacagattgggacgtgcattcattgaaccacccccctttgatttagccaaggcatttggagacagtaactgctgtgcaccactgattttcgtgctctctcctggagcagatcccatggctgcccttctaaaatttgctgatgaccagggatatgggggatcaaaacttagctctttatctcttggtcaaggccaagggcccattgctatgaagatgttagaaaaagctgtcaaggaaggaacatgggttgttcttcagaattgtcaccttgccacctcttggatgccaacccttgagaaagtctgtgaggagttaagcccagagtcaacacatccagatttccgaatgtggctaacgagttacccatctccaaatttccctgtgtcagtactgcagaatggagtgaaaatgaccaatgaagcaccaaaaggtttacgggctaatatcattcgatcatacctcatggacccgatctctgatccggagttctttggcagctgcaaaaagcctgaggaattcaagaaattgctttatggcctgtgtttctttcatgctttggtacaagaaagacggaaatttggacccctagggtggaatattccttatgagttcaatgagacagatctgagaatcagcgtacagcagctccacatgttcctgaaccagtatgaggaactgccgtatgaggctctgcggtacatgactggcgaatgcaattacggaggcagagtgaccgatgactgggaccggcgcacgctgcgcagcattctaaacaaattcttcaatcccgaattagttgaaaattcagactataagttcgactcaagtggcatctattttgttcctccttctggtgatcacaaaagctacatcgaatacacaaagactctgccactgaccccagcaccagaaatctttgggatgaatgccaatgcagatatcactaaggatcagtcagaaactcagctgctatttgataacattcttcttacacagtctcgttcagcaggtgctggtgcaaaatcatcagatgaagtagtgaatgaggtcgctagtgacatcttgggcaaacttccaaacaacttcgacatcgaggctgccatgaggaggtacccaacaacttatactcagagcatgaacactgtacttgtccaagagatgggacggttcaataagttactgaagaccataagagattcgtgcgtaaatattcaaaaagcaatcaaggggcttgcagtcatgtctacagatcttgaagaagtggttagcagcattttgaatgtcaaaattccagaaatgtggatgggtaaatcctacccaagccttaaaccacttggcagctatgtgaatgacttccttgcaagactaaaattcttgcagcaatggtatgaggttggtcctcctccagtcttctggctttctggcttcttcttcacacaagccttcctgaccggtgcccagcagaactacgccaggaaatacacaattcctattgatcttcttgggtttgactatgaagtgatggaagacaaagaatacaagcatcctcctgaggatggtgttttcattcacggattatttctggatggagcttcctggaatagaaagatcaagaaacttgcagaatcgcatcccaaaattctttatgatacagtgcctgtgatgtggctaaagccctgtaagagggcagatataccaaaacggccaagttatgttgctccattgtataagacaagtgagcggagaggagtattatccaccactggccattccacgaattttgtgattgccatgactcttccctctgaccaacccaaggaacactggattggacgaggtgtagcactgttatgtcaacttaattcataaccagaagacatcatttccttgttcctatttcttgttggctggctgagtagagaaagcatattattttactacttaaacctttttttttgtttgtttaaatacatttgactaaagttataattatgaatttacttatgagcaaatgcagctaaacttaatatgactcatacttaaatgtaaggaaatgttctgaaataaataaagactaaagaaaacaaaatggcata

SEQ ID NO: 463443 - DNA, 1669 bp, Homo sapiens
gtgaggcaggaactgagaggtgctggcgtgtcccatacctctctcaccttcagaactccctgaggcctcatgttctttctgtctgtcatcagaggctgagcagtacagcagttgagagaagaggctcaggaaccaggaatgggaagctgatctgtttggggacgtgccagtgaagcggtgtgcgttggcaccaccagcggctgtcattctcaggagacaatgggattggagcgccaagggggagagttctccatgcagaatttccctgcttaatccgctcttgtgcgctggcaccaagtcaacaaaggaaaggaaccaaattacccgggcggctttggcaggctgcaccactgtcagcgggccagaagttaattccctcatcttcccccgtgccaccaactcagggggcaggtctggccaggctggctttctgtgtaaggctgtcaggtggcgtgaaggggaaagaacaggcgggcagagggtggtccaatcgccggtgcagcttcacagacagacggacggacagatgtcctgtagcagccctgcccctctccctgcccccaaagcctcaataccgggttctgtctgatgcaccaggggaaggaggaggagggtacctgatgcgcagcgtctacagtccccatataaaaatggggagtggaccttaacttcagtggagacagggcatagggacctcaaatagagcaattggcagttcaacctggcaccaagatgggctgtcatgggggtaatggtaccccatcactggggaagaggggggactggcacctgggctgcccaccatgaaacactccttctccaccacagtttgggtggggaaaagggtcagggaaagccttctgggagcagctcagcccactcagacctcccctctgttggagcccagagcccttaatgtccgtgactcactggattacaaggaggacgtcgatcataggaaagatgtgcatcacaggttggatgtggatcacaaggaggatgtggatcatggggagcatgtgaatcatggggtaaatgtgggtcacagggaggatgtagatcacggggaggatgtggatcatggggaagatgtggatcatagggaagatgtggatcatggggtggatgtggatcacagggaggatatggatcatggggagaatgtggatcatcggattgatgtggaccatgggatggacatggggaatagggtggatgtggatcacggggtggacttggatcacagggaggatgtggatcatagggaggatgtggatcatggggaagatgtaaatcattgggtggatgtggatcacgaggtggatatggatcacggggagaatgtggatcatggggaggatgtggatcttggggtggacatggatcacggggtggatgtggatcacggattggacatggggcacagggaggaggtggagcatggagaggatgtggatcatggaatagatgtggatcactggactttaattgagcaagtaaaggacccatccccgcaccaccaccaccccaagaggatcttgggtctgaggagctgaccgatcccctcattcaatcctcacagccctaccgagaagcactctcattatccctcccgtacaggtgacttggtgattggactgtggatatggattttctatgatgtttaaga

SEQ ID NO: 463444 - DNA, 1483 bp, Homo sapiens
tatatctaggtattgccagacttccaccatcggggcattataacgcttataaaacatttggtaatggcatgctttctgtctttaggatgcttagagagcagtgatagccaccaatgtgatctgatagattctatcacctgcaaaaagtgtaaaagggacgatggggcattaatgagtgatttgaaagctctagctctttttacaacactagcaggacacattggaatcacctatgtccaggccacaacccagagctttgctgtccataaacacagagttgaaatagatttccccctttatgaaaagaaaaccatgatgacccatgaaaagagcagacatttctccgtatggctggaaacatggccaccagcaatttatcctatagcttctgttactgaaaagttctgtgactgccaagttaaaaaaaattgtaagcaagtaactcatgaggagcagagttttctgctgcaaacaaagcagcagaatgaggagaatgaggagtctgaggaaaatgcagaaagtttgaaatagctactgtggaaaagggagagagaggcaattaacacagtacgataattttggacatatggaatttgaattccagagagataacatctatgtgagaaccattttgtaggctgtgctcttataaagatatatcaaaagccgcacttgtcaccttttctaaaaatgcaagtcattttcaccccctctccttctaatccttctactttctccccatatttataaacacatttcccaaaaaatattcaatcttctttttcatggatccaaaagacattggacatatggcttgaacacaacactggggtaataattaattaaggtaagaaagcaaggattttggaaagtgtgggttgatgagtcagataatggtaggatttttctcctgatctctggtaaggtattacaaagttctctcctaattgtcttgcaggcccctgacagcatatcctgaattaaacttgttctgttttcccagcttacccttctaaattctctatttcctgtcacggcatctctctccatcccttaatcatctaaactggaatcccagctctctatttcacaccccatatccaatcccctcggcccttaggggagagcgggcaatagatcctggctgcgctggtcacctgtgggctccagcagcaaacaggtgggttcatttcctgcagtatgctgtacaaatgttttatttttgtatgccctgatgtgaaaaggtttggaaaaactgtttccaacactggacaacaggcagtgcagacagggatctctaagagaggggaacagagtcagtcttgggatcaccacaggtttctgagtgcaggcactatgcatccaccatgtagcagagctgagggaggagagagattggaggtcagtgaagctgaaaagactgggacttgtgaggcaaagtgccagagaggagggagctatgcagaaaaagaacttcacacat

SEQ ID NO: 463445 - DNA, 907 bp, Homo sapiens
tctaacatgttgttaggatggctctgaaaagcatgaagaaactgatggctcaaatcatgtaaggcagaaataccagaattgctatggcagagggtggatcaaaagtctcagaaaaatgagcatgcccaacaattcagcgacagcaccatcagcccagatgggggttgtgagcaaagtccgagatggtcagaaggaaacgagaacctgggaggtggcgagtgtccactgctctagtctcaggacagcctgctctgttaaagcacctggtccttcttcctgaagacttcagtcccaccttgcattatgttttgttctgtgtatgtgcgtgtctatctctcctgctaactgctgagcttgctaaggaaaggaaccttgttttatgaaataaatgatatttatgagctcctgtgctatgatgtcaggtcatccccctctcctatgctccttccagatttgccatttgagtcacaagaccgcctatattgactataaaacaaactggaatatttgggctgtgaaagacttgcagcttcatagtaaggaagatgggaatgccatgttcaatttcttccccaagtggttatggatgtataacagagcccagagaccgaatcatagtttgggcttcacaaaggacctgtccagggagaacagaagcagtaaggggagcatgcgattgaagacaatggcacagaagggatctggggcttacaattgtgagggaatatcatgttttcaggtaaacatcatgaaaagaatatcaaacagaaagaactccttgggaatccccaatttcagagcacatagacagaatgttgtgtacgttcagcaggtgttagtggaggctaccaagtacggtgtagaaggatgtggaagttaggcacagacttgtgctcaaactctggtt

SEQ ID NO: 463446 - DNA, 1115 bp, Homo sapiens
caacgagccagagccttgcataccaggggcaggcattagaccacacccgctttgactgttagactcatctgcagtgcttgtgccactagacttctgctggctgatggcccccagctgtgagctctttcaggcatcacctttggctgcaaaaggctccctctcctgaagttactacctgcatccctggaggcagacttcatctcatgtcttcatccaaagtttgaacaaattggctaagaaggtgctagacatgtaaagggactattttttttcttaattcaaatgtaggaggagtatggatctccaggaaccagaagagctgcatacatatgcccaacaattcagcgacagcaccatcagcccagatgggggttgtgagcaaagtccgagatggtcagaaggaaacgagaacctgggaggtggcgagtgtccactgctctagtctcaggacagcctgctctgttaaagcacctggtccttcttcctgaagacttcagtcccaccttgcattatgttttgttctgtgtatgtgcgtgtctatctctcctgctaactgctgagcttgctaaggaaaggaaccttgttttatgaaataaatgatatttatgagctcctgtgctatgatgtcaggtcatccccctctcctatgctccttccagatttgccatttgagtcacaagaccgcctatattgactataaaacaaactggaatatttgggctgtgaaagacttgcagcttcatagtaaggaagatgggaatgccatgttcaatttcttccccaagtggttatggatgtataacagagcccagagaccgaatcatagtttgggcttcacaaaggacctgtccagggagaacagaagcagtaaggggagcatgcgattgaagacaatggcacagaagggatctggggcttacaattgtgagggaatatcatgttttcaggtaaacatcatgaaaagaatatcaaacagaaagaactccttgggaatccccaatttcagagcacatagacagaatgttgtgtacgttcagcaggtgttagtggaggctaccaagtacggtgtagaaggatgtggaagttaggcacagacttgtgctcaaactctggtt

SEQ ID NO: 463447 - DNA, 918 bp, Homo sapiens
caacgagccagagccttgcataccaggggcaggcattagaccacacccgctttgactgttagactcatctgcagtgcttgtgccactagtgagatgcgcctaatgggggagttcatcccccacctcaccctggtgcccaacaattcagcgacagcaccatcagcccagatgggggttgtgagcaaagtccgagatggtcagaaggaaacgagaacctgggaggtggcgagtgtccactgctctagtctcaggacagcctgctctgttaaagcacctggtccttcttcctgaagacttcagtcccaccttgcattatgttttgttctgtgtatgtgcgtgtctatctctcctgctaactgctgagcttgctaaggaaaggaaccttgttttatgaaataaatgatatttatgagctcctgtgctatgatgtcaggtcatccccctctcctatgctccttccagatttgccatttgagtcacaagaccgcctatattgactataaaacaaactggaatatttgggctgtgaaagacttgcagcttcatagtaaggaagatgggaatgccatgttcaatttcttccccaagtggttatggatgtataacagagcccagagaccgaatcatagtttgggcttcacaaaggacctgtccagggagaacagaagcagtaaggggagcatgcgattgaagacaatggcacagaagggatctggggcttacaattgtgagggaatatcatgttttcaggtaaacatcatgaaaagaatatcaaacagaaagaactccttgggaatccccaatttcagagcacatagacagaatgttgtgtacgttcagcaggtgttagtggaggctaccaagtacggtgtagaaggatgtggaagttaggcacagacttgtgctcaaactctggtt

SEQ ID NO: 463448 - DNA, 1549 bp, Homo sapiens
gatcttagttcatctctttaggattgggagggtcaggaagaaaaagatctagctacgataatagacattctttacagatgcaaattttccccccacaaaaaacagctttgtgcagggccttttcaaaatatggcaaagaaacatgttttggggtaaaatatttttattttcttccttgtctcataacgttatgccagccagagtcaggctggaaagtaagtcacaatatatagggttaaatgaaacctatctgatgagaatttatgatttgtagggcatgactctccagaccccttagataggaatttgggcaagataaaaaaaatcagagtttagtcctcaccacagtgtcaacttgctaatgtgatggaatggcagcaagatttcaaagaagattttgggggagagagcagggagtggctcagggaaagaagtggagtgttgagtcagttggcttaatgggaacctggtttgcccattttgaaaaccacaacggagaaataatcacccagatctactattttttcaccttaaaacatcctggggcccgtcatcttgcaccctggctctgcagggcaggattggaaggtctctggggggccccgctcctctgaaggatcacctgccccacctgtcacattcctccctggccaggcctcacactaaagagactcgcctggctccaccaacacccactccagactctgtaggggggtatcagcagaaattgaatctttagccccacagagaggctgtgacattcccactgccacttaagggttagggctagtcagagaatcatagaacgttaaagtgtgaaggaaccatcaggacagctcaagaagccgaaaccaagcaaatcagatggcccagggccacacagggaaggagtggaggggtccctgcgggagtgctgccccttccaggcctcctctgtcaccagaggagctggtcctgctgcttagagtcatattaaacctttggatggggtatgtaaggacactttcccctggaaaaatgctacgtcactcactttatatcctggccttaggccaactgagccttcaccccaccctccctgcctaagtcacctcaccaagcatcctctggtactgacgacgatgcttttggcctggttaccaagctttcctgaccacctgatggtagggcccctccacatgggctattcatcctcccagaagcaggtcctccagtgactgatctgcactaatgtgggcaaacagagggcatcctcctcctctctctgcttcttttctttgcaaaattagtgggacaaataggtacaagttgcatgaaaatgagatacagttcttcatttgccatccacaccaggagcaccaggtcccggagcccagctgtgcattagatgttgtctctgcagcacaaggtaggaggctgcaggatgtacctgagaaacgcaatcgcacaaagcaattgttcagcaccaaatatgggggacagaagagtgctaaggggagaagactccaaccataaataaataaaatggcagcaaattaggaaataacag

SEQ ID NO: 463449 - DNA, 1925 bp, Homo sapiens
tctgtgcagagacggtgggatcaactcctggccgcacacggatggagtcccaggcaagcctgccaaggcccagtcaggctttccacggagttgcgctcaccgtggcccctctctggctcttcaggcaagcagagctccctgtttccaagggcgtggggccctcttctctgcccaagcccctgctgactctctgtgttttcagctctgaggccagcactcagcccctctcatctgctggtgaggcttcaaccactggcagacgtgctcctcttcgggctgcttactgtgctcctgcagcccataagcgcttcggaggggtgcagttgctatggcaatgcctacagccatctgaattcctgctgcaccttctgggagaaaagagctcatgaagaggcattcggtggattcccagtctggcctctggcctctgcactgtcaggagtcagctgatgggttacatgccggacacgtgggaggagcaccaggtcccggagcccagctgtgcattagatgttgtctctgcagcacaaggtaggaggctgcaggatgtacctgagaaacgcaatcgcacaaagcaattgttcagcaccaaatatgggggacagaagagtgctaaggggagaagactccaaccataaataaataaaatggcagcaaattaggaaataacagaaaccatactgtctcatgacgtccattcacttgctcatcacagcctatccaaggctgctttcagagtttcagtgagttcttcactgttccctactcttgtaagctcttaaatatgcctgctcagctcctcttgcttctttgttttttaaaaacatactaaaggaactatttttgcagcaaaaccttcctcctcggataaaacttcacttcactggctctggcttttgaagccaggctttccctcctccaagccagcgcgcctcctctgaggtccctttcagtctggaggcctgtggtgatgtcagtgtgcctcagctgttttcaattaaacccctcgagctgagctgaataaatggcttcagcaagctgattttccaaagggtccaccttattttgaaccaacatgtcaaaacaaaatcaattcaacctgaaacacatacagtgcaaataaatacatctcttcacagatttaccttaaaaattacaagggcaggctggacacggtggctcacgcctgtaatcccagcactttgggaggctggggcccgtggatcacctaaggtcaggagttcgagaccagcctggccaacatggtgaaactccgcctctactaaaaaatacaaacattagccaggcgtggtggcgggcgcctgtaatcctagctacttgggaggctgaggcagggagaattgcttgaacctgggaagtggaggttgcagtaagccaagatcgtgccactgcattccaacctggatggcagtaagccaagatcgtgccactgcattccaacctggatgacagaataagactctgtcttaaaaaaaaaaaaaaaaattacaagggcaaagcaagatgcgagggcctctccagtcccagccccacagctcccctggggtgagaaggagggagctttgatttcagtgtcctcaaagaaggaggcaaagaaatgacagcatagccccgtgtcctggcctcggcatggctaagactgctcctgcccgcctcctgcccacctcgggcccaggactaggccagttgaggaggaagcatcacttcacctgctgccgcctgtctccttggcctggtccaccacagccgccggcctggtaggtgcccgtccctaaagaaagtcagctgcggaggctagaagggtgatacctctcagccctgcaccaggctgaaatccccgctccctgccaagtgcaggggtccccacgctgacgctggcacttgctcctgccccgtttcatttg

SEQ ID NO: 463450 - DNA, 1306 bp, Homo sapiens
  misc_feature (2)..(4): n is a, c, g, or t
  misc_feature (7)..(7): n is a, c, g, or t
  misc_feature (12)..(12): n is a, c, g, or t
  misc_feature (14)..(14): n is a, c, g, or t
cnnnttncctcntnagaatttagcatgaattgattgatgtcaagctagtgatgaagctgctagcacatatatatcaagctacaaccgaaataaagactcaaaacctggtttgggctgagcatccatgggacctcccggagccatctgggccttctgacaatggtgaagctcgcagaacctatctgatgcccaagagcagcagtgttggtgggagcatctgctctggggagcagagaggaggccatcaacactgtggtataagcagcagcctcagaagagggtggagagcagtggccaagcagcagtgtgatctgttgaggatgtgtgggctccagatggtcgctcaggtgttctggggagaaagcagggtaggttatggatgcaatccaggtaattgtaaattagaggtcaaatcagaattagtaaaaacgagtgaatttgctggtgttgctgcaactggcggtgcaggcagagctccctggagtggactctgagatagagatgagtgtgcaggatactaactagagagtgtacccaggatcaacatctgtggaagagaagggagaaaaacaggattggacaaaaggagatgctggaatgtcctgcagtctcatcaaaggccttagctgaccccatggggaactctgggcccggatgacctgcagagctgccccaagttgggaagaacagtaaaacagacttgttattggcagcccattagtgctcaggagaggcggtctccagcatgacatcagccggcggctcgacccaaatctagtatttcaccagagagcctaacgctgctggctttccaactgtgtggaagacgatacaggcgtaacaaagacaaggatgaaataagtcctgtgatggagagacaagcaaaattctacctgacttcacaggaggaagaagtgtgctgtgccagggggaacaggagaaagcttcatggaagaggtcacaggaaatgggtagctatccagctaaatagatttcatgcttgacttcagtggaatagctcaaatgatgatctgtttgggagagtaaattaaagagtttccatccgaggttggttgaatccacagatacggaacccacagatatagagggccaaccatactgagtcctgacttcacccattccttctacccccatctctcctaatccttaaacttccttgcaattcctggagcagaatactcgtgtaggagtcaggggttgtcttcccttcctagaagcaatgcttctatgttctcatttgatgttgaataaaacattaaacagaaaagctttgataacatcacat

SEQ ID NO: 463451 - DNA, 1063 bp, Homo sapiens
  misc_feature (2)..(4): n is a, c, g, or t
  misc_feature (7)..(7): n is a, c, g, or t
  misc_feature (12)..(12): n is a, c, g, or t
  misc_feature (14)..(14): n is a, c, g, or t
cnnnttncctcntnagaatttagcatgaattgattgatgtcaagctagtgatgaagctgctagcacatatatatcaagctacaaccgaaataaagactcaaaacctggtttgggctgagcatccatgggacctcccggagccatctgggccttctgacaatggtgaagctcgcagaacctatctgatgcccaagagcagcagtgttggtgggagcatctgctctggggagcagagaggaggccatcaacactgtggtataagcagcagcctcagaagagggtggagagcagtggccaagcagcagtgtgatctgttgaggatgtgtgggctccagatggtcgctcaggtgttctggggagaaagcagggtaggttatggatgcaatccaggtaattgtaaattagaggtcaaatcagaattagtaaaaacgagtgaatttgctggtgttgctgcaactggcggtgcaggcagagctccctggagtggactctgagatagagatgagtgtgcaggatactaactagagagtgtacccaggatcaacatctgtggaagagaagggagaaaaacaggattggacaaaaggagatgctggaatgtcctgcagtctcatcaaaggccttagctgaccccatggggaactctgggcccggatgacctgcagagctgccccaagttgggaagaacagtaaaacagacttgttattggcagcccattagtgctcaggagaggcggtctccagcatgacatcagccggcggctcgacccaaatctagtatttcaccagagagcctaacgctgctggctttccaactgtgtggaagacgatacaggcgtaacaaagacaaggatgaaataagtcctgtgatggagagacaagcaaaattctacctgacttcacaggaggaagaagtgtgctgtgccagggggaacaggagaaagcttcatggaagaggtgagccttacaagccacgtaggatttcaaaaggggaggataatgttccgaggcaaggaaccagcaaaacactgaggaataaaagtaaaaattgtatctggggaat

SEQ ID NO: 463452 - DNA, 1529 bp, Homo sapiens
  misc_feature (1)..(1): n is a, c, g, or t
  misc_feature (7)..(8): n is a, c, g, or t
nttcccnncctcctccagctgtgtttgtcggcccctcgggcctcatgttgttgctctggcaccccaggggctcaggtggagccacggccaggacaggcctcaccattggcaagggcactcaagctcccaggtggactcccaacctatccaggcactacagccaagggtaagagccctggactggggccgacctgcttccaatgacccaccgtccaacctcgccttaccttatccgtaggagccatttgacaagctcttgttgaacaaatgctacacatgaacacatgggctgtgtcctgaagcgctggaaactgagtggacggcatgggttggtctcaggatttgttccgcgccttgtggagatcgctgtcaagggaagtgaaggagcacgtgggcacggaccaattcgggaacaaatactactacatcctgcagaacaagaactggagaggacaaactattcaagagaaaagaattgtagaagcagcaaataaaaaagaagtagactatgaaacaggggatattccaacagaatgggaagcttggattagaagaacaagaaagactccacctactatggaggaaatactaaagaatgaaaaacacagagaagaaatcaaaataaaaagccaagatttttatgaaaaagaaaaactccttagtaaagagaccagtgaggaactcctgcctccaccagttcaaactcaaattaaaggccgtgcctctgctccatacttcggaaaggaaaaaccctcagtggctcccagcagcactggtaaaacctttcagccaggatcctggatgccacgagatggcaagagccacaatgaatgaatgcattatggtcaaatcttttcacgtatatggatgcgactattttagcaaataaaagaagtgaaaagttaaaaaaaaaaaaagaatgtatgaacaaaagtccatacacctgagacatcaatttctttttctcatgttacagctaaattcaggagtagggtgggctccatttcctaagaagcactaaaatatcaccagaatgtaaagagagagagaaaaaaagtatattcaacaggcctcttcttaaggacgaaactgcatattttgcaaggaatacttcagtaaactacttggggtggatcaagatgcaaaagatggctgttcccttctaaggagactgagcccatttaattggaaggcttttgctttgctaagtggagtttgtaggttcaggcttggagtcagggtgctcaagatcacagagaagacacgggaccctctccacccttcccccacaccactctgaaactgccagaccaagacaccccatgtctagccattgctcccagccaattctaccaggtcatcaaggcccaaatcccaggccacctcctccaggaagccttccctgatgtctggatggaaatgtctaagtctccctccttgctctcccttctggctcttatgccagtctgtggatgcctcaggccttgcattactagagggtaaggctgtctccttcacctctctgccca

SEQ ID NO: 463453 - DNA, 759 bp, Homo sapiens
aggacgttactatacactactatagactttatgaatactctacacttaggctatagagcaaaaacaaaagcaaaatgaacaaaatcctggatatagactatcacaactctcagccacagggaagagtgggtcctgtagtaactaaaactatcaggcaggcaggcagaccaaagccaatttatttatcccactcaacagatggacataaaccaacaggtattggaaagagaccattgctcatacagcagccttgcatggcttttaagatcctgagttgtacctcctatcacaagccagggcgaaggaggcgctggctcccaaggttctgccggaaggtagccacgtcctcagccctgccaccaacccatcctagcagctggggcttctgggtggtcagccagcagtacctgcccactgtgaagattcattgctttttacacatcaacacagaatccgacctgaggcagcttgttcgccgcatctaccatgtgagagcacagagagaaaatgctatccaatggaccctcgccagacaccaaatctgccggcaccttgaccttggacttatcagcctacagaaacatgcaacacagaatatacagtttgatgtgagaaaaaacatgcaacacttctaaggaagtaaaatttaaatgcagaatgagcatctgaaaaaaattattagtttgacagattcagtacttttctgctagctgaaatcaaggacggcaagaagcagaggacatttgacaggaaaagaaa

SEQ ID NO: 463454 - DNA, 3525 bp, Homo sapiens
  misc_feature (1)..(2): n is a, c, g, or t
nnttcccaggataaccttctcatctcccctccctgttctctcctcctgctcctccttcttctacttcaacctatcctttatatctccacaccaagggaagcagacactcggatgtggacgcgtgtgctgcagccctgtgtgcatcagagtgagaccctgtctcgaagaagaagagaaaaagaagaagaagaagaagaagaagaagaagaagaagaagaagaagaagaagaagaagaagaagaagaagaagaagaggaagaagaagaagaagaaggaggaggaggaggaggaggaggaggaggaggaggagaagggaataagatgagaggaagaaggaagaagaacaagaggaagaagaagaaggaggaaaaggaggaagaggaggaggaggaaaataaggagaaggaggaattccacgtggctggggaggcctcacagccatggcggaaggtgaacggcacaccttacacggcagcaggcaagagagtcaatgagaaccaggaaaaagggaaaccccttatgaaaccatcagatcttgtgacacttatctactaccatgaaaacaaacttaccccaaataaactaaagcgtatgtctaaagacacgtacacaaaggttcgtagcaactttatctgttatagccaaatctagaaagagcccagatttcttcaatacatgaatgtttaagcaaactgaactgtagtacatctcataccatgaagtctgctcagtaattaaaaatgaacaaccactgatacatgtaacaacgtgaacaaatcaccagaaaattatccagagtggaaaaaaaatctaatcatacaagattgcatactgtgtggttacatttacatatcagttttgaaaagacagtgggaaggaagtgaagagcacatttgtggttgccaatagctagagagagagttggggagagagggaagtggactttcctatggcaggccaatatgaggaatctttataatgatggaaatattctgcatctgaactgtatcaaagtcattatccaggttgtgataacatactcttgctttgcaaaatgttaccatagggggaaacttcctaaagactaaatgggacctctattatttcacacaactgcatgtgaatctacaattatttcaaataaaaagttcaatttaaaatgtcattcaacttcactttacctccataatattttatggctgcttatccagataaactttatattcaactcttttaactctagcaacaacaacaacaacaaaatgtggctagaaaaccagtcatttaaattattattcctctttataaaatacattatttctctctgcctacatatgagatatttttggtcttgtcatattatcccacaagttctttgggtttgcctatattttccaatctttttatctttctgatgttcagaataaataatttccattgatctatttttaagtcaatttctctttctagtctcacctccattgtagtgtggactccatgctatgaactttttctaaaaattggttattgaagaccttagttctaaaatttatgtttgattcttctttagatattctacttctttgctgatacgtaaactttctatttgtttccagagtgttcatcttacttcttaaagcatgattatagaggctgctttgaagtctttgtgttataattccaacagctggttcttgggcttagtttctgatcatttttttccttgttaggtaagttggtttgttttgtttccctggtgctttgtatgctacagcatttttggattctattacggacgttttcaacattcccttttgagactctgggtattttatggcctaaggagaatggtgatttttgttcatttgttttttaacaagaagccaaccagattatgttcaagccttaagtttcaatctgccttccatggattgtagttctaacgtcagtttagtttttgagtttctgtatgctgttcagatcaatcccacatgcatgtccattatggggcctgggcagtggttggcctcactcatcactctgttctcaaaggctacggtttgcttctcaggtcagatctccacatacacagcttagaagtgaggctcagatttcatgcacaattttatgtgctcaccctctcactctgccttttctcatcatctcactaacaccttccagctctctgcagcttcccttcctggtcctggacagaaagtcaggactttagcatcctggccctgccacacacttgctgtgactacttctttgtctgcacccaagcaccaggaggatggaaaaggaacaaaatagtggggagtcagcacatgctcatggttgagggtctcagctcctccaaccagagagaaaagcccaaagtcctctctcggggtcacaggtgcctgatggactgccttccatccccatgctgccatggtctcctctgctgtatggcccaacggctgagcattaagataaggaagaaagacaaagagtggggtttcctcccacacagtctgatactcagatgtcccctttcccactcctcagaacagaacgtgacagctccttttggagtttcttctctttgttatcagtgtgcatttacagtcatgggccccctttgccttgaggccaggtgatactagaagaaaaaaaaatgataaactctctagcagtctggtagaacatttaattctagactttttcaccagtccacatgctactgtctacttttcagaccctctgatgctattctgagcactcaagatgtgcagttgtgtgagacgcacagggtgcagcatgttctctccatcttgcctggaaccacgtccagagaggtacaggttgaatttccatttctgttctcatgagaatggttgaacattatttctcattattagtggttatttgcatttatcttctgtgttcatagctccagctcatttatctgagggtattcaatctttttcttcattatttaaaaataatttctgcatattaaggataactaatcataatctataataaaccatacatacgcccagtttgttatgcatcattttactttacttatggtatttttgccctgcaaaggtgttttcattttatatatagtcaagataatcctccaggtttcagccaaactcatcatatttttccagtacttactgtttgggttttttttacatttatcaaattggaatttatccttatatatggtgtgggaagtggccccgatattatcttttcatatcattaccgagttactgagtactgctcatcaaatatttcttctgctgttagaaatgttgtcctttactgcatactaaactttcacatgtaattgtgtctatttctggattttctattttctgccattagtctctcttttcatgcactgacaccttactgttataattatagaggacttatgtgatttttaaatatctgacaagttaaccttccactcattgcacctttatttaaagcttttctctggctatctttgcttgtttttctgcc

SEQ ID NO: 463455 - DNA, 1785 bp, Homo sapiens
gagaaatgaatatagtccttcaggaagattaatctgacaagcaggacaaaggatggcttgtaggaaatgggaggctgaagacaggctagtcacgggccaatgggttgttgttactgaaaaggatgggaaacaggaatctactatttttgatgctgtaatgatttgttcaggacatcacgtataccccaatctgccaacggattcctttcctggcctggaccagtttcgaggcaactacctccatagccgggattataagaatccagaagccttcaaggggaagagggtcctcgtgattggtctggggaattcgggatctgacattgctgttgagctcagccgtctggctacacagccaaggcacagaggatggtacttctatgtcacaccacaagagatccacctcttctatgtggcccttcaaatcaaggaggacttgagacatcctccatgtgaagccagttccctgagaaaagagcctgtgttcaatgatgagctcccatcccgcatcctgtgtggcactctgtccatcaagcccagtgtgaaggagttcacggaaacctcagctgtgtttgaggatgggaccatgtttgaggctatcgactctgtcatctttgcaacaggctatgattattcctaccccttccttgatgagaccatcatgaaaagcagaaacaatgaggttaccttgtttaaaggcatcttccccccactaatggagaagccaaccttggctgtgattggcttggttcagtcccttggagctgccatccccacagcagacctgcaagcctggtgggctgctaaagtatttgcaaactcatgtaccctgccaaccacgaatgaaatgatggatgacactgatgagaaaatggggaaaaaactcaagtgatccccgcctggccctggaggtgtactttggcccttgcagcccataccagtttcgactgatgggaccagggaagtgggatggggccagaaatgccatcctgacccagtggaaccggacagtgaagccaaccaggacaagagttgtcagtgaagttcagcgaccccatcccttttacaatttgcttaaaatgctttcattcccattactccttctggctgttacacttacattttattaatgagaaagtctttgaggtctcaaaattcagcatagaagtgtaatcacacaatacaacacacacacacacacacatacacacacacaatcacaacatagttcctctctcctttcctgaagatatgaaaatcagtcttggcccatttgaattaaagtataagtaaaatggaaaatactcagcctctctctctctgttgggaatctgttctctaaaaggcttttcacatgctgaattggcaaatttggggatgcttaagataagacaggaagttgaataagcatgagcacagattttcaggctgaacaaagtttaacaaaatgtaaaggcattttattttgtccattatagtatattaaccaatgtatttttcatattaactgaagttattgacattaaatcaacatagagagataagtttataccaatacaacaacgaagataaaatgaacacattgcttgaaagatacatactgccaaagctctcccaagaagaagcatataacctgaatagacctaaatctattaaagtacttgaatttgtagtttaaaaactcttccacaaagaacaggccaagaaccaggtcttcactggttaattctgtcaaacatttgagaaagcaatataccaactatatgcaaaattttccagaagatt

SEQ ID NO: 463456 - DNA, 2284 bp, Homo sapiens
gataggaaaatttaaaatgctaaaggaaaaattttcttagcaatttcacaggaaaacctaagttttaagagaggttatcattctgactgggaactgaactattatgactaggtctataatttaataacaagtcacaatatctctctttcttgacatcaatttaaggtgacttttcacatagtagagagaatggcttcagttatacctgcctccaataggtccatgagatctgacaggaatacatatgttggaaaaaggtttgttcacgttaaaaatccttacttggatttgatggatgaagacattctctatcacttggatttgggaacaaaaacacacaacctaccagcaatgtttggagatgtaaagtttgtctgtgtcggtgggagccccaacagaatgaaagcatttgcactgtttatgcacaaggagctcgggtttgaggaagctgaagaagacataaaagacatctgtgctgggacagacagatactgtatgtacaaaaccgggcctgtgctcgccatcagtcacggcatgggcatcccctccatttctattatgcttcatgaactcatcaaattactccaccatgcacggtgctgcgatgtcaccattattagaatcggtacatcagggggaatagggattgcaccagggactgttgtaataacggatatagctgtagactccttctttaagccccggtttgaacaggtcattttggacaacattgtcacccgaagtactgaactggacaaagaactgtctgaagaactgttcaactgtagcaaagaaatccccaacttcccaaccctcgttggacatacaatgtgtacctatgatttttatgaaggccaaggccgactagatggagcactgtgctccttttccagagaaaaaaagttagactacttgaagagagcatttaaagctggtgtcaggaatattgaaatggaatctacagtgtttgcagctatgtgtggactctgtggtctaaaagggcagaagcagggagaagaacgagaaggcgaacgcagtagtctagtgagagttgatggacaaagtgatagcagcgcaggatgttgcagaaacctaagtgaagttattctaagagcctttctgtccttgctgcaaatctttgtaaccttgctctctctgctacctgcaggtttccctcctggatgctttcttctctacatttctgtagttactgccctccactgcattttctttcttatgctgctgctggacctgctggtagctgatttccgcctgcaaatagctctcccccaggccactgctgcagcctttcatggagtagaccccttctaggctgccaacattcacactaaaagttgcatctgcagctctgtagttcttgggagtatttctatctgaatgtcttcatggtgccagcggctctttatctccctcagatttactgttctaaaaggtggattcctggtatgctgtcccctggaagatcagccaccaagtatagagaccgaaaaccccatggatagggtgctatcatattctcttctttcattactacttcataacatcctgttcccgtaacactgaagcttggaagctggcatctggcaccttttgattttaacccatttataacgcactttgtgtgagccagaaaagcttgcttggggaagggctgagaatgcattcatggacagctgctgaaacagaggaagttagagaggacatctgatgctgctgtggtctgtgtgacacttctcgacagactcgactgtgatcagatcaacttgcctcatgatgtcctggtggagtaccagcaacggcctcagctcctaatctccaacttcatcagacggcggcttggactttgtgactagacgtcctaactgggcagcccaaccctcccctgcaagtttgtagctcaagttgtaatgtgaaagtcatattttatttgtggcatttttatatagttctcatccacatgctaaatggaaagactttatgaaatccttctctcttaaaaaggaatttattgtaaaagaatactcacactaaattaaattcaaatttcattttagaataagttaactaaatcagtctaataattaaaattttaaaactcctggattatgacatttggagtttcatatgcagcattaattaagctcacatcaaaatagaccagccatttgcacatagttaccagtcactctgtttctgaaaccaatccagaaattcatgttagaacattgtcaggcacttctaggtattggacaagtgacagaaa

SEQ ID NO: 463457 - DNA, 1584 bp, Homo sapiens
agcgggccgcgcggcacgggtgagtgcccaggacttcaccagtgctgccatgctggccccaggctgtgagttggacccagaccaagaagtggtgaggacaaggcctgaagatgtgcctgcttccccttcaacttccaccatgattgtaagtgtcctgaggcctcccagccatgcttcctgtacagcctgtggaactgtgacttttcacatagtagagagaatggcttcagttatacctgcctccaataggtccatgagatctgacaggaatacatatgttggaaaaaggtttgttcacgttaaaaatccttacttggatttgatggatgaagacattctctatcacttggatttgggaacaaaaacacacaacctaccagcaatgtttggagatgtaaagtttgtctgtgtcggtgggagccccaacagaatgaaagcatttgcactgtttatgcacaaggagctcgggtttgaggaagctgaagaagacataaaagacatctgtgctgggacagacagatactgtatgtacaaaaccgggcctgtgctcgccatcagtcacggcatgggcatcccctccatttctattatgcttcatgaactcatcaaattactccaccatgcacggtgctgcgatgtcaccattattagaatcggtacatcagggggaatagggattgcaccagggactgttgtaataacggatatagctgtagactccttctttaagccccggtttgaacaggtcattttggacaacattgtcacccgaagtactgaactggacaaagaactgtctgaagaactgttcaactgtagcaaagaaatccccaacttcccaaccctcgttggacatacaatgtgtacctatgatttttatgaaggccaaggccgactagatggagcactgtgctccttttccagagaaaaaaagttagactacttgaagagagcatttaaagctggtgtcaggaatattgaaatggaatctacagtgtttgcagctatgtgtggactctgtggtctaaaagctgctgtggtctgtgtgacacttctcgacagactcgactgtgatcagatcaacttgcctcatgatgtcctggtggagtaccagcaacggcctcagctcctaatctccaacttcatcagacggcggcttggactttgtgactagacgtcctaactgggcagcccaaccctcccctgcaagtttgtagctcaagttgtaatgtgaaagtcatattttatttgtggcatttttatatagttctcatccacatgctaaatggaaagactttatgaaatccttctctcttaaaaaggaatttattgtaaaagaatactcacactaaattaaattcaaatttcattttagaataagttaactaaatcagtctaataattaaaattttaaaactcctggattatgacatttggagtttcatatgcagcattaattaagctcacatcaaaatagaccagccatttgcacatagttaccagtcactctgtttctgaaaccaatccagaaattcatgttagaacattgtcaggcacttctaggtattggacaagtgacagaaa

SEQ ID NO: 463458 - DNA, 282 bp, Homo sapiens
acctccttgaataatatcaacatttattttgattttgtgattttctttacaaatttagtgcaaaaaactttgcatctgttgctttatttacaggttgatgatgcaaattagctaattcatggaacataaaccatgacatctacacgtgttcttaagtaaattaactaaaaagtaaaataaaaacattagagttgaaactgacccgtggttcttatcccagttactatggcaggcccttgtttatttttattaacagtttgtctgtgtcggtgggagccccaa

SEQ ID NO: 463459 - DNA, 450 bp, Homo sapiens
ggacttcaccagtgctgccatgctggccccaggctgtgagttggacccagaccaagaagtggtgaggacaaggcctgaaggttagtgagggaagaggagaaatacattcatgtctaagcacatgtgtctggtcatattccaagtctcagtacaaattaattttgaattatgtggttgatgttttccacatttcagcttccatcaactggcacaaataattaagggatgatgcaacacatattggtacaatttctcaacttttttagagctaggcccactgaaattcaggtagctactacagacgatggaagaggttattttagaaaaacatgctatgtgaacagccctacactggtgccttattttcaatcacctttttaaaccatgaattcataatactctttaaggtagttgaccactctaacgatccctttaatacataatttttaa

SEQ ID NO: 463460 - DNA, 2315 bp, Homo sapiens
agcgggccgcgcggcacgggtgagtgcccaggacttcaccagtgctgccatgctggccccaggctgtgagttggacccagaccaagaagtggtgaggacaaggcctgaagatgtgcctgcttccccttcaacttccaccatgattgtaagtgtcctgaggcctcccagccatgcttcctgtacagcctgtggaactgtgacttttcacatagtagagagaatggcttcagttatacctgcctccaataggtccatgagatctgacaggaatacatatgttggaaaaaggtttgttcacgttaaaaatccttacttggatttgatggatgaagacattctctatcacttggatttgggaacaaaaacacacaacctaccagcaatgtttggagatgtaaagtttgtctgtgtcggtgggagccccaacagaatgaaagcatttgcactgtttatgcacaaggagctcgggtttgaggaagctgaagaagacataaaagacatctgtgctgggacagacagatactgtatgtacaaaaccgggcctgtgctcgccatcagtcacggcatgggcatcccctccatttctattatgcttcatgaactcatcaaattactccaccatgcacggtgctgcgatgtcaccattattagaatcggtacatcagggggaatagggattgcaccagggactgttgtaataacggatatagctgtagactccttctttaagccccggtttgaacaggtcattttggacaacattgtcacccgaagtactgaactggacaaagaactgtctgaagaactgttcaactgtagcaaagaaatccccaacttcccaaccctcgttggacatacaatgtgtacctatgatttttatgaaggccaaggccgactagatggagcactgtgctccttttccagagaaaaaaagttagactacttgaagagagcatttaaagctggtgtcaggaatattgaaatggaatctacagtgtttgcagctatgtgtggactctgtggtctaaaagggcagaagcagggagaagaacgagaaggcgaacgcagtagtctagtgagagttgatggacaaagtgatagcagcgcaggatgttgcagaaacctaagtgaagttattctaagagcctttctgtccttgctgcaaatctttgtaaccttgctctctctgctacctgcaggtttccctcctggatgctttcttctctacatttctgtagttactgccctccactgcattttctttcttatgctgctgctggacctgctggtagctgatttccgcctgcaaatagctctcccccaggccactgctgcagcctttcatggagtagaccccttctaggctgccaacattcacactaaaagttgcatctgcagctctgtagttcttgggagtatttctatctgaatgtcttcatggtgccagcggctctttatctccctcagatttactgttctaaaaggtggattcctggtatgctgtcccctggaagatcagccaccaagtatagagaccgaaaaccccatggatagggtgctatcatattctcttctttcattactacttcataacatcctgttcccgtaacactgaagcttggaagctggcatctggcaccttttgattttaacccatttataacgcactttgtgtgagccagaaaagcttgcttggggaagggctgagaatgcattcatggacagctgctgaaacagaggaagttagagaggacatctgatgctgctgtggtctgtgtgacacttctcgacagactcgactgtgatcagatcaacttgcctcatgatgtcctggtggagtaccagcaacggcctcagctcctaatctccaacttcatcagacggcggcttggactttgtgactagacgtcctaactgggcagcccaaccctcccctgcaagtttgtagctcaagttgtaatgtgaaagtcatattttatttgtggcatttttatatagttctcatccacatgctaaatggaaagactttatgaaatccttctctcttaaaaaggaatttattgtaaaagaatactcacactaaattaaattcaaatttcattttagaataagttaactaaatcagtctaataattaaaattttaaaactcctggattatgacatttggagtttcatatgcagcattaattaagctcacatcaaaatagaccagccatttgcacatagttaccagtcactctgtttctgaaaccaatccagaaattcatgttagaacattgtcaggcacttctaggtattggacaagtgacagaaa

SEQ ID NO: 463461 - DNA, 1134 bp, Homo sapiens
ctgcctagaggaggagaaggtacacagagcagtgacatttgctccagctctagaagagcacctctgagatttcctggctgacacatcgcatctccctctggccacagccaagcaacaccagatgtctgcagtagcagtaacactttggattcctgatggaaaactccaagacgagcctctgtgaaatacctgcttcattttggcttcattttcatgcctcattatctgacccatttacttcttacctcagggcacagaccacggctgtgacactccgtaaaatcctgtgggatggggaagagtgaaaatgacacaccggtggggcaaggtggctcatgcctgtaatcctagcactttgggaggccgaggcgagtggattacctgagatcaggagttcgagaccagcctggccaacatggtgaaaccctgtctctactaaaaatacaaaaattagccaggcgtggtagtgggggtggccttctccgctcctcctcctcctctctggaggtggtttcatcacagactgtaaaggttctgtaaaaaataatctagtccgtctgcctgaagcagttctccccctgcaccagtgactcctgctatggtatactggggaattgtcatgctcttccctaagctttcctgccatcccaatcaaccagctaacaccacaggatccagtctgatttttaatgtctgtgaccccaagtgccagtgtgggctctctgcaaggctatggctggaccaggcacactacaagcagtttccacagctggcaccagggaacatgtggtgcctggaagcttggagatgccaagaaccacagggccccaaagagggagtcacagccctggcttggggagctcccaggtctgggctccccgaagggccacagctctctctcctcttcacctgcaacgtggtgagcaagacacatctcagccctgtttgtgttacagctgttttagccctgccatttgatgggtcctggttcttgtcctgtgaccagaaagaatgaggtacacagaaaagtggagagtgaacaagacaaaggggagctttgagtgatagaacagctctgaggagacccacggtcctctccacagccagggtgtcctgacaagtgttcagtttttc

SEQ ID NO: 463462 - DNA, 4645 bp, Homo sapiens
cctcttaaaccaattaataacactcaagtgtggctaaaagtcttgaaagaaagtgagggagtatgccatttggatttcagagagaagacaattctaggaggaaggaattacctatgcaaagacctggaggcactggggaacgcagtggcacccgggagcttggagattccaggaaccacagaacctcaaagagggtatctcagtcttggctcagggagctcctaggtctgggctccctgaaggactgcagctcttctctttccttcttgtcaccagcaatgtgggctggcaccgggagcagggaaaggccagacagtggaagcaggcactttcaagcctgtgagggaagggagcttcctgggcccctgagagcagagggatgctggggtctgcagctgcagctgacaggctgcagctgtgcccaggagtgtgggctcctgccccaccaactcggtaggggcagggctccctctggccttgtggattgtgcagccccagctgtgcctcccctgctgcagctggcatcctcacagtggctgctccacacgggcttgtctgtatttatgttgaaagtccaggtgaatgacatcatcagtcgtcagtacctgagccaagcagttgtagaagtgtttgtaaactacacgaagacaaattccacagtaactaaaagcaatggagcagtgctgataaaagtaccctacaaattaggacttagtttaactattattgcttacaaagatggctacgtgttgacccctctgccttggaaaaccagaagaatgccaaatgccaagtctcaaccaagtgttcagttttcaaaagccttaattaaacttcctgacaaccatcatattagcaacgttactggctatcttacagttctacaacagtttttgaaagtggacaattttctgcatacaactggaattactctcaataaaccaggttttgaaaacattgaattgactcctcttgctgcaatatgtgtgaaaatatattctggaggaaaagaactaaaggtcaatggctctattcaagtttctcttcctcttctacgtctgaatgatataagtgcaggggatcgcatacctgcttggacatttgatatgaacacaggtgcttgggtaaatcatggtcggggaatggtcaaggaacataacaatcatttaatctggacatatgatgcaccacatttggggtactggatagcagctccacttccaggaactagaggttcaggtataaatgaagattccaaggacataactgcctaccacacagtgtttcttacagccatattaggaggaacaatagtcattgtcattggattttttgctgtactactttgttattgcagggacaagtgtggtactccacagaaaagagaaagaaatatcactaaacttgaggtcctcaagagagaccagacaacttcaacaacacacataaatcatatcagtacagttaaagttgcattaaaagctgaggacaagtcgcagttattcaatgccaaaaactcctcatatagtcctcagaaaaaggaaccatcaaaggcagaaacagaagaaagagtttccatggtaaaaactcgggacgattttaaaatctacaatgaagatgtttcatttctatcagtcaatcaaaataattactcaagaaacccaacacagtctttggagcccaatgtagggtccaaacaacctaaacatattaacaacaatctatcttcatctctaggtgatgctcaagatgaaaagaggtatctcacaggtaatgaggaggcgtatgggcgttcccatattcctgaacagcttatgcatatttacagccaacccattgccatccttcaaacatctgaccttttctccacaccggaacaattacatactgctaagtcagctactttgccaagaaagggacagttagtctatggccaattgatggaaccagtaaatcgagagaactttacgcagaccttgcccaaaatgccaattcattctcatgcacagcccccagatgccagggaagaggatatcatacttgaaggtcaacagagcctgccatcccaggcttcagattggagccgatactcaagcagcttactggaatccgtctctgttcctggaacactaaatgaggctgttgtaatgactccattttcatcggaacttcaaggaatttcagaacagaccctcctggagctgtccaaaggaaagccctccccgcatcccagagcctggtttgtgtctcttgatggaaagccagttgcacaagtgaggcactcctttatagacctgaaaaagggcaagagaacccagagcaatgacaccagtctggactctggggtggacatgaatgagcttcactcaagtagaaagctcgagagggagaaaacattcatcaaaagcatgcatcagcccaagatcctttacttagaagatttagacctaagcagcagtgagagtggaaccaccgtctgttcccctgaggacccagctttaaggcacatcctagatggagggagtggagtgatcatggagcaccctggagaagagtcgccaggaaggaaaagcactgttgaagattttgaagctaatacatcccccactaaaagaaggggcagaccaccactagccaaaagagatagcaagactaacatctggaagaagcgagaggaacgcccactgattcccataaattaactccaatggggattgtgtgtctgctgtctcgtgctgtttattcttgcttcttgttgtaaattgcagtacgaacttaagaaaatgagactgagcaatctcatggttcttggacatgtctcaagcagagtaaatggtaattcagtaatcagagagaaagataccaaggaatgctttttctggcctattcatttatttttgggtgatgaatttacagtatctaagttttcaaaatgtaaaatagcttcaagatgttagttatctgaaaatgttgctcagccagccagtttggccttgactctcttaagaataacagtgaaatatatactcctcaagttgcctccaaaaatgttgcctctaccatggtgactaccccatggaacatttagaaacaaaactgacttcaggcatcatattattttaaatgttactattacgtcttcttctgcctatacttaaaaataacttgataaatgacttggactgatgttactctggagttatcacaaagaaaatgttgtttggtctttaaagagcatgtgtattgtatcatcccaaacttttgaatttgtttgctccatcaaaataaatattctttctttgacttgtctttatcttttcattttgagcttcagtttatttggggactagatttctgcctattaagatttttaaaacataacatcttcagagtttgactagaagaaaatagtctagaagtcaaccataatttgccatattaaatgctgaaagctaataatctcaatgacaaatgatggaaaaacattttcatcaagtatataatggttgactgggggtttcataattcatatgttgactagttctaatccttgtagaccttattaaaacactagactaactgcagacagtctgattcaaaacaaataagacaattacattcccaagagtctctggacttattacacttgaacagcttagttagaaactttttctaaatgggggctatccggaaagggtaatagtggctattaagcaatgtagagtaaatatctcagaatttttattttacatatttccatatttcaatccaataatgtagattcttttgtttttcatagaaaaatactttaaaaaattcagcttaaaaaattagcttatcagtatccaaaattttataataaagactatttcaaaaccctgatttctgatttagataatttctgaaaggtttgtgtccataaaatacaaaaaaggataattattaacatacttttgcagatattttctcattgttacttttaaaaatttagtatttctgatttttaaaagagttgcttgtcattattccatgtattatttaacaaaacactattgatgtgaatattgaccattgaagaggttgttaatgacaagtagatgagatctataattaaggagtttaccaattatttctaaggagtgcttatacttataaaaggaagggaaaaattatttctctgaataagtttttttccttaatgtttaaataaaatgacaagaaaagaatcttgaaagtgaatttcatgctaacaatctttaacacatacctgttttctgaaactctggtttctcaaaaagtaatgcttgccactgttctattattttcttttttcacaatgagacataagagcaagctgtaatgaatcagtgataagagaattgtacttactcttcttgaaattgggacctgtctttcctgccttttttttttttaagtgaagatgagatttgatactattaaaattagccttagtaagaaattaatctgaatcaggaaattttgaaaattccatctgccccaagatgagctcatttcacttctaaagaaaatactgcctgattgcatgtacaaaattgttatgttgatatcttatgtttgtcttcttagaccataagatccttatggacagaaaccatgctttaca

SEQ ID NO: 463463 - DNA, 2808 bp, Homo sapiens
gagtgggtggaatgagcccagcaggtctaagcaaaactgaggcagaggcactaccagccacagaggtttccagccagaaaaacgaccctgacaaggaccccataataagagctgtacagggtgaaattgttgttattggtgctacaaacagacttgactctatagatcctgcactcaggagacctggtcgttttgacagagaattcctcttcaacctgcctgatcaaaaggcaagaaaacacatcttacagatccataccagggactggaatccaaaattgtcagatgcatttttaggtgaattggctgaaaaatgtgttggctactgtggagccgatatcaaggccctgtgcactgaagccgccctgattgcactgcggaggcgttatccccagatctatgctagcagtcataaactgcagctggatgtttcctcaatagtgcttagtgcccaagatttttaccatgcaatgcagaatatcgtgcctgcttcccaacgtgctgtgatgtcttcagggcatgcactatcccccatcataagaccactgctggaaagaagcttcaacaacatcctagcagtcttgcaaaaagtgtttcctcatgctgaaattagccagagtgacaaaaaagaagatgacgtgtggaagtgtccattgtgttcacctgacttgagattgggaagtatagccttgttaaagctttgctaaacaggacttcttcttatgacttcaaccacatcctgtggtagatgtcacattatggggctcaaaaagtcatagaaaaaagtcttcagttctcctctgttttagtcacactctttgtgctatggaagtgcttcctcttgcactaccttctccacctcgtcaattatcagaatcagaaaaaagtcgaatggaggaccaggaggaaaatactttaagagagttgcggttgtttctcagggatgtaaccaagaggctggccacagataaacgctttaacatcttcagcaaaccggtggatattgaagaggtcttgtttcagtagtgtgcaaacagtgaagttgaactggctaaaagaaaaaaatattgacatctttttttggaaggaaaaaaaagcaaaggcatggatgaatattacccctagcctataaaattttaatccatgtgataactaccgatgtcatcagcaaacatctggtgacttttggatgaaattagcgaccaatttatattggcctcttaattattattaacctttgtggtctcttactcttcgatttaagaggattaaaggttgccttagtcaaatatccatactagattatttttattccaggataaattctgctgtcaaagagtatattggtattaaccaatcaataccagttaatactggcatttcccaaattatgtatacctcatcaaaagaggtagctaaaaacctgaaatttctttgtctttcatattttggaaatgcctgtggctgggatgctgtttgaagttaaaacatatcccgtgcaactaaattatttttctttctaaggattttctctgctcccagtggaaaatttctcactttatatgtgtattattttgtgtgcttgtgggagcatggtttgtgatgatgagaaaagaaattttccatttgggaatctaatactatcaactacatttttggtttttgttttatcctgggataatgtagtgtgtggatgaacacaatgtaatctttactggcctctttcttatagttcagactccatgtttgaacagctttggtgtttttagtttttattcatttctttttttaaaaaaatgaattatgggtgattcagggtttaatgttgtatcctaattgtgaaatctgtgcttttggacctgagcagatacctttgaaaccattacctcatctgttactaggaagaatgagctagcatttacattcctcccccctggcaagtctgaaaagaaatactttcccccctttttggaatgaagagactatctataattttatttgtacctttatccacaatacactgttttttccatttgatcctcttatcaaccttgtaggatcattattattattcttactttgcagttgaggaaacagacttgttggcaagtgacatagccaagacttgaaagttttttaaaattcaaagcccacattcattatcatagctactttatatctttccactgggataacaggacatgcctaattggctttttaaattaataaatatcagtttatattgctgggtcatccccccccccatagtgtttttaaataattttaaaactatcagccgattaaaaaattattttaaataaatgtgatatgtgtgtgtgccctttcttccactcccctatttggtatatttggactctaacacttcttaaaggataggggcttgcccccaactcaacttcccatgctgagagtaaaccaattttgcttttgctcaggaaaactcttttctttctaatcaaagaagatttgtcagattttcaaatgccatctgtaatagttttataaatgacggtaaggggatagaaaatgttggtcagataaatattttatttagggttgtatttctcttcttttctcctttatctttcttcttaggttcgttctgctcttaagctgagaacataggagtctctgggaaggatagagaggggaaaacaagataacctaaaacaaaagtttttatttaactaatgaatttaaaatgtctgaaaactttatcaaattccaaagcagactgcagagaaagcaaaactttagaaaataaatgttaaatttaaaattaagcat

SEQ ID NO: 463464 - DNA, 4580 bp, Homo sapiens
tgtcgtctccagaggatcccgaggtgacaaaaaaagagatatagaaactttaattttagaggatagtgaagatgaaaatgctttatcaatttttgagaccaattgtcactcaggatcaccaaagaaacagtcatcatctgctgctatacataaaccctaccttcattttacaatgtcaccatatcatcagccaacctcttacaggccacgcttattgctctctggagaacggggctcaggtcaaacttctcaccttgctccagcacttttgcacactctagaaagattctctgtgcatagactagatctcccagcactttattcagttagtgccaaaacacctgaggaatcatgtgcacagatttttcgtgaagctcgaagaacagtacctagtattgtttacatgcctcacattggggattggtgggaagctgtcagtgaaactgtgagagcaacttttctgacattgctacaagatataccatcattttcacctatatttttattgtctacctctgaaaccatgtacagtgaactgcctgaagaggttaaatgtatctttagaatacagtatgaagaggtcttgtatattcaaaggcctattgaagaagacagaagaaaattttttcaagaattgattctcaatcaggcatcaatggctccaccacgaaggaaacatgctgctctttgtgctatggaagtgcttcctcttgcactaccttctccacctcgtcaattatcagaatcagaaaaaagtcgaatggaggaccaggaggaaaatactttaagagagttgcggttgtttctcagggatgtaaccaagaggctggccacagataaacgctttaacatcttcagcaaaccggtggatagtttcagattatcttgaagtaatcaaggaaccaatggacttatcaacagtaataactaaaattgataaacataattacctgactgcaaaggatttcctgaaagatattgacctcatctgtagcaatgctttagagtataatccagataaggacccaggagataaaataattaggcacagggcttgtaccctgaaggacactgcacatgctatcattgcagctgaattagatccagaatttaataaactttgtgaggaaattaaggaagcaagaataaaaagaggcttatcagtaacatcagaacaaataaatcctcatagtactggagctcggaagacagaaactagagtcgaagaggcatttcggcacaaacaaagaaatccaatggatgtgtggcacaactctgcaaataaatgtgcatttcgggttcggagaaaatcaaggcggagatcacagtggggtaaaggaattattaagaaaaggaaagttaataatttaaaaaaagatgaagaagacaccaaatttgcagactatgagaaccatacggaggacaggaaattattagagaatggagagtttgaggtaagcactgactgccatgaggaaaatggagaagagactggagacttatctatgaccaatgatgaatcatcctgtgacatcatggacttggaccaggggcagaggcttaacaatggagcaggcacaaaagagaactttgcatctactgaggaggaaagttcaaatgaatctctactggtcaacagcagcagttccttaaacccggagcagacctccaggaaagagactttccttaaaggaaattgtctaaatggtgaggcttccactgacagttttgaaggaataccagttctggaatgtcagaatggcaagcttgaagtagtttctttctgtgatagtggagataaatgtagttctgaacaaaagattcttctggaggaccagtcaaaagaaaaaccagaaacttcgactgaaaatcatggagatgatcttgagaaactagaggcactggaatgtagcaataatgagaagttagaacctggctctgatgtggaggttaaagatgcagaactggataaagaaggtgcttctaaagtaaagaaataccgtaaattaattttagagcaggcaaaaacgacaagcctggaactggttccagaagagccatctgagcctgtgcctcctcttatagttgatcgtgagagattgaagaaattgcttgatttgttggtggataaaagcaacaatctggcagttgatcagcttgagagattatattctcttcttagtcagtgtatctaccgtcatcgtaaagattatgacaaatcacaacttgtagaggagatggaaagaacagttcatatgtttgagacattcctatgaacttttcaagatgagtggtttatcctctccaatctgctcctcacagagcagtcttctgagccattcaatttcaaattgcaccaattatgtgcagagccttggtgtaaagtgctctctcactcattctttctctctgttgaatttggtgctattgtctcaggtacctgaaaccaaccagcctacaagaaccaaacagaacttcagaaacatgttgtattttccacaaataaaaaatacaaccccacagcttggagattttggtgctacagaaactgctctcgcttctgctcctctttttgtgcactctcttttggagactcctctcttagggagcagaccagcaaacaggaggaaactggatgggggcagttctaactgtgttgaattgtttaaacagtgggcaacttgttatttttttttcctccattttacccctttaatcatatttttcccccatctgggtaatggactgaaacctgttttagagttggctatggtctgttctggtgggaagctgaagaaactggatgaaattaggtcaggctctttagaactgcctttaacgtgcctttttattcatttgaggaagataaggctaaaaggatgggctgtttgaagcaaataaattagaaatatttctttggtcacaaccttgaaaataagttttgatactctatgtcattaagagacaaccagtgtttgggtatgaaatgcctgtcttattctcaaagctcaatcaagacacccagtaagccacataatatactaaaatggtaagttttcttgtaaggtctgttttggtttaagaaacatgaataacaacaaagaataatacacagtccacacacaaaaaaacaaaaaacaaaactgcacacgttttggtattgccaacaatgatgactagaaaataaatagatagtggccattttttcttctgtcagtggcaatttaatagttattcatgtttgagttcccagagaaaaatggttttcatatgtagtaaattgttgttttgttttaaagccaggacttgccaaatggacagaaaagagaggaattcatcagaagctccataaaattcattttctgtatgcttaattgcaaacgagctctggtatggtccttgaataacagtattaatgtttaaatcccatctcctaagcttaccttcacaactcttctttttgattggaaaccattttgaatcttgttgagtgatttctgtgaattgtatgtatctgaaattaattatgggttactagttttacaaaaactttctacaaatttggagacacagtctaggcagttgcaatgaggcaaaggatgcagtgactttttttatcagatgatttttaaacaaaaagaaaattttgccagcaagttggcttggtatcttcattcattgtagccgttagctgcaggtgtgtctttccaatatatgcaacacatgtagtttgggttttaattagggcgaatggtcttggactactgcagagattctgagctacctcagctttttgtattttagttaccaacagtgtttacagagtcttgtaatcactttgccaccgtttacatcctgaagctaaggtacttgtctccttgtctttggctctttgtagtgtgcagaaagcatactttggccatagcctactgcagtaatccaaagtgcttctttgcatttacatttacatctaacgccttctaattctagcttaatttttttttaaatgccacgtgttttctttgtacctagtctgtgaagtttctgtaatatccagttagtcatacaagtcaagatgctacccatgtagacacactgtatttttaaggtgggcaagtgcgattaacgatgaaccattttaaaggggaggttatttgaaacctctaatttgattattgggaggattttcatgctttctttagtatttattaccatcataccgattcaaactattttattgtctaatacattagcattttgtattttgatggaaattgttacagaatttaaagatttgatgaaataagatgtagcagattttttgtagcaagtttctggtaaaagggttttttgcaagtctcaggttcttgctgcactatttttttttaaatatttattccagttattctaattcagaagcattcttttcaagtaacagcagcacttgtgaaaggaaaaaaaaatgcacatgtttcttagtaggttactaaatttgtacaattaattaagattttagccatcagtgagtttgaaaagggaaatgtatttattttcagcattaaaatgcttccaaaagatca

SEQ ID NO: 463465 - DNA, 6080 bp, Homo sapiens
tgtcgtctccagaggatcccgaggtgacaaaaaaagagatatagaaactttaattttagaggatagtgaagatgaaaatgctttatcaatttttgagaccaattgtcactcaggatcaccaaagaaacagtcatcatctgctgctatacataaaccctaccttcattttacaatgtcaccatatcatcagccaacctcttacaggccacgcttattgctctctggagaacggggctcaggtcaaacttctcaccttgctccagcacttttgcacactctagaaagattctctgtgcatagactagatctcccagcactttattcagttagtgccaaaacacctgaggaatcatgtgcacagatttttcgtgaagctcgaagaacagtacctagtattgtttacatgcctcacattggggattggtgggaagctgtcagtgaaactgtgagagcaacttttctgacattgctacaagatataccatcattttcacctatatttttattgtctacctctgaaaccatgtacagtgaactgcctgaagaggttaaatgtatctttagaatacagtatgaagaggtcttgtatattcaaaggcctattgaagaagacagaagaaaattttttcaagaattgattctcaatcaggcatcaatggctccaccacgaaggaaacatgctgctctttgtgctatggaagtgcttcctcttgcactaccttctccacctcgtcaattatcagaatcagaaaaaagtcgaatggaggaccaggaggaaaatactttaagagagttgcggttgtttctcagggatgtaaccaagaggctggccacagataaacgctttaacatcttcagcaaaccggtggatagtttcagattatcttgaagtaatcaaggaaccaatggacttatcaacagtaataactaaaattgataaacataattacctgactgcaaaggatttcctgaaagatattgacctcatctgtagcaatgctttagagtataatccagataaggacccaggagataaaataattaggcacagggcttgtaccctgaaggacactgcacatgctatcattgcagctgaattagatccagaatttaataaactttgtgaggaaattaaggaagcaagaataaaaagaggcttatcagtaacatcagaacaaataaatcctcatagtactggagctcggaagacagaaactagagtcgaagaggcatttcggcacaaacaaagaaatccaatggatgtgtggcacaactctgcaaataaatgtgcatttcgggttcggagaaaatcaaggcggagatcacagtggggtaaaggaattattaagaaaaggaaagttaataatttaaaaaaagatgaagaagacaccaaatttgcagactatgagaaccatacggaggacaggaaattattagagaatggagagtttgaggtaagcactgactgccatgaggaaaatggagaagagactggagacttatctatgaccaatgatgaatcatcctgtgacatcatggacttggaccaggggcagaggcttaacaatggagcaggcacaaaagagaactttgcatctactgaggaggaaagttcaaatgaatctctactggtcaacagcagcagttccttaaacccggagcagacctccaggaaagagactttccttaaaggaaattgtctaaatggtgaggcttccactgacagttttgaaggaataccagttctggaatgtcagaatggcaagcttgaagtagtttctttctgtgatagtggagataaatgtagttctgaacaaaagattcttctggaggaccagtcaaaagaaaaaccagaaacttcgactgaaaatcatggagatgatcttgagaaactagaggcactggaatgtagcaataatgagaagttagaacctggctctgatgtggaggttaaagatgcagaactggataaagaaggtgcttctaaagtaaagaaataccgtaaattaattttagagcaggcaaaaacgacaagcctggaactggttccagaagagccatctgagcctgtgcctcctcttatagttgatcgtgagagattgaagaaattgcttgatttgttggtggataaaagcaacaatctggcagttgatcagcttgagagattatattctcttcttagtcagtgtatctaccgtcatcgtaaagattatgacaaatcacaacttgtagaggagatggaaagaacagttcatatgtttgagacattcctatgaacttttcaagatgagtggtttatcctctccaatctgctcctcacagagcagtcttctgagccattcaatttcaaattgcaccaattatgtgcagagccttggtgtaaagtgctctctcactcattctttctctctgttgaatttggtgctattgtctcaggtacctgaaaccaaccagcctacaagaaccaaacagaacttcagaaacatgttgtattttccacaaataaaaaatacaaccccacagcttggagattttggtgctacagaaactgctctcgcttctgctcctctttttgtgcactctcttttggagactcctctcttagggagcagaccagcaaacaggaggaaactggatgggggcagttctaactgtgttgaattgtttaaacagtgggcaacttgttatttttttttcctccattttacccctttaatcatatttttcccccatctgggtaatggactgaaacctgttttagagttggctatggtctgttctggtgggaagctgaagaaactggatgaaattaggtcaggctctttagaactgcctttaacgtgcctttttattcatttgaggaagataaggctaaaaggatgggctgtttgaagcaaataaattagaaatatttctttggtcacaaccttgaaaataagttttgatactctatgtcattaagagacaaccagtgtttgggtatgaaatgcctgtcttattctcaaagctcaatcaagacacccagtaagccacataatatactaaaatggtaagttttcttgtaaggtctgttttggtttaagaaacatgaataacaacaaagaataatacacagtccacacacaaaaaaacaaaaaacaaaactgcacacgttttggtattgccaacaatgatgactagaaaataaatagatagtggccattttttcttctgtcagtggcaatttaatagttattcatgtttgagttcccagagaaaaatggttttcatatgtagtaaattgttgttttgttttaaagccaggacttgccaaatggacagaaaagagaggaattcatcagaagctccataaaattcattttctgtatgcttaattgcaaacgagctctggtatggtccttgaataacagtattaatgtttaaatcccatctcctaagcttaccttcacaactcttctttttgattggaaaccattttgaatcttgttgagtgatttctgtgaattgtatgtatctgaaattaattatgggttactagttttacaaaaactttctacaaatttggagacacagtctaggcagttgcaatgaggcaaaggatgcagtgactttttttatcagatgatttttaaacaaaaagaaaattttgccagcaagttggcttggtatcttcattcattgtagccgttagctgcaggtgtgtctttccaatatatgcaacacatgtagtttgggttttaattagggcgaatggtcttggactactgcagagattctgagctacctcagctttttgtattttagttaccaacagtgtttacagagtcttgtaatcactttgccaccgtttacatcctgaagctaaggtacttgtctccttgtctttggctctttgtagtgtgcagaaagcatactttggccatagcctactgcagtaatccaaagtgcttctttgcatttacatttacatctaacgccttctaattctagcttaatttttttttaaatgccacgtgttttctttgtacctagtctgtgaagtttctgtaatatccagttagtcatacaagtcaagatgctacccatgtagacacactgtatttttaaggtgggcaagtgcgattaacgatgaaccattttaaaggggaggttatttgaaacctctaatttgattattgggaggattttcatgctttctttagtatttattaccatcataccgattcaaactattttattgtctaatacattagcattttgtattttgatggaaattgttacagaatttaaagatttgatgaaataagatgtagcagattttttgtagcaagtttctggtaaaagggttttttgcaagtctcaggttcttgctgcactatttttttttaaatatttattccagttattctaattcagaagcattcttttcaagtaacagcagcacttgtgaaaggaaaaaaaaatgcacatgtttcttagtaggttactaaatttgtacaattaattaagattttagccatcagtgagtttgaaaagggaaatgtatttattttcagcattaaaatgcttccaaaagatcaagttgcttttgtttgtttgtttttttaaccgtaatgtagatggagaaattggaggcaacctcagtataggaactgccactttgaacagtttaggtcttaaagagaaagtcaatctaatgccaaggggagaacaatgagctgaaattgtaccaactcctctggccctccttccctcaattaaaaaaacacacttaccagttttgcttattttacagatatctggtggttctatagtttaaagcagcttgtgaaattaaaaaagtggactcaattttgtttacctttctgtaagtttttcatttttgctgtatagcattggcaaaaatatgtacaaattgacctctgttcttatttcctattgtgagcattataaagataagctcctatgtaaaaccttgctctcagatgagtaaaatatgtatcacagcatagctcagcaataattcatgctcagctgtggggaccctgggggctttttgaagatgatggaaccgcactagggttgaaactgatggctgtggagttaattgtgttttcgagcttgaatctcacctgtgattttttttttttaatgttgtttcatgacttgatttttctcataagccaatgtatttgtaggtttactggattttatttttagggagtgggtaatttcttcccttttttgattaagttggttcagctatggtgctattcagtaggtatcttcagtgtcaggtcccgtagctgaatgccattgttattataattattatttgtaatcacattgtaagcttgaatttgggcttgtacctgcatcttttgtattctgtacatctggttacttagactttgggagtccaatttggtttcagtcatgtatgtctactttgtagtttaagtagacttcatcaactatggtctattttgggtttgtagttttaatttagaattgtgttaaattgatgttttgcatttgacttcatttgacattagttgaagtaaattatttaatttttgaattctggaatttgaacatttactgtaatttgtaatataactgctgtgaaatacttgaataaagatgacaagaaaaacatgtctttctttagcttaattatgatcactgttggctacaaatgcagtgctacttttctagctgatttagactgttttagagagaggcatattgctggttattaagcacccaaaaagtcgtgttatatgttccttttagattttaagtacacctcacgattttttagctgaaagctttttatgttgagaaagcgtggttttagttttagttgaagattgtctaaaatatgttgtatagaagcaaatggattacttctgagatttgtttttctagctggaagactatacgataacatatgatcaggtcatatggttcattagtttaaaatgttttcctttttatcgggttgttatcagtatactttgtacagtatagcacataatatggacagagatttcataccagagttttgaagggcttac

SEQ ID NO: 463466 - DNA, 884 bp, Homo sapiens
tactactactaaattcgcggcgcgtcgatgggtaatttcttcccttttttgattaagttggttcagctatggtgctattcagtaggtatcttcagtgtcaggtcccgtagctgaatgccattgttattataattattatttgtaatcacattgtaagcttgaatttgggcttgtacctgcatcttttgtattctgtacatctggttacttagactttgggagtccaatttggtttcagtcatgtatgtctactttgtagtttaagtagacttcatcaactatggtctattttgggtttgtagttttaatttagaattgtgttaaattgatgttttgcatttgacttcatttgacattagttgaagtaaattatttaatttttgaattctggaatttgaacatttactgtaatttgtaatataactgctgtgaaatacttgaataaagatgacaagaaaaacatgtctttctttagcttaattatgatcactgttggctacaaatgcagtgctacttttctagctgatttagactgttttagagagaggcatattgctggttattaagcacccaaaaagtcgtgttatatgttccttttagattttaagtacacctcacgattttttagctgaaagctttttatgttgagaaagcgtggttttagttttagttgaagattgtctaaaatatgttgtatagaagcaaatggattacttctgagatttgtttttctagctggaagactatacgataacatatgatcaggtcatatggttcattagtttaaaatgttttcctttttatcgggttgttatcagtatactttgtacagtatagcacataatatggacagagatttcataccagagttttgaagggcttac

SEQ ID NO: 463467 - DNA, 782 bp, Homo sapiens
gatttaatttttaaagaactttgtttttattttgtgtttttatgaactgagatgatgtgaaaaactggaagtaatttttattaaaatatctgttttaggtttcagattatcttgaagtaatcaaggaaccaatggacttatcaacagtaataactaaaattgataaacataattacctgactgcaaaggatttcctgaaagatattgacctcatctgtagcaatgctttagagtataatccagataaggacccaggaggtaaggatgcatagggcaaggttccccttgataatcaatcagaagacagtttaccgtttaaatactaagtcatgcctgtgttctagatagataattttcatgacctgttgtttttcaaaacttctcaataagaagctcatagcctacataaaaataatgtgtttaaagtagagaattgtatagttgtaggtattattttcaggggtttgtttcttcatttaccttctactttttatatttacattgtaatttgagaatttaattgaaaatatattagtcaacaattgcagggctgataaagattcagaatttcgaattcatggaaatccataataggatcagtttatgtgtcaaaagatccttttatgtggaatgttatctgttctttatgtagaatgttatctgttcttttgattgttgggatttctatgtaactgtgttattttactcctaatccatcctgtattcaagtgtatagtcccaacttttgttatcgctctccagggaagactgccaggaatata

SEQ ID NO: 463468 - DNA, 468 bp, Homo sapiens
gaaactttaattttagaggatagtgaagatgaaaatgctttatcaatttttgagaccaattgtcactcaggatcaccaaagaaacagtcatcatctgctgctatacataaaccctaccttcattttacaatgtgagtgatttatatcaactttctttgtatttagagtgatttttgatactttatgattagaattatggtatatttttacttatggttataactgtgaggatattgtttttctgttgtttggacacaattctggaaaacttttactatgtattctttttcatgtggtaatagttagtttgttggttaactacctaggtgtttttttctccaagtagaagaatctttcctgctactttacttttttttttttttttgggaggcagagtctcactctgtcacccagggtagagtgcagtggcatgatcttggctcactgcaacctctgcctcctgagttt

SEQ ID NO: 463469 - DNA, 369 bp, Homo sapiens
atacgggagtagtccaagatattctaagggaatgattttaagccctcaaatcttttaatttcatgttcactgttacatcctcgctttatggtgtttattgactagccatttgaatatacaatttcagtttgaccagtgaaatcaaattacattttattcttttctgttttttcttagaaattgcttgatttgttggtggataaaagcaacaatctggcagttgatcagcttgagagattatattctcttcttagtcagtgtatctaccgtcatcgtaaagattatgacaaatcacaacttgtagaggtaagtgtttagtttatctgtagaataaacaaatacttgattttacttgttccaaagaaaaga

SEQ ID NO: 463470 - DNA, 5655 bp, Homo sapiens
tgtcgtctccagaggatcccgaggtgacaaaaaaagagatatagaaactttaattttagaggatagtgaagatgaaaatgctttatcaatttttgagaccaattgtcactcaggatcaccaaagaaacagtcatcatctgctgctatacataaaccctaccttcattttacaatgtcaccatatcatcagccaacctcttacaggccacgcttattgctctctggagaacggggctcaggtcaaacttctcaccttgctccagcacttttgcacactctagaaagattctctgtgcatagactagatctcccagcactttattcagttagtgccaaaacacctgaggaatcatgtgcacagatttttcgtgaagctcgaagaacagtacctagtattgtttacatgcctcacattggggattggtgggaagctgtcagtgaaactgtgagagcaacttttctgacattgctacaagatataccatcattttcacctatatttttattgtctacctctgaaaccatgtacagtgaactgcctgaagaggttaaatgtatctttagaatacagtatgaagaggtcttgtatattcaaaggcctattgaagaagacagaagaaaattttttcaagaattgattctcaatcaggcatcaatggctccaccacgaaggaaacatgctgctctttgtgctatggaagtgcttcctcttgcactaccttctccacctcgtcaattatcagaatcagaaaaaagtcgaatggaggaccaggaggaaaatactttaagagagttgcggttgtttctcagggatgtaaccaagaggctggccacagataaacgctttaacatcttcagcaaaccggtggatagtttcagattatcttgaagtaatcaaggaaccaatggacttatcaacagtaataactaaaattgataaacataattacctgactgcaaaggatttcctgaaagatattgacctcatctgtagcaatgctttagagtataatccagataaggacccaggagataaaataattaggcacagggcttgtaccctgaaggacactgcacatgctatcattgcagctgaattagatccagaatttaataaactttgtgaggaaattaaggaagcaagaataaaaagaggcttatcagtaacatcagaacaaataaatcctcatagtactggagctcggaagacagaaactagagtcgaagaggcatttcggcacaaacaaagaaatccaatggatgtgtggcacaactctgcaaataaatgtgcatttcgggttcggagaaaatcaaggcggagatcacagtggggtaaaggaattattaagaaaaggaaagttaataatttaaaaaaagatgaagaagacaccaaatttgcagactatgagaaccatacggaggacaggaaattattagagaatggagagtttgaggtaagcactgactgccatgaggaaaatggagaagagactggagacttatctatgaccaatgatgaatcatcctgtgacatcatggacttggaccaggggcagaggcttaacaatggagcaggcacaaaagagaactttgcatctactgaggaggaaagttcaaatgaatctctactggtcaacagcagcagttccttaaacccggagcagacctccaggaaagagactttccttaaaggaaattgtctaaatggtgaggcttccactgacagttttgaaggaataccagttctggaatgtcagaatggcaagcttgaagtagtttctttctgtgatagtggagataaatgtagttctgaacaaaagattcttctggaggaccagtcaaaagaaaaaccagaaacttcgactgaaaatcatggagatgatcttgagaaactagaggcactggaatgtagcaataatgagaagttagaacctggctctgatgtggaggttaaagatgcagaactggataaagaaggtgcttctaaagtaaagaaataccgtaaattaattttagagcaggcaaaaacgacaagcctggaactggttccagaagagccatctgagcctgtgcctcctcttatagttgatcgtgagagattgaagaaattgcttgatttgttggtggataaaagcaacaatctggcagttgatcagcttgagagattatattctcttcttagtcagtgtatctaccgtcatcgtaaagattatgacaaatcacaacttgtagaggagatggaaagaacagttcatatgtttgagacattcctatgaacttttcaagatgagtggtttatcctctccaatctgctcctcacagagcagtcttctgagccattcaatttcaaattgcaccaattatgtgcagagccttggtgtaaagtgctctctcactcattctttctctctgttgaatttggtgctattgtctcaggtacctgaaaccaaccagcctacaagaaccaaacagaacttcagaaacatgttgtattttccacaaataaaaaatacaaccccacagcttggagattttggtgctacagaaactgctctcgcttctgctcctctttttgtgcactctcttttggagactcctctcttagggagcagaccagcaaacaggaggaaactggatgggggcagttctaactgtgttgaattgtttaaacagtgggcaacttgttatttttttttcctccattttacccctttaatcatatttttcccccatctgggtaatggactgaaacctgttttagagttggctatggtctgttctggtgggaagctgaagaaactggatgaaattaggtcaggctctttagaactgcctttaacgtgcctttttattcatttgaggaagataaggctaaaaggatgggctgtttgaagcaaataaattagaaatatttctttggtcacaaccttgaaaataagttttgatactctatgtcattaagagacaaccagtgtttgggtatgaaatgcctgtcttattctcaaagctcaatcaagacacccagtaagccacataatatactaaaatggtaagttttcttgtaaggtctgttttggtttaagaaacatgaataacaacaaagaataatacacagtccacacacaaaaaaacaaaaaacaaaactgcacacgttttggtattgccaacaatgatgactagaaaataaatagatagtggccattttttcttctgtcagtggcaatttaatagttattcatgtttgagttcccagagaaaaatggttttcatatgtagtaaattgttgttttgttttaaagccaggacttgccaaatggacagaaaagagaggaattcatcagaagctccataaaattcattttctgtatgcttaattgcaaacgagctctggtatggtccttgaataacagtattaatgtttaaatcccatctcctaagcttaccttcacaactcttctttttgattggaaaccattttgaatcttgttgagtgatttctgtgaattgtatgtatctgaaattaattatgggttactagttttacaaaaactttctacaaatttggagacacagtctaggcagttgcaatgaggcaaaggatgcagtgactttttttatcagatgatttttaaacaaaaagaaaattttgccagcaagttggcttggtatcttcattcattgtagccgttagctgcaggtgtgtctttccaatatatgcaacacatgtagtttgggttttaattagggcgaatggtcttggactactgcagagattctgagctacctcagctttttgtattttagttaccaacagtgtttacagagtcttgtaatcactttgccaccgtttacatcctgaagctaaggtacttgtctccttgtctttggctctttgtagtgtgcagaaagcatactttggccatagcctactgcagtaatccaaagtgcttctttgcatttacatttacatctaacgccttctaattctagcttaatttttttttaaatgccacgtgttttctttgtacctagtctgtgaagtttctgtaatatccagttagtcatacaagtcaagatgctacccatgtagacacactgtatttttaaggtgggcaagtgcgattaacgatgaaccattttaaaggggaggttatttgaaacctctaatttgattattgggaggattttcatgctttctttagtatttattaccatcataccgattcaaactattttattgtctaatacattagcattttgtattttgatggaaattgttacagaatttaaagatttgatgaaataagatgtagcagattttttgtagcaagtttctggtaaaagggttttttgcaagtctcaggttcttgctgcactatttttttttaaatatttattccagttattctaattcagaagcattcttttcaagtaacagcagcacttgtgaaaggaaaaaaaaatgcacatgtttcttagtaggttactaaatttgtacaattaattaagattttagccatcagtgagtttgaaaagggaaatgtatttattttcagcattaaaatgcttccaaaagatcaagttgcttttgtttgtttgtttttttaaccgtaatgtagatggagaaattggaggcaacctcagtataggaactgccactttgaacagtttaggtcttaaagagaaagtcaatctaatgccaaggggagaacaatgagctgaaattgtaccaactcctctggccctccttccctcaattaaaaaaacacacttaccagttttgcttattttacagatatctggtggttctatagtttaaagcagcttgtgaaattaaaaaagtggactcaattttgtttacctttctgtaagtttttcatttttgctgtatagcattggcaaaaatatgtacaaattgacctctgttcttatttcctattgtgagcattataaagataagctcctatgtaaaaccttgctctcagatgagtaaaatatgtatcacagcatagctcagcaataattcatgctcagctgtggggaccctgggggctttttgaagatgatggaaccgcactagggttgaaactgatggctgtggagttaattgtgttttcgagcttgaatctcacctgtgattttttttttttaatgttgtttcatgacttgatttttctcataagccaatgtatttgtaggtttactggattttatttttagggagtgggtaatttcttcccttttttgattaagttggttcagctatggtgctattcagtaggtatcttcagtgtcaggtcccgtagctgaatgccattgttattataattattatttgtaatcacattgtaagcttgaatttgggcttgtacctgcatcttttgtattctgtacatctggttacttagactttgggagtccaatttggtttcagtcatgtatgtctactttgtagtttaagtagacttcatcaactatggtctattttgggtttgtagttttaatttagaattgtgttaaattgatgttttgcatttgacttcatttgacattagttgaagtaaattatttaatttttgaattctggaatttgaacatttactgtaatttgtaatataactgctgtgaaatacttgaataaagatgacaagaaaa

SEQ ID NO: 463471 - DNA, 2459 bp, Homo sapiens
tttaacctgtatctcaaattcattccctaaaaatttaaagtgaattcttccgtaatgaggaacacttttgtctttcccttaatagataacatgcattttttttccttttataggagatggaaagaacagttcatatgtttgagacattcctatgaacttttcaagatgagtggtttatcctctccaatctgctcctcacagagcagtcttctgagccattcaatttcaaattgcaccaattatgtgcagagccttggtgtaaagtgctctctcactcattctttctctctgttgaatttggtgctattgtctcaggtacctgaaaccaaccagcctacaagaaccaaacagaacttcagaaacatgttgtattttccacaaataaaaaatacaaccccacagcttggagattttggtgctacagaaactgctctcgcttctgctcctctttttgtgcactctcttttggagactcctctcttagggagcagaccagcaaacaggaggaaactggatgggggcagttctaactgtgttgaattgtttaaacagtgggcaacttgttatttttttttcctccattttacccctttaatcatatttttcccccatctgggtaatggactgaaacctgttttagagttggctatggtctgttctggtgggaagctgaagaaactggatgaaattaggtcaggctctttagaactgcctttaacgtgcctttttattcatttgaggaagataaggctaaaaggatgggctgtttgaagcaaataaattagaaatatttctttggtcacaaccttgaaaataagttttgatactctatgtcattaagagacaaccagtgtttgggtatgaaatgcctgtcttattctcaaagctcaatcaagacacccagtaagccacataatatactaaaatggtaagttttcttgtaaggtctgttttggtttaagaaacatgaataacaacaaagaataatacacagtccacacacaaaaaaacaaaaaacaaaactgcacacgttttggtattgccaacaatgatgactagaaaataaatagatagtggccattttttcttctgtcagtggcaatttaatagttattcatgtttgagttcccagagaaaaatggttttcatatgtagtaaattgttgttttgttttaaagccaggacttgccaaatggacagaaaagagaggaattcatcagaagctccataaaattcattttctgtatgcttaattgcaaacgagctctggtatggtccttgaataacagtattaatgtttaaatcccatctcctaagcttaccttcacaactcttctttttgattggaaaccattttgaatcttgttgagtgatttctgtgaattgtatgtatctgaaattaattatgggttactagttttacaaaaactttctacaaatttggagacacagtctaggcagttgcaatgaggcaaaggatgcagtgactttttttatcagatgatttttaaacaaaaagaaaattttgccagcaagttggcttggtatcttcattcattgtagccgttagctgcaggtgtgtctttccaatatatgcaacacatgtagtttgggttttaattagggcgaatggtcttggactactgcagagattctgagctacctcagctttttgtattttagttaccaacagtgtttacagagtcttgtaatcactttgccaccgtttacatcctgaagctaaggtacttgtctccttgtctttggctctttgtagtgtgcagaaagcatactttggccatagcctactgcagtaatccaaagtgcttctttgcatttacatttacatctaacgccttctaattctagcttaatttttttttaaatgccacgtgttttctttgtacctagtctgtgaagtttctgtaatatccagttagtcatacaagtcaagatgctacccatgtagacacactgtatttttaaggtgggcaagtgcgattaacgatgaaccattttaaaggggaggttatttgaaacctctaatttgattattgggaggattttcatgctttctttagtatttattaccatcataccgattcaaactattttattgtctaatacattagcattttgtattttgatggaaattgttacagaatttaaagatttgatgaaataagatgtagcagattttttgtagcaagtttctggtaaaagggttttttgcaagtctcaggttcttgctgcactatttttttttaaatatttattccagttattctaattcagaagcattcttttcaagtaacagcagcacttgtgaaaggaaaaaaaaatgcacatgtttcttagtaggttactaaatttgtacaattaattaagattttagccatcagtgagtttgaaaagggaaatgtatttattttcagcattaaaatgcttccaaaagatca

SEQ ID NO: 463472 - DNA, 3061 bp, Homo sapiens
tcactggtgacctcccgggtagccaagagcttcccccttctccgtgagccctctgagactgcaggtcccagacggttgtaaattctgcctggtggaaattgccaaggctccaaagcaggcacctgctgccctcaggagcctcttttttattgctgccctctccatccgcaccagtgcctctctctgccagttccactgttctctcgcctgctctttaggatttcctttgttttgcctccttgcctggtgctttcagcgagcagcgctgacgtcatctcaggaaccgtgctgcgtctgagagaagaacctgcagtagctgtttaagtgtgcggtgctggcagagtacctccctgaaggtgtcctggggaaagcccagcgagcagcaccggtgattgatgatactacagcgcatcccaggagctggtatcccagggcagcgctgcacctgctggcagccaaacccttcggggcaggacaccggcccacagcctcggagcgcccagtgtggtgtcagcacagcggcaggtcaccgttcaggaaggacccttgtaccgcacggagggctcccacatcactatctggtgcaatgtgagtggctaccagggaccttctgaacagaatttccagtggtccatttacctgccttcgtcgccagagcgagaggtgcagatcgtcagcaccatggactcttccttcccctatgccatctacacccagcgcgtccgcggagggaagatcttcatagaaagagtccaggggaacccaaccctattgcacatcacagatcttcaggcccgggatgccggggaatatgaatgccacacacccagcaccgagaagcaatactttgggagttaacagtgcaaagatgaacctagtggctgtttccaccaaatcctcctgtctttcgtggccaacaccccaggcaaggcttggggcccccgtctgctgctggacgcagagccatgaagaagaagttagtggtgctgggcctgctggccgtggtcctggtgctggtcattgtcggcctctgtctctggctgccctcggcctccaaggaacctgacaaccatgtgtacaccagggctgccgtggccgcggatgccaagcagtgcttggagattgggaggaaaagctgaggtcatcaatgcccgcgaggtggcccccaggctggcctttgccagcatgttcaacagctcggagcagtcccagaaggcactttaggaggccaagtcaggaggagcgcatgagcccaggagacctgcctggacaacatagcaagactccatctctacaaaaaatggaaaaaaaaattagctaggttatggtgaagcctctgcttcctgtctgagggaagtgggggctcgtggagtgtgtgactggaaggggatggatctggtctatggaccccttggattgctgtgtaaggggcagggagcatgtggggacctgtccggaggagggctgtcggtggcggtgcctggggagatccgaggctatgagctggcacaccagcggcatgggcggctgccctgggctcgcctcttccagcccagcatccagctggcccgccagggcttccccgtgggcaagggcttggcggcagtcctggaaaacaagcggaccgtcatcgagcagcagcctgtcttgtgtgaggtgttctgccgggatagaaaggtgcttcgggagggggagagactgaccctgccgcggctggctgacacctacgagatgctggccatcgagggtgcccaggccttctacaacggcagcctcatggcccagattgtgaaggacatccaggcggctgtggtgcagccccatcccagcgcccattcgagctgctgtcccattgcagggggcattgtgacagctgaggacctgaacaactactgtgctgagctgatcgagcacccgctgaacatcagcctgggagacgcggtgctgtacatgcccagtgcgcggctcagcgggcccgtgctggccctcatcctcaacatcctcaaagggtacaacttctcccgggagagcgtggagacccccgagcagaagggcctgacgtaccaccgcatcgtagaggctttccggtttgcctacgccaagaggaccctgcttggggaccccaagtttgtggatgtgactgaggctcatggcatccagcagccactcaatgtcaatacctccatgttcatctctcagcccgcccttgcccctctggggtctcagcaggtggtccgcaacatgacctctgagttcttcgctgcccagctccggtcccagatctctgaccacaccactcacccgatctcctactacaagcccgagttctacacgccggatgacgggggcactgctcacctgtctgtcgtcgcagaggacggcagtgctgtgtccgccaccagcaccatcaacctctacatcaccaatgagtttggggcacccccctcacctgccaatttcatccagccagggaagcagccgctcttgtccatgtgcccgacgatcatggtgggccaggacggccaggtccggatggtggtgggagctgctgggggcacgcagatcaccacagacactgcactggccatcatctacaacctctggttcggctatgacgtgaagagggccgtggaggagccccggctgcacaacaagcttctgcccaacgtcacgacagtggagagaaacattgaccaggtgggccgggggttggagaaactgagtcacggtgtggggtcccagggcatcctgggctggaggcctggatcatcacagagtggacaatggttggtgtcctctctctagtgcctgggccatctggagcccctgtgacatgagggccaagccccctgctccagtgagacccagcaggccccaacctgctcttcctgatgacctggcctgaaatggcaccacctgggctgaggcctgtgaccacacaggtgtggttcaggtggcatctggagccctgctcaggcttcccctctcctcccacccccaggcagtgactgcagccctggagacccggcaccatcacacccagatcgcgtccaccttcatc

SEQ ID NO: 463473 - DNA, 3035 bp, Homo sapiens
tcactggtgacctcccgggtagccaagagcttcccccttctccgtgagccctctgagactgcaggtcccagacggttgtaaattctgcctggtggaaattgccaaggctccaaagcaggcacctgctgccctcaggagcctcttttttattgctgccctctccatccgcaccagtgcctctctctgccagttccactgttctctcgcctgctctttaggatttcctttgttttgcctccttgcctggtgctttcagcgagcagcgctgacgtcatctcaggaaccgtgctgcgtctgagagaagaacctgcagtagctgtttaagtgtgcggtgctggcagagtacctccctgaaggtgtcctggggaaagcccagcgagcagcaccggtgattgatgatactacagcgcatcccaggagctggtatcccagggcagcgctgcacctgctggcagccaaacccttcggggcaggacaccggcccacagcctcggagcgcccagtgtggtgtcagcacagcggcaggtcaccgttcaggaaggacccttgtaccgcacggagggctcccacatcactatctggtgcaatgtgagtggctaccagggaccttctgaacagaatttccagtggtccatttacctgccttcgtcgccagagcgagaggtgcagatcgtcagcaccatggactcttccttcccctatgccatctacacccagcgcgtccgcggagggaagatcttcatagaaagagtccaggggaacccaaccctattgcacatcacagatcttcaggcccgggatgccggggaatatgaatgccacacacccagcaccgagaagcaatactttgggagttaacagtgcaaagatgaacctagtggctgtttccaccaaatcctcctgtctttcgtggccaacaccccaggcaaggcttggggcccccgtctgctgctggacgcagagccatgaagaagaagttagtggtgctgggcctgctggccgtggtcctggtgctggtcattgtcggcctctgtctctggctgccctcggcctccaaggaacctgacaaccatgtgtacaccagggctgccgtggccgcggatgccaagcagtgcttggagattgggaggaaaagctgaggtcatcaatgcccgcgaggtggcccccaggctggcctttgccagcatgttcaacagctcggagcagtcccagaaggcactttaggaggccaagtcaggaggagcgcatgagcccaggagacctgcctggacaacatagcaagactccatctctacaaaaaatggaaaaaaaaattagctaggttatggtgaagcctctgcttcctgtctgagggaagtgggggctcgtggagtgtgtgactggaaggggatggatctggtctatggaccccttggattgctgtgtaaggggcagggagcatgtggggacctgtccggaggagggctgtcggtggcggtgcctggggagatccgaggctatgagctggcacaccagcggcatgggcggctgccctgggctcgcctcttccagcccagcatccagctggcccgccagggcttccccgtgggcaagggcttggcggcagtcctggaaaacaagcggaccgtcatcgagcagcagcctgtcttgtgtgaggtgttctgccgggatagaaaggtgcttcgggagggggagagactgaccctgccgcggctggctgacacctacgagatgctggccatcgagggtgcccaggccttctacaacggcagcctcatggcccagattgtgaaggacatccaggcggctgtggtgcagccccatcccagcgcccattcgagctgctgtcccattgcagggggcattgtgacagctgaggacctgaacaactactgtgctgagctgatcgagcacccgctgaacatcagcctgggagacgcggtgctgtacatgcccagtgcgcggctcagcgggcccgtgctggccctcatcctcaacatcctcaaagggtacaacttctcccgggagagcgtggagacccccgagcagaagggcctgacgtaccaccgcatcgtagaggctttccggtttgcctacgccaagaggaccctgcttggggaccccaagtttgtggatgtgactgaggctcatggcatccagcagccactcaatgtcaatacctccatgttcatctctcagcccgcccttgcccctctggggtctcagcaggtggtccgcaacatgacctctgagttcttcgctgcccagctccggtcccagatctctgaccacaccactcacccgatctcctactacaagcccgagttctacacgccggatgacgggggcactgctcacctgtctgtcgtcgcagaggacggcagtgctgtgtccgccaccagcaccatcaacctctacatcaccaatgagtttggggcacccccctcacctgccaatttcatccagccagggaagcagccgctcttgtccatgtgcccgacgatcatggtgggccaggacggccaggtccggatggtggtgggagctgctgggggcacgcagatcaccacagacactgcactggccatcatctacaacctctggttcggctatgacgtgaagagggccgtggaggagccccggctgcacaacaagcttctgcccaacgtcacgacagtggagagaaacattgaccaggtgggccgggggttggagaaactgagtcacggtgtggggtcccagggcatcctgggctggaggcctggatcatcacagagtggacaatggttggtgtcctctctctagtgcctgggccatctggagcccctgtgacatgagggccaagccccctgctccagtgagacccagcaggccccaacctgctcttcctgatgacctggcctgaaatggcaccacctgggctgaggcctgtgaccacacaggtgtggttcaggtggcatctggagccctgctcaggcttcccctctcctcccacccccagggcaagagagctcaaataaaaaccagaggactga

SEQ ID NO: 463474 - DNA, 2211 bp, Homo sapiens
ccagccatgagctcagggggctgcctggcgggcctgagcctggggaatgcagggcctcgggtccacagcggctgtgcagacggcggagcagaagagggagaggttcgtcttccaggctgcaccgcgctggcggcgagcgggttcacagggagccggcggcggtggtaccacagcctggtgatgtcagacaccagtggttctttcagaggggtctctccagccccaagcaggaagctgttttccttctgtgtgtgcagccaaggcccctggaggggctgagagtcggggctgagtcttcctggggccagggccccccaacaaggcctccgatgagccccagaggacctccctctcagtgtgaagatcattcaccgatgaagacagacccagttggatcccctttgtctgaattcaggagatgtccatttctggagcaagaacaggcaaagaaatactcctgtaatatgatggccttccttgctgacgaatactgcaactattgtcgagacattttacgaaatgtgaggaactgagaacttgagagggtagggttttatctataaaatacaagcatttatgactccttattaatcatttttatttgaagagaccccgtcaacagatgtccaatggtaacccactgcactgaagtgcttacatgctatgtacctatgttgtagtcattgagttctggaaggtgagatcgatattcagtgtaatcagttggaaattctccaaggtgctaatacagataactttaggctctaaatacaaattcagctattttttagatcctaattctgctcattttgaataaagtgttggtaataaaattcaccctggaattttcaatggtgccgaagagccatttgattgatacgcgctaactgaagatggagcaggacttcgcagctgagtgatctggcatgggtattgtcacgattggatttaatcctagaattggctgtggaaaacatgaataaatctttcagctattctgatcttgcgaggtggaaaacgagttttggcgatatgctctgttacttaccccaggtggaggacttgcttacttccttctggaagtctctgcagcaagacacagtcatgctgatgtcattgcctgacgtgtgccagctctttaaatgctacgacgtccagctgtacaaggtaggaggacgcactatgcgaatggtattgaaaagtaagaggcgtgtcagcgttttgaagtcagatctacaggccatcatcaatcaaggcactttggctacttctaagaaagccctggcaagtgaccggagtggcgcagatgaactggagaacaacccagagatgaaatgtttaagaaacttaatttctttgctgggaacatcaacagatctcagggtattcctcagctgtctgtcttcacatctccaagcatttgtgttccagacaagcagaagcaaagaagagtttaccaaattggccgccagcttccagctgagatggaatcttcttctcactgctgtaagcaaagccatgaccctctgccacagagatagttttggctcctggcatctgtttcacttgttgcttttggaatatatgattcatatacttcagtcatgcctagaggaggaagaggaggaggaggacatggggactgtcaaggaaatgctaccagatgacccgactctcggccagccagaccaggcacttttccattctctgaattcctcactgtcgcaggcgtgtgccagccccagcatggagccactgggggtgatgcccacacacatgggccagggccgatatcccgtgggtgtgagcaacatggtcctcaggatcctgggcttcctggtggacactgccatgggcaataaggtgctgttggaagatgaaaccactgaaagcgcagttaaactcagccttcctatgggacaagaagccctcataaccctaaaagatggacaacaatttgtgattcagatatcagatgtaccccaaagctctgaagatatttatttcagagaaaacaatgctaatgtgtgagattatttatttgaatagagaataagaaaactgatagacttgcattcttaaaaatattaaatactaaagtttttctattgacgaaagatgatgttatgtatataatagatgtagcattgtctattttatgtttatatgtatttcaaggaggtggtttcgataaaatatgtaaactgattt

SEQ ID NO: 463475 - DNA, 1241 bp, Homo sapiens
  misc_feature (5)..(8): n is a, c, g, or t
  misc_feature (12)..(12): n is a, c, g, or t
  misc_feature (14)..(16): n is a, c, g, or t
cctgnnnncttntnnntcctccaaactattccaacctctgcctgtcacccagttccaaagttgcttccacatgttcaggtatcttttcagcagtgccccactctactggtaccaatttactgtattagtccattttcatgctgctaataaagacatacctgagactgggaaatttacaaaagaaagaggtttattggactcacagtttgacgtggctggggaggcctcacaatcatggcagaaggtgaaaggcacatctcacatggcggcagacaagagaagagagagcatgtgtaggcaaactcccatttttgaaaccatcagaactccgacaccacgaacccaccgggaggaacgaacaactctggatgcgtcatctttaagagctataacactcactgcaaaagtctgcggcttcactcctgaagtcaatgcctgcacttggttgaccctaaaccagattcctcaacaggtcaacagcaacccacctgcagtgaccatttcaccatcacccactatgtcatcaggtacccttcctgagggcattccccatcctgcaaaggacatccctgattccacatgaggttaaggagacgctgctgcctacccgtttcactctaagcaaattcacataatgatgtttttcaccctaaatgccaaaacccagagttttttacaatgaaaaatctcttctgagtaaacttgaagtctactctggaagttaagtctactagaatttttttaaatctggtgtaattatttcacaggtcagaatgtggaatccaaagacgaaatagaaagcagatatgtctcatcctgctgaggctaactgaacattctgtatacctctgggagagatcttctatgtacatgaacatagacagagtctcactctgttgcccaggttggagtgcgatgacacgatcttggctcactgaatcctccacctcctggattcaagcaattctcctgccttagcctcctgagtagctgggactacaggcgtgttccgccacacccagctaattgttgtatttttagtagagacgaggcttcaccatattgaccaggctggtctcaaactcctgacctcaggtgatccacctgtctcagcctcccaaagtgctgggattataggtgtaagccaccacgcccagcctgtaacagttaactttatatgccaacttgactacaccatagggttcccaaattaaacattatttttgaatgtgtcactgagg

SEQ ID NO: 463476 - DNA, 1811 bp, Homo sapiens
  misc_feature (2)..(2): n is a, c, g, or t
  misc_feature (4)..(4): n is a, c, g, or t
cnancaccagaggtatctgatctattatcacacagaatgtgggccaggccccttcctgacttgacccttggaatgactgagatacaaacacaggaagggtacgtggccttaggccaagctgtggcagagaaaacttcagagcatctctacattcctttatctgctgtctcctaccttgaggggccgcctgacctgcagactttaaggcactcatgtagtggcagctcctggaactcccactgcttcaccgcctttctgcggggctcccctgccctactgcctggatcctacagctccccagtagtcccaccaattgccattaaacctcccaatctttactgggaggatctctacttactgtttcaaggcaaaaagatgattaaactatctcacatggttgtaatttgggcctaaaataaatgactctagtggtagcatttcatgtaggcaggtccaaggaagacagatttgtagacagagttgggaaaagggtcaaagagccaatgagtctccctatcctgagggatgccttgacggagccacagcatgaactcatgttttcctgaatccatctcagttcatgtgacaggatggaaatgcttcctttcttagccagtgttgcttgtaacgagttccctgcagctcagggaagggagcaacatgtactgctttgttgcttcctgtatagagaaggcaggaatgaggaagttcagagaacactgtcctgagcagctgccacaggagacccagcccaagctctgcatgcagaaaggcacatggcaagaaattcccatcctgcacacgtggatgtgatggacaccctcactccttaaattttgaggcaactagactgaaaagggctcttgcttgatttaaacaattgaactcttccttttggctcaggcatcttgttgcttcttgcactggctttgccactgaccttggcatttgctattttttgtctttttgataatagccactctaaccggagtgagatgatatctcattgtggttttgatttttatttccctgatgattagtgacgttgaacatttttttcatgtctttctttgttggctatttgtaagtcttcttttgagaaatgtctactcagatcatttgcccattttttaatgaaaaaaaattttttttttccgttgagatatttgagtttcttgtgtattctggatattacttctcctccattgtgaatagtttggaaatattttctcccattctttagattgtcctttcagtctgtcgttttctttgctgtacagaagccttttcaacttgatgtgatcccatttgttactttttactttggttatctgttctttttgaggttttacttaagaaatctttgcccagatcaatgttctaagttgtttcctctatgttttcttctagtagttttatagtttcaggttttagatttaggtctcagatccactttttgattaagggtgagatgtaggggtctagtttcattcttctgcatatggatatctggttttaccagcacattttattgaaaagactgtcctttccccagactacccagatgtttttccctgaaaaacagcacagaattatatactagtgaactttttgaaaagtacatgttggagaagggtgtgtgtgcgcatgtgtaaaatgtatttggatctggcatttcagcttgttaggagattcttttgaaatgtgattgtatcatcaatcaaattagttctccctctcagctttctatcattttcaaatgtggcaacaatgacttataatgctgtttaaatatagatagaccattcatc

SEQ ID NO: 463477 - DNA, 969 bp, Homo sapiens
gtgggtatttttctccttcataatgaccgcctactctagaatgtctttaaacattttaagcattcttatttgtattctgtacctcaagattccattgcctggaagccctatgactgattccaggaccaccatccccctcactgtctctgaggcacctgcgtggaccgggtctggattgagtctcatttctctggattcccacggcagccggcggctgcctctcccacacccgtcactctgtgtcatggaaagctgtgtgtttgtcttcattcccaccgagtctgagccactcgaggtcagggccatgaccgtgagctacacgtccttggcgcccagtgtgagccccacacatcagcatgggcctgtgtcccccaggccacacgtcggcatgggcctgtgtcccccaacccacgtgtcagcatgggcctgtgtcccccaacccacgcttcagcatggggcatgtcccccaggccatgcgtcggcatgggccatgtcccccaacccacgcgtcagcatgggccccgtgtcccccaacccatgcttcagcatggggcatgtcccccaggccacgcgtcagcatgggccatgtccccacataggtgagtccctgatgcaggttgggtccccggggaagctcactcagagacagaagagtgtttattggtggcggggcagtgctcttgggtttagggtctgtgaagggagagaaggaaagccagtggggtagagggagtcgtcgggcagtgatgccctaaccgctggtccctggggaagctctggagctggcacaccccttcagggttgtcccgagtggagcctggggccaggcctttatccacagtgtgggccgccaccaggtgcaggtgcccaggaggggcgtgttatgggttgaattgtgtccctccaaaaagatacattcaagtcccaagccccgctacgtgtgaatgtgacaaatccactgtagaaacc

SEQ ID NO: 463478 - DNA, 821 bp, Homo sapiens
gtgacaccaatgaggagcaggtccctgttttgtctctgcctgggctggcctgtctggaacagtcttctagggtcacagtgcacgtctgcctctgggcagctgcctgacccaggcctccacgagagcagggaagaggcacagagacgttccatgatggctgggtgaagaagcaggcagtcgggaaaccctctgcctgcagagaccacctgcagatgggggcctcagctgcctgcagttgcccagggcatggaagcacaaagctcatttctgttaccacatcactaactgcaggattggacctcagcatgcatactggttctggcacaaaaggagctgatttcttgttcttgcaactgtcccaggcaggggttcctgctcagcagatggtgcctctcctagaagtaattcagggaccagccaccttccatcctaggcctccatcacagcccttgggcctcgctgtggtgtgcacccccagcagtcagaaaagagggagactgggagcacatctctgtggctgcaggcgtcactttctgctgttctcttgtctacactttctgtgttttgttggacaatccagtcgtcaggccgtgcccacctgtcatgttggatgggaaatgtagtccagcagtatgtccagagagaagggagaaatgattttggtaaacaaccaaccatctccactgcaggtgatgcaggcaaacccaaaaacgggggctcagcctgagttggttcttggcttcattcagggaagaattcaagagcaagccaacggtgaaagaaagcaagtttatatagcgtagtgaacagcaagatggctg

SEQ ID NO: 463479 - DNA, 2782 bp, Homo sapiens
gaggagggagtgggaagtggggactttaaatgaagacaggtgacaaggcacttagctgattaaagaaggaaagactaggaatggccagggctaccagtaaattactgatagccagtgacctccccaagggaccctagaacccaggatcccactttccacacctgcaggtcacccgttggctgccagatccatgtcaggttcctttgagttcagctgcagcctgctgacttgggcacttcccccaacagcctgcttggctgaccacatcccccagatggttccaaactgtcagccttttgagcccacagacacgctgatgatctggaaggccttcatcagcccttctgaaagagatcttgcggatgccagctccttttcaactcagtacatggaacatgcagacaccagccctgctgctgagaacaatgtctgtcagaaacatgctttccctgagaggacaaccattattagtgggatgtttctccccaacctgccttttgaaagaaacccagaattatttttaaacagaatttggaggcttccaaatacaacaaatattcaaactgcctgtgggttcctacattacaagtccttgctttgtggtggggagaacagaggctatggagccaatggttctggggacatagggggcctcggaggcctgctccgtgggcctgaactgccttctcttgctttctcttctccgcttcctgggcatcaacccaaggaccctcaatgccttgacccggtggttttcaactctggccgcacactagaatcatcagaagaacttactgagatatggatgcttacaagcaactcattgtcctcagaaaatagcagctgcttctggggagtattcggcattgggtgtgactacttaggggagcgagctttcagcagaaggcctgagccttcgtccgacaggaaaggaggaagtgactcataccacctgtgcacatcaggagacagtcatgtgaactacagctgttgccagtgccagctgggcattgtgcaaagcaggacttgaatgtgtccatcacatgcactctgtggtcgagccatcagatgccctgagtaattaatgttcacatggctttgtgaaatacaactatgtaggctagctcgtcaagtgtttttacaagagctgacgccagtggaacccactcagcttgcttttcctgttccagctttttcacgcacagtcaggacccccctggaacttcatctactgccagctcccccattcccctcccacgagtgtgggtggccctcttagcctctgaccgcatactggaacctgcggaggcagtgttaccagacctgaggtcttcctctgcatttcatttgctgttccctggcctgcaatgccccttccttcccacctcccccgagggcctagcagcccctcctacacagccctctagcccctctgtgctcaaagtgcatctgaggacatcacctgagagctgtaggagatgcaggatctcaggccccaccccaaacctactgaagccaaatctgctgtttaacgtgatccctggagattcataagcatgttgtctgtgcagcacggagtgaggggcggctcctcttcgctgcaccccttcctgattacccctaggcccagccaaataaactcttcttcctgctcccttgtgccccatttggacttcactcgtaacaagggagtataactggatggtaaaagggacttttcctgttatctagacatttcagcagaggcctcaaaggcagaacaaaatagtgcaaggagccgcacatccgcacagtgctgagaccctgcccaggacaagcttggctttttagcttctgttgtgatagaacaaaagagtttttgacattttgtaacttcttccagtcttttatctttcagtttttgtctgagacttctactaggatgttttcttctcaacacgcttgatttttgtatagttaataattttgaaataaaggcattctcaagagcagttcaaatgcacttgaaaattgctgaaatgtattgagttgcatattgcataatcaaattacttttttgccacatagactgatctattgctgtgtgactttgggtgagtcactgtacctctcagggcatctgcttctcaatctgtacaatgaggtgactctcgagaatccccaagttccctcccagacctcagatcccatgaagaacaaagagcctcaggtgcagaactgcgaaggagaggtctgctcagaaatcatgtttctttcttttgcttccctttgtaatttttcaagaaaaattctttagtaatggtgttcttgggctatagcagatgaaaaaaagagaaagtcaggttctttggggttaaatggagcatttaatgacagttaagcaaaaagatgtgtgctgggcctttttctcacgttggatgtttggctaattgatcagcagatcctggcacccaagtgacaacctgcattgaaaaggcggaacttggctctcctgccctgccagctgtaagagcttgaaagcaaagctatggggggaatgtctttcatttccccctggaagctgggaggacgttcagcttagcattgccaactgtgtaatgtggacttgcctctaaaagaagcctttttccttggatgtctttcaggccgcagtattccctttggcacccccacccacctggaacaaagcctgatgtaaagtctgggtgcgactcagaccggcctgggaaagaatttatttaataaatggtggaaagtggcttccttgacgtgtcttcgatgg

SEQ ID NO: 463480 - DNA, 197 bp, Homo sapiens
acatttcagcagaggcctcaaaggcagaacaaaatagtgcaaggagccgcacatccgcacagtgctgagaccctgcccaggacaagcttggtgagtggaaaacttcctttgtcagcccttcgcgcacttccagcctcagatcgaggcatcagggagggtttccttgaagagggtgggctgagggctgtgtgttccca

SEQ ID NO: 463481 - DNA, 343 bp, Homo sapiens
tggccaggagcggcggcggcagcaacaggaggcgatctcgcgagaggcgaggccaaaaccctgcctcgctagcgcagggagaagtcgcaccagtcggagcgcagagggacacgcagacatttcagcagaggcctcaaaggcagaacaaaatagtgcaaggagccgcacatccgcacagtgctgagaccctgcccaggacaagcttggccgcagtattccctttggcacccccacccacctggaacaaagcctgatgtaaagtctgggtgcgactcagaccggcctgggaaagaatttatttaataaatggtggaaagtggcttccttgacgtgtcttcgatgg

SEQ ID NO: 463482 - DNA, 688 bp, Homo sapiens
gaagcattgtggtaacgcatggggtgctgctgaatgggactcattgcactctgcaacctggctctggcgattcagaccgtgaatgcttggattttgatggtcctgatgaaatggttttccttatgcaagcaaagtaaggtggccttttcaatccttccagctaccagtcagtccacaagcacttatgggacaccagaccttgcctggagcagccttggggaatcaaataggagccagtccctgccctccagaaactgtgtgtctgggggagaagatcacacacaggaaaatcaagtggtgacaagaggtgccatgagacagtatatagttcatttccccaccgcaagagtaaagggcttagggtcagaggctttggtgcctgagttctgactctgccaattattagcattgggacctcagactcagctggcagagaggagaagcagcgggacatcaggactatggctggacgtcagagagaagcagcttaacttcagaggtgcagcttgatggtgtaacttaggagaagaatctgactggagacggccagacttcagaagaagatgacctacccccccatccccttttcagcttcccttcccgctgagagccacttttattggcaataaaatcctccacatttaccacctttcaatgtgttcatgtgacttcattattcctggacacc

SEQ ID NO: 463483 - DNA, 1100 bp, Homo sapiens
gcgactctaccgagctttgtcatccccttcgatcaatgttgtctcctgccccccagggggtcaatgggatcctttgagccaggacgtttttccagtttctgaatccaattgtaaatccctcatttttttaaaaacctctaccagacttttaaaaagttgtcctcaaaaaactttctaatctagagagagaaagagcacggcaacttctaagtgatgctggcgagaaagtcaggagacttggcacttacaactttctaaagatctgaatgcaaatgtcacctggagcattggagtatgccgaggcccctgggtgatgaaagtgagggagaaatgagagggcaggggtgcgccaaataaggggggatttcactcctgtccatccctgggcttgtgtaactcaaggtattggagagtcaaagtgtgctcttggttttactgctaccatgaagagacgaaaagcgagcccgcagacttgtggccctttccctgacctgatttgttatctctcaagtgaggccaagaagatggcttctgcccaggattccaggagagtgggactgcacacagcacataacttactttgcaaggagggattgcttgtggttttcgttagctctggagcttcggaagtcactgtcaagctagctacttcccaggaaaatatgcacttaaaaggtctcctgggccatccaaattgtgggacaaaaattacctgtgtgcccttctttagccaactaggggccagaagtgatgttatagacaagctagggcctttcagtcctggtgtgacttcagtcctggtggctgacttgggtgctttgaccaaaacaggccctgtccaagcttccattttctggtgtttgtgtggtgttaagtaatatcgtgcatgtaaaaatgtttgaaactgaatgtgcatacacttctctttcctgctgccttgtgaagaaggtgcctgcttctgcttagccttccaccatgattgtaagtttcctgaggcctctccagccatgcagaactgatgtgaatttgcttctcttttgccttccaccatgattgtcaggcctccctagccacgtggaactgtgagtccattaaacctc

SEQ ID NO: 463484 - DNA, 1837 bp, Homo sapiens
cccttttagccatggctggagtggctgggatacagggcaacaagtccctaggctgcacagacttgagggccctgggtctggcccatgaaaccagtttttcatccttggcttccagggctggcatgggagggcctgctgctatgatgatgcatgtttatatgctaaattttgtgaaagattctggaattgctggaattagaggaaagagggatttacatgagaacgaagagccaagaagtcaggaacccacttggaaacaccactcagccttggaaaagccacccaattacagtggctgtggaggatcccgacatggtttgactgtgcttgggaactggttaggttctttggacttcacaaaaccattaattttaagttcacattttaaatatgaaatacagttagacaaccatgtgttttctcatgtcttttggtcaaacattttatgggtaaaatttatttcaaccaaactgctctaatatatatgcatttgttatagtaacccgggacccatataaaagctacattttcaatacaagataaaagtcattttgcaaaaactgcatttttttatgcctgctggtgcagctgtagcaacaactttactttttttttccatttttttgagagaagatgagaaggcacagatgttaaggagaatgccatgtgaagacatagacagagattggagttatgctgccaaggaatatctggagccatcagaagctggaagaggcaaggaaagattctccactggagtcttctgagggatgccaacaggctgcttagttgattcaagagaagactatgagtagggagaaaagttaaaacccagtcccacagattaatccaataaagaatagaagagaaaatttaatttcaaattttgttaatcagaattacttggggacttgttaacacagaagtcactgagccccaattccagagtttctgaagtctggggaaggctcaagaatctgtgtttctattaagttcaccactgatgctgatgctgctggtctgagtgaaatacatggagaaccactgacaatgacctcagagaacatgtgtacacttctgaatatgcttgagaccttaagatgtcaatatggtagtggttttaacttggacagggtatccaaaatgtgatataagtgctaagtcttacccatccagaaagtagagttgagattgttgataagtttctatctcaggtaagtgtcacgtaaggaactagggttggactgaatgtgtaacaatgaggtgagcgcatcgactcgaagtccaggtgggagatattggggagggaagacatgcttgaaataaatccaggggtctgaaatgttctactccttctgagtggagataagtgtggcgcacaatcttttaaatatacaaaggacagaaacactgctagaacataaaactgaatactcagtacaacaagggaaacatctatagtggactcatcctgcaaattgcaaactttcctatgagtgacccttacaaggaagcttaactttcaggggtttatcttgatttcttttgtaataaataaaaactccctctgcgatataatttatgaatgaaataaattatcaaatatagtaagatacaaaggtacttttagaaattttataggagtaactgtaattttattttattatttagccatgcttgtgcgtgagtatttttaagtaccaggagttaggaaggctttctagatatttgaaatgatttgggtgttgtgatctaagctgtatctgctttagaggacaccttaatcccagtaatgctgtggtccttgcagttttgtagaggtactgccttgatgatc

SEQ ID NO: 463485 - DNA, 905 bp, Homo sapiens
cccttttagccatggctggagtggctgggatacagggcaacaagtccctaggctgcacagacttgagggccctgggtctggcccatgaaaccagtttttcatccttggcttccagggctggcatgggagggcctgctgctatgatgatgcatgtttatatgctaaattttgtgaaagattctggaattgctggaattagaggaaagagggatttacatgagaacgaagagccaagaagtcaggaacccacttggaaacaccactcagccttggaaaagccacccaattacagtggctgtggaggatcccgacatggtttgactgtgcttgggaactggttaggttctttggacttcacaaaaccattaattttaagttcacattttaaatatgaaatacagttagacaaccatgtgttttctcatgtcttttggtcaaacattttatgggtaaaatttatttcaaccaaactgctctaatatatatgcatttgttatagtaacccgggacccatataaaagctacattttcaatacaagataaaagtcattttgcaaaaactgcatttttttatgcctgctggtgcagctgtagcaacaactttactttttttttccatttttttgagagaagatgagaaggcacagatgttaaggagaatgccatgtgaagacatagacagagattggagttatgctgccaaggaatatctggagccatcagaagctggaagaggcaaggaaagattctccactggagtcttctgagggatgccaacaggctgcttagttgattcaagagaagactatgagtagggagaaaagttaaaacccagtcccacagattaatccaataaagacggatgcgcccgcccccccccctgccgtcccctgcgctcatcccac

SEQ ID NO: 463486 - DNA, 4522 bp, Homo sapiens
ttgctatattggatgcagtaaatggaaatatagaagatgctatgactgcttttgaatctataaaaagtgttgtttcttattggaatcttgcactgatttttcacaggaaggcagaagacattgcaaatgatgccctttctcctgaagaacaagaagaatgcaaaaattatctgagaaagaccaggggctacctaataaagattttagatgacagtgattcaaatctttcagtggtcaagaaattgcctgtgcccctggagtctgtaaaagagatgcttaagtcagtcatgcaggaactcgaaaactatagtgaaggagatcctctctataaaaatggttctttgcgaaatgcggattcagaaataaaacattctacaccatctcctaccaaatattcactatcaccaagtaaaagttacaagtattctcccaaaacaccacctcgatgggcagaagatcagaattctttactgaaaatgattcgccaagaagtaaaggccattaaggaagaaatgcaggagttgaaactaaatagcagtaagtcagcatcccatcatcgttggcccacagagaattatggaccagactcggtgcctgatggatatcaggggtcacagacatttcatggggctccactaacagaatttaagtcaaccaaagaaggattttccatccctgtgtctgctgatggatttaaatttggcatttcggaaccaggaaatcaagaaaaggaaagtgaaaagcctcttgaaaatgatactggcttccaggctcaggatattagtggccagaagaatggccgtggtgtgatttttggccaaacaagtagcacttttacatttgcagatgttgcaaaatcaacttcaggagaaggatttcagtttggcaaaaaagaccccaatttcaagggattttcaggtgctggagaaaaattattctcatcacaatgcggtaaaatggccaataaagcaaacacttccggtgactttgagaaagatgatgatgcctataagactgaggacagcgatgacatccattttgaaccagtagttcaaatgcctgaaaaagtagaacttgtaataggagaagaaggtgaaaaagttctgtattcacagggggtaaaactatttagatttgatgctgaggtaaggcagtggaaagaaaggggcttggggaacttaaaaattctcaaaaacgaggtcaatggcaaaccaagaatgctgatgcgaagagaacaagtactaaaagtgtgtgctaatcattggataacgactacaatgaacctgaagcccctgtctggatcagatagagcatggatgtggtcagccagtgatttctctgatggtgatgccaaactagagcggttagcagcaaaatttaaaacaccagagctggctgaagaattcaagcagaaatttgaggaatgccagcagcttctgttagacataccacttcaaactccccataaacttgtagatactggcagagctgccaagttaatacagagagctgaagaaatgaagagtggactgaaagatttcaaaacatttttgacaaatgatcaaacaaaagtcactgaggaagaaaataagggttcaggtacaggtgcggccggtgcctcagacacaacaataaaacccaatcctgaaaacactgggcccacattagaatgggataactgtgatttaagggaagatgctttggatgatagtgtcagtagtagctcagtacatgcttctccattggcaagtagccctgtgagaaaaaatcttttccattttggtgagtcaacaacaggatctaacttcagttttaaatctgctttgagtccatctaagtctcctgccaagttgaatcagagtgggacttcagttggcactgatgaagaatctgatgttactcaagaagaagagagagatggacagtactttgaacctgttgttcctttacctgatctagttgaagtatccagtggtgaggaaaatgaaaaagttgtttttagtcacagggcagaactctacagatatgataaagatgttggtcaatggaaagaaaggggcattggtgatataaagattttacagaattatgataataagcaagttcgtatagtgatgagaagggaccaagtattaaaactttgtgccaatcacagaataactccagacatgactttgcaaaatatgaaagggacagaaagagtatggttgtggactgcatgtgattttgcagatggagaaagaaaagtagagcatttagctgttcgttttaaactacaggatgttgcagactcgtttaagaaaatttttgatgaagcaaaaacagcccaggaaaaagattctttgataacacctcatgtttctcggtcaagcactcccagagagtcaccatgtggcaaaattgctgtagctgtattagaagaaaccacaagagagaggacagatgttattcagggtgatgatgtagcagatgcagcttcagaagttgaagtgtctagcacatctgaaacaacaacaaaagcagtggtttctcctccaaagtttgtatttggttcagagtctgttaaaagaatttttagtagtgaaaaatcaaaaccatttgcatttggcaacagttctgccactgggtctttgtttggatttagttttaatgcatctttgaaaagtaacaacagtgaaactagttcagtagcccagagtggatctgaaagcaaagtggaacctaaaaaatgtgaactgtcaaagaactctgatatcgaacagtcttcagatagcaaagtcaaaaatctctctgcttcctttccaatggaagaatcttcaatcaactacacatttaaaacaccagaaaaggagcctccattatggcatgctgaatttaccaaagaagaattggttcagaagctcagttccaccacaaaaagtgcagatcacttaaacggcctgcttcgggaagcagaggcaaccagtgcagtccttatggagcaaattaagcttctcaaaagtgaaataagaagattggaaaggaatcaagagcaagaggagtctgcagctaacgtggaacacttgaagaacgtcttgctgcagttcattttcttgaagccaggtagtgaaagagagagacttcttcctgttataaatacgatgttgcagctcagccctgaagaaaagggaaaacttgctgcggttgctcaaggtgaggaataaaatgcttcccgttcttctggatgggcatcctatcttcgtagttggtttggacttcgataggttgatggaaggaatatttttattaaccaaataaaatctatttacaaaaatggttcatgtgtattaccatcattcttttgtcaaaaagtgtgtatatgtttgcatttacatatatttgtacatctatatgacagatgtattttaaaagtttcaacttgaagtaaaagtacaacagcttgaagtattgataccaggccacagccctctaactcatgtgatctcccatgcatgctgccagaataaaaccaccaggaatgaattcactccccacttctctggaacctcaggacccgcccatttctcggcagtactgtgaattttgaagttaaactaaattttggtaccataccaactggaatttaggctttaaaaataatgtttcaaggccaggtgtggtgattcatgcctgaaatcccactactttgggaggctgaggctggagaatcgtttgaggctagtgagctgtgattgtaccactgcactccagctcggggaacagagcgagaccttgtctctaaaaataataatagtaataaaaataacattttatgactatttattgcaaggtcagatttacagattgttataaattgttgagaaatttttgtgattagaatatgaaggaaaaagctttgttggtaaaagtgacatgttaaggggctatgaagtaaatatgctgcagttaattgtgctaagttaaaatacagtttagttatttgctttaaaataaactcttctttttttctttaaagtatactatctcaaaactcattatgttgtcagagccctagagctggctaatgtaacactgactatgagtaggtgggcccaccacttgagttgaggtgatttcatggtgtctttccaggctcttgatagggtgtcactgcatgcaagccatgaatctgttttgagaatcctctccattttcccaaataaaaacctatcccaacagtgactatatcactcagcattggatctaaatataaaagtggtgctttcagtgtttttggcagatagtgttccataagctttccatcagaagggattttagacaccttagaggtccgtgctacatcttcacagttcctctgaataaccttaggtggtagtgttacttgcctttgacacctctgcatatgttttaatgactagatccaaactgtgttgttcttaaatcaaaaattggataatttttaatatttatgtattaatcacatagtatgctctctgaagttctcttaagccttcagtttata

SEQ ID NO: 463487 - DNA, 462 bp, Homo sapiens
tgaaataaaatgttaattggaaacatgaaaattagcagctgataattatagtagtcattgcataatacagtaatggtctttgttattgtgctttcaggacaagagcaatctttcccatccttagggtcttgtaatagcaggggggctctgggagctttgatggcatgtctgcgaatagctagagctcatggacatcttcagtctgcaactgatacctgggagaacctcgtgtctgatgcaagaataaagcaaggcttaattcatcagcattgccaagtaagtaaagaaaattacctggatttgtacatgcagtagatccctttcatgtagcagttcaatatagaggcccctacattgtatcctgaactgttttagggagttcataaagagaatgagtagaaaccctagtctcccaactaaactttcagtaggccctttcttcaagctactgaaagtttagtt

SEQ ID NO: 463488 - DNA, 1281 bp, Homo sapiens
  misc_feature (43)..(44): n is a, c, g, or t
  misc_feature (46)..(46): n is a, c, g, or t
  misc_feature (52)..(52): n is a, c, g, or t
  misc_feature (55)..(55): n is a, c, g, or t
cgggatttacccccttggggaccctggttcttcaggacacacnntnggctcnttngagaagaattgaatactactgacttatactcttacaggaaagttactgacaatatttcttcctgtatggagaactttaacttggggaaatctttggaagacttccgattctcccatatggcaaaatatgtgtggattgctgagtatttttaccaaggttttaagcgatggattaaagagccaacgctggaaatgtttctgtctagaatcttagcatcctggactaattcagccatacaagtccttgaatcaagttccccgagcctaacggacagcctgaatgggaattcaagtatagttgggagacttttggaatatgtctatacccattgggaacatccattggatgctctgagacaccaaaccaaaatcatgttcaaaaaccttctccaaatgcaccggctcactgtggaaggtgcagatttcgtccctgatcctttctttgtggaattgactgagagtcttttacgattggaatggcatattaaaggaaagtacacgtgccttggttgtttggtagagtgcataggagttgaacatattttggctatagataaaactattccatctcaaatcttagaggtgatgggagaccagtcattggtaccttatgcaagtgacctcttggaaaccatgtttagaaatcataagagtcatttgaaatcccagactgctgagagttcttggattgaccagtggcatgagacttgggtttctcctctcctttttatattgtgtgaaggaaacttggatcaaaaatcttacgtgattgattattacttgccaaaattattaagttacagccctgaaagcttacagtacatggtaaagattcttcagacttctattgatgctaaaactggacaagagcaatctttcccatccttagggtcttgtaatagcaggggggctctgggagctttgatggcatgtctgcgaatagctagagctcatggacatcttcagtctgcaactgatacctgggagaacctcgtgtctgatgcaagaataaagcaaggcttaattcatcagcattgccaagtaagtaaagaaaattacctggatttgtacatgcagtagatccctttcatgtagcagttcaatatagaggcccctacattgtatcctgaactgttttagggagttcataaagagaatgagtagaaaccctagtctcccaactaaactttcagtaggccctttcttcaagctactgaaagtttagtt

SEQ ID NO: 463489 - DNA, 1289 bp, Homo sapiens
  misc_feature (3)..(3): n is a, c, g, or t
  misc_feature (8)..(8): n is a, c, g, or t
aancttanacagtttcttctggaacatgttcccctccaaagcattcagctttagtgaagaaggcattggggatcagaaacctataccccaaaatatggcgcttcaacttgctgaactgaagaagccgctcaaggtctctgtgaccctccccagctccaccctctctcttccaaagcacaggataaaatcgttctctaaagaagaaaaactgaagcttgtcaacgcagctgggcagacttttgtcacaaactattctgtgggcccgccggactttgtcccaggccattgtatgtttttcaaatccattgataatcctaaagataatttactaacccctcaaaatcatccatacttccccatctccctttctcctaggaagagggtatataaggacctctacctcattgggtatgttacaatggctagatgactcagacttttttagttaatgctgccacaaagagtttgcaggggattggagatgtttactgtaaatttctcccaccatgtatttattcacaaatgaactaaaaaaaaaatcattcatgaacagtcctgagtgcctccagtacctgatatatgcctgaagaagttgattcctggatcactgtctagaaggtagggggtggggttggagaggcatacaggagaacagagacaatcagtgtggacaccaaaccttgagcatgatttctgtacaagtcagtaacattcagtgcacggtagaacagacacaggtactgaactcaacaactaagtcatcttcaaggcctatcaaagcaaagaagagacaggtcttgggatcccacctccaacaatcagtgattaatctcaaggcttcaaaatgtgtagtgcttgaagaccatctctaactttaaaatcataggtgcaaatctgccaatatttgtaaagaacattaaattatttagatttctagagtcccatatttccttttaattcttcattattggtgtatcaaaagtgctagaaacagtttctgtcccataaaacacacaaaatatatatgtgcaaaatgaaagaatgagagagtagtctgaaaagcagaccaaaatgtatgcataaaaaagtttatcagagcattatgtactaagctaaaaattactggaaataaaagtctttaaaacagagctctagtcacataagtcttatgatcaatatctattcatacaataaaatatgcaagatttgcatttattgaaatttaatgacatcagaaaatggaaccaatacaatacaaccctacaaaataggatataaaattactttat

SEQ ID NO: 463490 - DNA, 1852 bp, Homo sapiens
ttcagtggatgcagcagctgatgccgccaggtccaacagagtgacagtgttccctgttggaattggagatcgctacgatgcagcccagctacggatcttggccggcccagcaggcgactccaacatggtgaagctccagcaaatcgaagacctccctaccatggtcaccttgggcaattccttcctccacaaactgtgctctcgatttgttaggattcgcatggatgaggatgggaatgagaagaggcccggggacgtctggaccttgccagaccagtgccacaccgtgacttgccagccagatggccagaccttgctgaagagtcatcgggtcaactgtgaccgggggccgaggccttcatgccctaacagccagtcccctgttaaagtggaagacacctgtggctgccgctggacctgcccctattttgttaacctatcgaaaatcaagaatgcaacagctgcatgtgaaagatcaatagaggataaaaagtgttactgtgaacgacttaaaaggatacctgcagtatttcatgaagatgaaaatttatttctagtgaaggattttaagataagtatatttaactacagatttatcttacaacaacaagaagaagaaagaataaaggctgaagagttgtatgaaaaagatacagaagagttaaaaataatggaagagcaatataggacacaaactgaagtgaaaaaacaatctaaactgactctcaaatcattggaagtggaattgaagactgtaagaagtaactcaaatcagacttctcatactcatgaaaaagaaagagacctgtggcaggaaaatcacttgatgcgggatgaaattgccagactcaggctggaaatagacacaataaaacatcagaaccgggaaactgaaaataaatatttcaaagatattgaaattataaaggaaaacaatgaagaccttgaaaagactctaaagctgaatgaggaaacattaacaaaaacaataacctggtatagtaaagagcttaatgttctgatggatgagaatacaatgctcaattttgagctagagaaggaaaaacaaagcaccccaagactggaaacagaaatggaatcataccgttgtagactggctgctgccctatgtgatcatgatcaatgtcagtcattgaaaagagacctacagcttgctttccagagcacagtgaatgaatggtgtcatttacaagaaaatactaattctcacattcagattctttctcagcaactttctaaagctgagagtacatccagtggcctggaaactgagctccgttatgaaagagaggctctcaaagaaaagacgttgggtatagaacacatgcaaggagtcctaagccgaacacagtgtccattgaaggacattgaacacatgtaccaaaatgaccaacctattttggaaaaatatgtgagaaagcagcagtctatagaggatggactatttcaactacaaagccaaaatctgttgtatcaacagcaatgtaatgatgctcacaagaaagctgacaatcaggaaaaaacaataattaatatccaagtcaaatgtgaagatactgtagaaaaacttcaagctgagtgtagaaagctagaagagaacaataaggggttgatgaaggaatgcactcttttaaaagaaagacaatgccaatatgaaaaagagaaagaaaaaggagaaatgaaaaacctggtcgttatcctttgaccatgttttaattgattgcctttttgttgttgatttgtaagagttctttatatattctgaacaagaatgtatttttttacacttttttcataaactttgttctaaatcttgtattcttgtttctgc

SEQ ID NO: 463491 - DNA, 4679 bp, Homo sapiens
ggaattaactatggatctgaatgtcaggatgtggagatcacggaggaccactttggagattggccaccacacttcacatgttcaggaagcccagagtgctttgcaaatctgcctgacacatcctgagctgcagaatgaaatttgctgtcagcttattaaacagacaagacgaagacagccacagaatcaaccaggaccattgcagggctggcagctcttggcactctgcgttgggctcttccttccccatcatcctttcctgtggctcctcaggcttcacctaaagaggaatgcagattccaggacagaatttggaaaatatgccatttactgccagcgttgtgtagaaagaacgcaacaaaatggtgacagagaagcaagaccctcaaggatggaaattctttcaactcttctccgaaacccttatcaccattctttgccctttagtatacctgtgcacttcatgaatgggatataccaggtagttggttttgacgcatctaccacagtggaagaatttttgaatactttgaaccaggacacaggaatgaggaaaccagcgcagtctggatttgcgttgttcactgacgatccttctggcagagatttagagcattgtcttcaaggaaacatcaaggtgaaaccaagtccttttcaggagccaagcccaacgaacagcaaagaagctactctttacaagaagagtaaactttgcaagaagtttaattcaggagttttccaaaactttaaccaatctaatctccacgataagaaaaaaaaaatgcaggactttaaccacaagggaccttagagaaataatgcacttattttgcaaatgagaaagctgaggcctagagagggaaatgagttacccaaaatcaaatagctagacctgggtctagactctttccataaattatatgtcaaatttctttggtataactttagttattaaaatctttttgaactcggaaggtgaaaaacttgcttcttcagtgaccaaatcatggaaaaatccctggaatcttcttgtttccagtttcaggcagtcctacattacagttcctttttgagtaaaaaatgcgtggccacagtccaaagttaatgtgtgtccaaaaggataagtggaccaaatagcaatttataattacatactaaactcagagccgcacagaggctgaaaacaaaaagcttgagtatatttggtttgatcatattaattgaaaaatttcagtctgcagcacacttgtcttcaaaaaatgttgatttgaaaagtactgtaaatctcagttttccacttcctttctagatttgtgacattatttccaaatgggaacaggcttccaaagaacagcagcctggaaaatgtgaaggtacaaggactgttcgtctgacatacaaaaacagactatatttctcagtgcaagctcgtggagagactgatagagaaaagttgctgttaatgtatcagacaaatgatcaaatcataaatggactttttcctctgaacaaagatctggcattagaaatggcagctcttttatctcaggtagagattggagattttgaaagacctttctcaactccagcagggcatgttaccaatcagtgcaaagtgaatcaaactctaaagcaagtcatagagaaattttatcctaaaaggtatagagatggctgttctgaagagcagttaaggcagctttgccagcgactttcaaccagatggatggccctccggggacacagtgctgctgactgtgtgcgcatttatttgacagtagccaggaagtggccattctttggtgccaagttgtttcttgcaaaacccataactccatcatcacttggaagtactttcttgtggctggctgtacatgaggatggtttaagcctcttagaatacaactccatgaggttaatagtcagctatgtgtacaagagtctaatgacctttggaggctatcaagatgattttatggtagtcattaacaatacacattcaaaggacaaaccaacagagaaattactttttgccatggcaaaacccaagattcttgaaatcactcttttgatcgccagttacataaacaacttccatcagcaaaaggcagcatttcaccacctctctgctccagcactgctctcagcccagacccggggaccccaagccagaatgatgggaagccagcctcttctgtcaagcagcagaccgaccaaaggccccaccttactctgaaagctggggagcctgaacattcactccttgtcctccatgctgtggctgtatcagctccctacaagttcgtttacacctggcagcacggcagccacacaccggtattccaaaccttaacaatgaagggggttagtctcttttatttgattcttaaatattcaaataaatattaacagtaaaacataaacacaaaatttgccaacacactaattttcttatagagtaaatgagtaagaattcatcattttttccatctcccttctcccttgtcatcagacacattgtgcaatgtggcttttcttttcttttctttttttcccctttttaatattctggcaatctttagaaagggagattccaaactcccatttggtaaaccagttgattatttggaaatgttcactgccaaaatagtaagtgctataactaaatgcgcttttaattaatgatatagtgtttggaaaggagtagaacatgcagcataagaaactgctgcagagtggtgcgaggagtacattttcagagcaggtgcagtacatcttccggctctatgaatcattatgtgagaaagcaggataacattaggtaacctgagcctcctgtgtggtattagaaagtataccgtcaccttttcacatcactggagtgtaaaatttaaaacaagatggtgattcctgacattccttggctgtcagtgctgcccagattcagaagaatattgcccacatttcactgtatttggtgctgggtcattttgaccttgctttgttaataatatctttaaaaacaaagacaatccttaaagctttgctcctcacacattaccttctaattatagtttgaaaatagattccctacacatacatacatatgtatgcacagatagggtcttgctatgttgcccaggctggtcttgaactcctggcctcaagcaatcctctctcctcagcctcccaaagtgctgggattacaagtgtgagccaccacacctggctccagaaattttattttatttttttgaggcagggtctcactctggttgcccaggctggagtgcagtggtgccatcatagctcactgtagcctcgaccttccgggatcaagcaatcccacttcagcctcttgaatagctgggactagaagcatgcaccaccatgcccatctaatatttgtatttttagtagagacaggatctccctatgttgtccagcctagtctcaaactcctgggttcaagcaatcctcccacctcggcctcccaaagtgctgggattgcaggcatgagccaccgtgcccagcctcaaaaatattttttaaaagaaaagagaaaataattcttctgtcaaaggaggttaaattttagttgatagagtacttaaatgcattactttattaggttatgtaagtggtcagtgcattccagtatgtgtcacaacagtgtagttcatattcatgataaaaatgaaactgtgataagacatgaaaattatattattaaaatgttcaattgtaatggtaatcatgagtatacttaattttatttatgtatagaatatttgtatttattttttggacatatatttatcactttgtcattttttttaaccaatttgagaaatgttagctgctgaattaatttgttgcccgagccttcatattttcttctttgctgccttctccctgtggcaatgtactgttctcacattaagccttttaaaaatgttccatactgtattagcatccttagaagggacagaactaagaaatacattgctcaaataatattttactttattgataatgacaaaaagaatattttttaaaccccatcaaaatagatttcaattgactgtttcccctacatcttttgagccacagtcgcccatcgaataagcaaatttgtttttgagaataaactggtaaccagtttgtgatgactctcagaagccttttggctgggttacagaagagtttctaagttcctagagagccatttaataattagttggtgagccagaggcttgacagagctgttacttatgtgtgagggctttattctcaggcagtagtttattcatcatttggtaagcccctccccacactcctctaatttaaacaagtagtgaaggcttatcttaaactgtgtagtaccttagacttggcatttatttttgatagagcagagataaaatattttgatggaaggaaatcaattttctgtaactgatgatgtgaaaattttattttctgggaaattatatagccattcaaaaattcaaagtatgttattatgattggttacaagagaataatgttacatgtttaattgtaatatttgtctcctatcattttcttccctttcagtcataataaatgatttacaaaacccattttgagcattatcttttgaataatcttcaagaaatacctaatgttttcattgt

SEQ ID NO: 463492 - DNA, 451 bp, Homo sapiens
ggcaaggctacggttcgcgccagcggccggcgctatggggctgagccgcgtgcgggcggttttctttgacttggacaacactctcatcgacacggccggggcgagcaggagaggcatgttggagatggggtctcgatatgttgctcatgctggtcctgaactcctaaactcaagtgatcctgccaccttggccttccaaagtgctgggattacaggcatgagccaccatgcccggcccaaaaagcacaagttttattttcatatcttcatgaccagaatgaaagatgttggactctaaactaccaaacaaaggattgttactagctatatatgaagaagttggctttaaaaaatgagtgagttctagagcagttgggagagcctcactttgttgtctctaaaaataaggccaattcccaccagaaacggtgtagttagtagctgctttaaa

SEQ ID NO: 463493 - DNA, 1323 bp, Homo sapiens
cggacgcgtgggtcgacccacgcgtccgaaatatatcattgttttgcaaatttctatatctaattcagggtttaccaggagcttaataattaatggctacatagcaaggcatcgtcttggaaccggagaattttctctagactattaggctagacagtctcatgattatactaaccaaacctggagtaaagtggttgaaaaaaaagaaagtataaaggggcttattaaagtggttaataaatatgatttaggttggtttttgatatgtttttcttccaactgttatataagaaactactaatgtaaaatagtaggctatatgttgggatgtgtatagctatgtcttcaagactaatactcagagaatcaaattgtagattgtacctatctgtgagcctatttctttagccagttttctgtctactgccaagaaacagaattctctgcctcatgcaaatgccctttcgtgtttacttttcgctctagatttttaaaaatgtgattgtgcccttgactgtaccaaagtgctgttgctataacagtgaacatttgtgaacagaggatgtttgtagtttcaaatgcagtacccatatgaccttgatcatattttagctatttaaaaattaagttggaggattttggcagaagtagtcacatgcatgattgctctgatagattggttggcgtgtgctgcagggggcttgtccttttaactctcccacaggatggatgtaggcagtgtcacattcattatgctgagagtgaaggttcatcactcctgtatcatggtagcaaatctcaacaggatagcttctaggatgttaagtgagcagttctccagcagaaatgatgtagaaggaaaaaattgaataattaaatttccttgtcttcacagtttgtattctacagagtacagtaatgtattacattccatttgcacccttccttagggaagaactttgtggttatctaccttctgagtggaatgttacagaaaatattttaaaatattggaataaacctatgattttattaatattttttgttttagaataatattccttaaaattatgggtgatgttttgtcatctttattttttttcaaagtttccctgtagtggccttctcacacaaagccagaggccctccctaacactgcttacagaggtgggcctagaacagacatgaatggacactgcacctggaataccagcacctggtggggaggtttggttccatgtgcacctccacatacaaggcacgaacatctcagatctgggagtgcccaggacccatgatttttatttgagtcgctgctaaatc

SEQ ID NO: 463494 - DNA, 3418 bp, Homo sapiens
ggcaaggctacggttcgcgccagcggccggcgctatggggctgagccgcgtgcgggcggttttctttgacttggacaacactctcatcgacacggccggggcgagcaggagaggcatgttggaggtgataaaactcttacaatcaaaataccattataaagaagaggctgaaatcatctgtgataaagttcaagttaaactcagcaaggaatgttttcatccttacaatacatgcattactgatttaaggacttcacattgggaagaagcaatccaggaaacaaaaggtggtgcagccaatagaaaattggctgaagaatgttatttcctttggaaatctacacgtttacagcatatgacactagcagaagacgtcaaagccatgcttactgaacttcgaaaggaggtccgcctacttctattaacgaatggggacagacagacccagagggagaagattgaggcttgtgcctgtcagtcctattttgacgctgttgttgtaggtggagagcagagagaggagaaaccagcaccgtccatattttattactgctgcaatcttctcggagtacaacctggggactgtgtgatggtcggtgacacattagaaaccgacatccaaggaggcctcaatgcaggattgaaagcaacagtctggatcaataaaaatggaatagtgccactgaagtcctccccagttccgcattacatggtttcttctgtgctagagttacctgctctcttacaaagtatagactgcaaagtcagtatgtccacttaaagcacataaaagggcatgattatgaatgttagaatcaatttgctgagtatgaaataagaaaagttagggcactccacttatgataatccagctctaagaataattttacttatgatttaatggccaatattttgaaggtcttcccaaccctattgcttctaagttgtaacaaccaaccattgagtggtacttatatctgaaaattcagattgcatgaattcaggtcagtagtatagcccagaaaatttaaggaaatatattatttgttagtctgtatctggagctttttaaaattatgttattaatcttttagtatcttggctgcataatgccaagcaggattgctttacacatggatgcacaaatgtaaggtttatcttctggcttaaaaatagatatttttaaaaaatagattttctaaaacacagatttatgaaagcaagtgaatctggttaatatgaaataagtactaagtcacatgcaaatcaaggtattatatagtgaaattattttgcatattttgaaaacataaaccatagtttttgcctactttggatgtatactttcttttatgaacctgatttttctgtatgacatttttttttttttcagagggcagggagcaatttttctatggcatgtgacagattcctccagttagaaaaagctgttaaaatcaacacatggtgctcctttaccgtgacattttctcacctgtgcacagtgagccggtagcttccttttagtcttcacctctcaaggaaatgtttttactgtcttttcccagacacacagtggggttgagggagctaggctgttttgctagagataattgcaaggcacgtggcactaaaagtcatttttcttctgtggatccataagaggaacatttcctcagtgtagcctaacaatgcagcccccaatctgttcctttttttttttgaaatgggatctctgtcgcccaggttggagtgccatggcaccatctcggctcactgcaacctctgcctcctgagctcaagtgatcctcccacctcagcctcccaagggtgtgtgtgactacaagtacacactaccacgcccagctaatgtgtgtttttgtagagatgggattttgccatgttgcccaggctggtctcgaattcctggattcaagtgatcctcccacctcagcctcctaaagtcctaggattataggcatgagccactgtgcctggccccctcatctgatagaaaattagattttgctatgagccatttcctgagggccaatttaatactcgtgtgactcttcttagagttaccatctgccttaaatttcctctgtttttcacattcttggaaatatatcattgttttgcaaatttctatatctaattcagggtttaccaggagcttaataattaatggctacatagcaaggcatcgtcttggaaccggagaattttctctagactattaggctagacagtctcatgattatactaaccaaacctggagtaaagtggttgaaaaaaaagaaagtataaaggggcttattaaagtggttaataaatatgatttaggttggtttttgatatgtttttcttccaactgttatataagaaactactaatgtaaaatagtaggctatatgttgggatgtgtatagctatgtcttcaagactaatactcagagaatcaaattgtagattgtacctatctgtgagcctatttctttagccagttttctgtctactgccaagaaacagaattctctgcctcatgcaaatgccctttcgtgtttacttttcgctctagatttttaaaaatgtgattgtgcccttgactgtaccaaagtgctgttgctataacagtgaacatttgtgaacagaggatgtttgtagtttcaaatgcagtacccatatgaccttgatcatattttagctatttaaaaattaagttggaggattttggcagaagtagtcacatgcatgattgctctgatagattggttggcgtgtgctgcagggggcttgtccttttaactctcccacaggatggatgtaggcagtgtcacattcattatgctgagagtgaaggttcatcactcctgtatcatggtagcaaatctcaacaggatagcttctaggatgttaagtgagcagttctccagcagaaatgatgtagaaggaaaaaattgaataattaaatttccttgtcttcacagtttgtattctacagagtacagtaatgtattacattccatttgcacccttccttagggaagaactttgtggttatctaccttctgagtggaatgttacagaaaatattttaaaatattggaataaacctatgattttattaatattttttgttttagaataatattccttaaaattatgggtgatgttttgtcatctttattttttttcaaagtttccctgtagtggccttctcacacaaagccagaggccctccctaacactgcttacagaggtgggcctagaacagacatgaatggacactgcacctggaataccagcacctggtggggaggtttggttccatgtgcacctccacatacaaggcacgaacatctcagatctgggagtgcccaggacccatgatttttatttgagtcgctgctaaatc

SEQ ID NO: 463495 - DNA, 5254 bp, Homo sapiens
taaacttgaataaaaaagcaaatcttgtgagaaatgtacaccaacaacgagatcgattttaacagtgagcaaaaagtttttaaagaaattagtggaaaaaatataggaaagttgaaacacattctgctggtctgcaccctgaccaaggaagacaatcgctgcgtgggcaagattcccgaggatgagcagctgcatgttctccccctgtacaagatggccaacacggatgagtttggtagcgaggagaaccagaatgcaaaggtgggcagcggagccatccaggtgctcaccgccttcccccgcgaggtccgacgcctgcccgagcctgccaagtcctgccgccagcggcagctggaagccagaaaggcagcagccgagaagaagaagattcagaaggagaagctgagcactccggagaagatcaagcaggaggccctggagctggcgggcattacgtcggacccaggcctgtctctgaagggtggattgtcccagcaaggcctgaagccctccctcaaggtggagccgcagaaccacttcagctccttcaagtacagcggcaacgcggtggtggagagctactcggtgctgggcaactgccggccctccgacccttacagcatgaacagcgtgtactcctaccactcctactatgcacagcccagcctgacctccgtcaatggcttccactccaagtacgctctcccgtcttttagctactatggctttccatccagcaaccccgtcttcccctctcacttccgggtgccttgagtaagagctgagaaccggcctgctgggtgtttactgtatctgtttggaagcactggcggagggtcgttgtaagatgtcctgagcatttatgtggtctggttttaactgtaaatagtgaaagatttttttaagcacttttgcctagatttaaacagcaacttgaaaaaaaaagtatgttttaacatgtaattgtgggagaaattgtaaatagtagccgaatatttaatgtgctttgtctatcctccacttttaccatattctgtaaagttgcatttattttacaggacaaaaaaatgaaatattattgcttttgaaataaatacccaagagcttatcaggacttagaattattcagaactcagatttataggaaaacctctgaccttcagtttgacaagctaaaggaagcagagtctttaatgagcatgctaattttctagttttgaggaaaaattgggtcctttaaatgctattttgcttatcgcatcagtacttttatgcaggtctcatttgactccgtgcttaggtagatgcgggggtgccttgaaaacttcattttaaatgatcttaagcaagaaatacaatattttacgaaacatttggagaatgtgaccgtctgtatgacccgtggaagccccaggttggctgttggtttggaaggtcccgagtgtaacccaggtgattctgatacttggcatgtgtgaatcttcctgatgtatgttaaataaactcttcccctcatcaccctttggtaggaaagccattagatgaaaggagaaaccaatacaagctaaaagcatgcgacgtctgtcccccagcccaaacagccttggttcatcagtttctgcagtaggagataggctgctgagaggtgagtcaagaggcagtctccattggatgtccccactccccgcagaatggcgtttccagagttaggcggtgtggttgccgtgctcaagcccatgctgatttgtacactacatgtctaacctacctcaaatctcagtcattaaaattagcatgctttagacatatatttaaaaagtaactatgcacagctctttatcccccccttgctgctgaagctttcttaaagagaaaaatcaaatttttattttttactggcactatcattttttaagtcctaaagatgattaacagacatttttatcatgagaagaaaaataaagccattgcaactaaagaacctaacagcatgaccaagttcgaagagtcatattatagcaacggaaatcgatggcgtcttagtcatctccccagtgtgccctgtccacggacaccatccacgtgcagtgcaaacatttggttccttttctgctctgttttgttttccctgcctgttgcgtgcaagggaagtgcttgtaaagttctgtgctacgagatttttaaaataaaaatcgcttcgcagcaggttctcacaaaataactggtgctagctcaagaaatcatcatctgaccatcagaaatcttgactaaaggtgttgcatggatttgggggtctttcggtttttggttttgggtctggcttttagcagggccaatgtttcccacaccccggcttcatgggtactgctttgccttctcaccaaggtgacgatggtgtgcgtggaaagagatgataccccaccgccccctcttggtccttccaccagcctcttttgggaacagtagtttgcagagcaagggatttttaaagcgctaaaggaaagaagtagcagagcttaactgctttgtaccacacagcagtagatgtgcaaggacggttgacaatgagtcgatgataacctaatttcattgagagaaacccagccagacttgcttctagaggtttaatcaccatgagatctcaaaccaaggcaaagctggtggaaaactatatgatatccctgacgtgcctcaaccagtatctctttccttttgttactgaagtgtgttttatggactaggaagcatttttatgaattgaaatagtctaaataaaatggtgctatggtgttttaatgtgactgtccctgatcctgtcttgctgaggtgctatcaacgttctgaaaccacaaccaaccaaaaacaaggtgggctccagtctcttggctttttttttttccctcccctcttttggtgctgtcttagacccgtttaccgtgctataatctgctctgagcagtgttgtgttgtgttgtattgttcttcccttggtggccaaacaaagcaagtcgagaaggcagctatctccctttctgtgatcgggagtgggcctgcctggcttggcaggtgctttttggttccacacctgtcttctcaggcttgatgtgaaagaaagggcgaagggttttttgagtttttgtttttgaggaaggggagttgggtacttctgcctctcctagcatgataggcattctcatagccagggacagattttctcctgcagcccagggtgctaagcagacatctctgggagtcccaagggcacaccaagggagaccagatggatctccttcctcccctggcactggctgggaccatggtgggcaggggcttcattctctgacccagcgttgcttctgcctctcattggtaaccccttatgttcggactaaaggaaggagctttctttgctcactcgatgccactgaggctgctttttagttggtgctaacctaaatttcttcttgggtccacagaagttgatgttttaaaaactcaccaggaagctccattttgtgtcatccactgtcacaataatttttttaaatacctcaaaaacaggacatcatgacaacttcagtaaagtagattccatgagggtctgatacctgcaggttgtccgtctgatgacatacttgaccttgaaaaatctggggtcattttgtttttcattcttcagcagttaagatagcggaacgccgaaaggaaggagcgtagttggctgtatttcatgtttaagttttgcttttgaataaaatgtgaatttcctatgcccatctcattgagctttctcagtcattgttgctgtcatttgaaatgactccctcaaaacctagttttattagccagctgcctctgctgtagtacatggccaacttcaacataccctggaccaaaacatttttgaggtgcatacccccaacataagttacacagtcccacatccaggtgcacagagtgcgagtgcactccgcgagtgcggggggaggggcggccccctctggtgctcccagcccttcctcctgcagagctgcaggcaagagcagagcaataggcttctcccctgagcagagaccgcagcacagaaatgcaaggtctaaagttgctttttgcctaagaatcagcgagcgatttggcctacttcctcattggcttctattctgatatcagggatgctttttgtagtggtattgtttgctccctcttcgcgttttgactacccgtcattcaggggtaactcatcactcttcacacggggatttaaattaagaaactaattggctcatgtgaacattccaaattttcttggtttcaataccctttttttttcttttgaggggaaaagaggggagaaaaacaggagtgatgtcatttctttttcatgtattccaattaaagaaacaagggcaggtcgtataatggcatattaatacattagacttaatctagaacccctgtagctttttgatgtgttttatttcttatctctttgaattcctgtttggttacttggcttccaatggaggtgaacttaacaaccatacttgaatattccgtcttgactttgtaaactgtggctacttgaaatgaagtttatctggggttgatggatgaatggtagatttttgcaatgtctcaaggcaataggatgtgtattaaactgtagatattcttagtacagtaaatttatgctgataattttattttgtataatttttacctttttgttaatattttttccttccactttattggtttgcctcctgagctacccctccttaccctcccttctccctcagtgtttcagtaaatttaatttagggtgcctagaaattgcaagtatgtatcctttttgatttgtattttattataatttacacaaacaactgggtttgtgaactgtattactcctggtatctttaaaatattgtgggtgttttaataaattttatatttattttttgcactcaaattcagtgtgggttctctttttccccttcttgaaccaggactggaatgtgatgtgtcaggtaccctgtaacctcacccacccaccgtatgttgtagatgtacaaatgaagccctcactaatagcagcagcggaacctggccttgtccattctgccacctggataaaggaatgttcagaggctatcagctgttaaaacgggatctaaagggagaaaatagagatggcctttttctcatctatgtttctctttttgttttctttcccttttatgtttttttgtcc

SEQ ID NO: 463496 - DNA, 453 bp, Homo sapiens
gctcggtaccccagaagatcacctccattttgtgtcatccactgtcacaataatttttttaaatacctcaaaaacaggacatcatgacaacttcagtaaagtagattccatgagggtctgatacctgcaggttgtccgtctgatgacatacttgaccttgaaaaatctggggtcattttgtttttcattcttcagcagttaagatagcggaacgccgaaaggaaggagcgtagttggctgtatttcatgtttaagttttgcttttgaataaaatgtgaatttcctatgcccatctcattgagctttctcagtcattgttgctgtcatttgaaatgactccctcaaaacctagttttattagccagctgcctctgctgtagtacatggccaacttcaacataccctggaccaaaacatttttgaggtgatcttctgggatcctgtagagtcact

SEQ ID NO: 463497 - DNA, 8180 bp, Homo sapiens
taaacttgaataaaaaagcaaatcttgtgagaaatgtacaccaacaacgagatcgattttaacagtgagcaaaaagtttttaaagaaattagtggaaaaaatataggaaagttgaaacacattctgctggtctgcaccctgaccaaggaagacaatcgctgcgtgggcaagattcccgaggatgagcagctgcatgttctccccctgtacaagatggccaacacggatgagtttggtagcgaggagaaccagaatgcaaaggtgggcagcggagccatccaggtgctcaccgccttcccccgcgaggtccgacgcctgcccgagcctgccaagtcctgccgccagcggcagctggaagccagaaaggcagcagccgagaagaagaagattcagaaggagaagctgagcactccggagaagatcaagcaggaggccctggagctggcgggcattacgtcggacccaggcctgtctctgaagggtggattgtcccagcaaggcctgaagccctccctcaaggtggagccgcagaaccacttcagctccttcaagtacagcggcaacgcggtggtggagagctactcggtgctgggcaactgccggccctccgacccttacagcatgaacagcgtgtactcctaccactcctactatgcacagcccagcctgacctccgtcaatggcttccactccaagtacgctctcccgtcttttagctactatggctttccatccagcaaccccgtcttcccctctcagtgtcctgggtcctggtgcctgggggcacagtggcagcagtggcagttttgagaagaagccagacctccacgctctgcacaacagcctgagcccggcctacggtggtgctgagtttgccgagctgcccagccaggctgttcccacagacgcccaccaccccactcctcaccaccagcagcctgcgtacccaggccccaaggagtatctgcttcccaaggcccccctactccactcagtgtccagggacccctccccctttgcccagagctccaactgctacaacagatccatcaagcaagagccagtagacccgctgacccaggctgagctgtgcccagagacgctggcaagatgggcaagacacctctgtccgaggtgtctcagaatggaggacccagtcacctttggggacagtactcaggaggcccaagcatgtcccccaagaggactaacggtgtgggtggcagctggggtgtgttctcgtctggggagagtcctgccatcgtccctgacaagctcagttcctttggggccagctgcctggccccttcccacttcacagatggccagtgggggctgttccccggtgaggggcagcaggcagcttcccactctggaggacggctgcgaggcaaaccgtggagcccctgcaagtttgggaacagcacctcggccttggctgggcccagcctgactgagaagccgtgggcgctgggggcaggggatttcaactcggccctgaaaggtagtcctgggttccaagacaagctgtggaaccccatgaaaggagaggagggcaggattccagccgcaggggccagccagtggtcttctaccagcacaagaacctcaaccagcccaaccacgggctggccctctgggaagccaagatgaagcagctggcggagagggcacgggcacggcaggaggaggctgcccggctgggcctgggccagcaggaggccaagctctacgggaagaagcgcaagtgggggggcactgtggttgctgagccccagcagaaagagaagaagggggtcgtccccacccggcaggcactggctgtgcccacagactcggcggtcaccgtgtcctcctatgcctacacgaaggtcactggcccctacagccgctggatctaggtgccagggagccagcgtacctcagcgtcgggcctggcccgagctgtctctgtggtgcttttgccctcatacctgggggcgggttgggggtgcagaagtctttttatctctatatacatatatagatgcgcatatcatatatatgtatttatggtccaaacctcagaactgacccgcccctcccttacccccacttccccagcactttgaagaagaaactacggctgtcgggtgatttttccgtgatcttaatatttatatctccaagttgtccccccccttgtctggggggtttttatttttattttctctttgtttttaaaactctatccttgtatatcacaataatggaaagaaagtttatagtatcctttcacaaaggagtagttttaaattccatttaaaatgtgtatttattggattttttaaaagcgacaatagtaatggtaaaggatgggcaggaaaggccagtagtgctcccccgcccagtctcgctgggtctggcgagccaagcccctcgggcgctggcgaggtcctcagccatctgcccctcgagagccaagcgcggacggtagccacccagttcatccctcccgacatacaccccttccctttggggaagggagcctcaggacagcttctgtcctctctgataggatgggagagtctgcagaaaaccatctggggtcccttttccagtccccggcttggagtcgaagggcagatgcaccccaggccagccccacgagatgctggcatagctttccccagaaaccaggttggaagtagatggcttcaagcttgctagtctccacactgaatcctctgtccgttatttatggagtcacacgatgtcatggttcactaggcagcacctcacgctggagctggagtgcgaggttcttaggggccgtgcacccatgttgccaagccaatgcatgctgagctgaaggaatttgtcttagtggcagttttttaaaaaatgcccccaaagtctatgctgatactgaaaaagggctactgtatctttaaaaacaggaagttgaacccaagctgtgaaaagccagtggtgctctgtgcatggtgctgtgcggagcctgggtgctgtagtgttgtgctgggactttcttgactcttgggcaggtcacatcctacaggagctcagcagaccagtgtaacaacagttaatgcatctatcctgatccctgaatttccacattggacaatggtgcatgcctcacacctgagcctgcttcctccatgctgtcattgggttcgggggcctacacttaacaattttaaagtgcaagagtcaaacattttcaacaggttgctataattttcctccctaattggtgccatttctccatttgatcattttctttttttcctttctcccctcttcatccactttaatatagctgttctgaaattctggtgcattcattcggttctttgaaatgagaatgtggtgcttaatttttgtgacgttgtcgagagaggttgggcctgatgggagcaacactcatcatcaccaagtcaaactttgttggagtgttggtttttcttgtgatattagcagaaatgatctcatgctagccatgtggatgtgtgtgtggtgaatggggggcttcatcaggacacacagaggggaatgtggccacacggtggatgaccaccaagccctgagatgaacaggtatttactgagcagttgtattcagatatgggtcttcatgaatcatgtttaacaatcagatgaccgctataggcaagttcctgagcttccgggtgccttgagtaagagctgagaaccggcctgctgggtgtttactgtatctgtttggaagcactggcggagggtcgttgtaagatgtcctgagcatttatgtggtctggttttaactgtaaatagtgaaagatttttttaagcacttttgcctagatttaaacagcaacttgaaaaaaaaagtatgttttaacatgtaattgtgggagaaattgtaaatagtagccgaatatttaatgtgctttgtctatcctccacttttaccatattctgtaaagttgcatttattttacaggacaaaaaaatgaaatattattgcttttgaaataaatacccaagagcttatcaggacttagaattattcagaactcagatttataggaaaacctctgaccttcagtttgacaagctaaaggaagcagagtctttaatgagcatgctaattttctagttttgaggaaaaattgggtcctttaaatgctattttgcttatcgcatcagtacttttatgcaggtctcatttgactccgtgcttaggtagatgcgggggtgccttgaaaacttcattttaaatgatcttaagcaagaaatacaatattttacgaaacatttggagaatgtgaccgtctgtatgacccgtggaagccccaggttggctgttggtttggaaggtcccgagtgtaacccaggtgattctgatacttggcatgtgtgaatcttcctgatgtatgttaaataaactcttcccctcatcaccctttggtaggaaagccattagatgaaaggagaaaccaatacaagctaaaagcatgcgacgtctgtcccccagcccaaacagccttggttcatcagtttctgcagtaggagataggctgctgagaggtgagtcaagaggcagtctccattggatgtccccactccccgcagaatggcgtttccagagttaggcggtgtggttgccgtgctcaagcccatgctgatttgtacactacatgtctaacctacctcaaatctcagtcattaaaattagcatgctttagacatatatttaaaaagtaactatgcacagctctttatcccccccttgctgctgaagctttcttaaagagaaaaatcaaatttttattttttactggcactatcattttttaagtcctaaagatgattaacagacatttttatcatgagaagaaaaataaagccattgcaactaaagaacctaacagcatgaccaagttcgaagagtcatattatagcaacggaaatcgatggcgtcttagtcatctccccagtgtgccctgtccacggacaccatccacgtgcagtgcaaacatttggttccttttctgctctgttttgttttccctgcctgttgcgtgcaagggaagtgcttgtaaagttctgtgctacgagatttttaaaataaaaatcgcttcgcagcaggttctcacaaaataactggtgctagctcaagaaatcatcatctgaccatcagaaatcttgactaaaggtgttgcatggatttgggggtctttcggtttttggttttgggtctggcttttagcagggccaatgtttcccacaccccggcttcatgggtactgctttgccttctcaccaaggtgacgatggtgtgcgtggaaagagatgataccccaccgccccctcttggtccttccaccagcctcttttgggaacagtagtttgcagagcaagggatttttaaagcgctaaaggaaagaagtagcagagcttaactgctttgtaccacacagcagtagatgtgcaaggacggttgacaatgagtcgatgataacctaatttcattgagagaaacccagccagacttgcttctagaggtttaatcaccatgagatctcaaaccaaggcaaagctggtggaaaactatatgatatccctgacgtgcctcaaccagtatctctttccttttgttactgaagtgtgttttatggactaggaagcatttttatgaattgaaatagtctaaataaaatggtgctatggtgttttaatgtgactgtccctgatcctgtcttgctgaggtgctatcaacgttctgaaaccacaaccaaccaaaaacaaggtgggctccagtctcttggctttttttttttccctcccctcttttggtgctgtcttagacccgtttaccgtgctataatctgctctgagcagtgttgtgttgtgttgtattgttcttcccttggtggccaaacaaagcaagtcgagaaggcagctatctccctttctgtgatcgggagtgggcctgcctggcttggcaggtgctttttggttccacacctgtcttctcaggcttgatgtgaaagaaagggcgaagggttttttgagtttttgtttttgaggaaggggagttgggtacttctgcctctcctagcatgataggcattctcatagccagggacagattttctcctgcagcccagggtgctaagcagacatctctgggagtcccaagggcacaccaagggagaccagatggatctccttcctcccctggcactggctgggaccatggtgggcaggggcttcattctctgacccagcgttgcttctgcctctcattggtaaccccttatgttcggactaaaggaaggagctttctttgctcactcgatgccactgaggctgctttttagttggtgctaacctaaatttcttcttgggtccacagaagttgatgttttaaaaactcaccaggaagctccattttgtgtcatccactgtcacaataatttttttaaatacctcaaaaacaggacatcatgacaacttcagtaaagtagattccatgagggtctgatacctgcaggttgtccgtctgatgacatacttgaccttgaaaaatctggggtcattttgtttttcattcttcagcagttaagatagcggaacgccgaaaggaaggagcgtagttggctgtatttcatgtttaagttttgcttttgaataaaatgtgaatttcctatgcccatctcattgagctttctcagtcattgttgctgtcatttgaaatgactccctcaaaacctagttttattagccagctgcctctgctgtagtacatggccaacttcaacataccctggaccaaaacatttttgaggtgcatacccccaacataagttacacagtcccacatccaggtgcacagagtgcgagtgcactccgcgagtgcggggggaggggcggccccctctggtgctcccagcccttcctcctgcagagctgcaggcaagagcagagcaataggcttctcccctgagcagagaccgcagcacagaaatgcaaggtctaaagttgctttttgcctaagaatcagcgagcgatttggcctacttcctcattggcttctattctgatatcagggatgctttttgtagtggtattgtttgctccctcttcgcgttttgactacccgtcattcaggggtaactcatcactcttcacacggggatttaaattaagaaactaattggctcatgtgaacattccaaattttcttggtttcaataccctttttttttcttttgaggggaaaagaggggagaaaaacaggagtgatgtcatttctttttcatgtattccaattaaagaaacaagggcaggtcgtataatggcatattaatacattagacttaatctagaacccctgtagctttttgatgtgttttatttcttatctctttgaattcctgtttggttacttggcttccaatggaggtgaacttaacaaccatacttgaatattccgtcttgactttgtaaactgtggctacttgaaatgaagtttatctggggttgatggatgaatggtagatttttgcaatgtctcaaggcaataggatgtgtattaaactgtagatattcttagtacagtaaatttatgctgataattttattttgtataatttttacctttttgttaatattttttccttccactttattggtttgcctcctgagctacccctccttaccctcccttctccctcagtgtttcagtaaatttaatttagggtgcctagaaattgcaagtatgtatcctttttgatttgtattttattataatttacacaaacaactgggtttgtgaactgtattactcctggtatctttaaaatattgtgggtgttttaataaattttatatttattttttgcactcaaattcagtgtgggttctctttttccccttcttgaaccaggactggaatgtgatgtgtcaggtaccctgtaacctcacccacccaccgtatgttgtagatgtacaaatgaagccctcactaatagcagcagcggaacctggccttgtccattctgccacctggataaaggaatgttcagaggctatcagctgttaaaacgggatctaaagggagaaaatagagatggcctttttctcatctatgtttctctttttgttttctttcccttttatgtttttttgtcc

SEQ ID NO: 463498 - DNA, 7542 bp, Homo sapiens
taaacttgaataaaaaagcaaatcttgtgagaaatgtacaccaacaacgagatcgattttaacagtgagcaaaaagtttttaaagaaattagtggaaaaaatataggaaagttgaaacacattctgctggtctgcaccctgaccaaggaagacaatcgctgcgtgggcaagattcccgaggatgagcagctgcatgttctccccctgtacaagatggccaacacggatgagtttggtagcgaggagaaccagaatgcaaaggtgggcagcggagccatccaggtgctcaccgccttcccccgcgaggtccgacgcctgcccgagcctgccaagtcctgccgccagcggcagctggaagccagaaaggcagcagccgagaagaagaagattcagaaggagaagctgagcactccggagaagatcaagcaggaggccctggagctggcgggcattacgtcggacccaggcctgtctctgaagggtggattgtcccagcaaggcctgaagccctccctcaaggtggagccgcagaaccacttcagctccttcaagtacagcggcaacgcggtggtggagagctactcggtgctgggcaactgccggccctccgacccttacagcatgaacagcgtgtactcctaccactcctactatgcacagcccagcctgacctccgtcaatggcttccactccaagtacgctctcccgtcttttagctactatggctttccatccagcaaccccgtcttcccctctcagtgtcctgggtcctggtgcctgggggcacagtggcagcagtggcagttttgagaagaagccagacctccacgctctgcacaacagcctgagcccggcctacggtggtgctgagtttgccgagctgcccagccaggctgttcccacagacgcccaccaccccactcctcaccaccagcagcctgcgtacccaggccccaaggagtatctgcttcccaaggcccccctactccactcagtgtccagggacccctccccctttgcccagagctccaactgctacaacagatccatcaagcaagagccagtagacccgctgacccaggctgagctgtgcccagagacgctggcaagatgggcaagacacctctgtccgaggtgtctcagaatggaggacccagtcacctttggggacagtactcaggaggcccaagcatgtcccccaagaggactaacggtgtgggtggcagctggggtgtgttctcgtctggggagagtcctgccatcgtccctgacaagctcagttcctttggggccagctgcctggccccttcccacttcacagatggccagtgggggctgttccccggtgaggggcagcaggcagcttcccactctggaggacggctgcgaggcaaaccgtggagcccctgcaagtttgggaacagcacctcggccttggctgggcccagcctgactgagaagccgtgggcgctgggggcaggggatttcaactcggccctgaaaggtagtcctgggttccaagacaagctgtggaaccccatgaaaggagaggagggcaggattccagccgcaggggccagccagtggtcttctaccagcacaagaacctcaaccagcccaaccacgggctggccctctgggaagccaagatgaagcagctggcggagagggcacgggcacggcaggaggaggctgcccggctgggcctgggccagcaggaggccaagctctacgggaagaagcgcaagtgggggggcactgtggttgctgagccccagcagaaagagaagaagggggtcgtccccacccggcaggcactggctgtgcccacagactcggcggtcaccgtgtcctcctatgcctacacgaaggtcactggcccctacagccgctggatctaggtgccagggagccagcgtacctcagcgtcgggcctggcccgagctgtctctgtggtgcttttgccctcatacctgggggcgggttgggggtgcagaagtctttttatctctatatacatatatagatgcgcatatcatatatatgtatttatggtccaaacctcagaactgacccgcccctcccttacccccacttccccagcactttgaagaagaaactacggctgtcgggtgatttttccgtgatcttaatatttatatctccaagttgtccccccccttgtctggggggtttttatttttattttctctttgtttttaaaactctatccttgtatatcacaataatggaaagaaagtttatagtatcctttcacaaaggagtagttttaaattccatttaaaatgtgtatttattggattttttaaaagcgacaatagtaatggtaaaggatgggcaggaaaggccagtagtgctcccccgcccagtctcgctgggtctggcgagccaagcccctcgggcgctggcgaggtcctcagccatctgcccctcgagagccaagcgcggacggtagccacccagttcatccctcccgacatacaccccttccctttggggaagggagcctcaggacagcttctgtcctctctgataggatgggagagtctgcagaaaaccatctggggtcccttttccagtccccggcttggagtcgaagggcagatgcaccccaggccagccccacgagatgctggcatagctttccccagaaaccaggttggaagtagatggcttcaagcttgctagtctccacactgaatcctctgtccgttatttatggagtcacacgatgtcatggttcactaggcagcacctcacgctggagctggagtgcgaggttcttaggggccgtgcacccatgttgccaagccaatgcatgctgagctgaaggaatttgtcttagtggcagttttttaaaaaatgcccccaaagtctatgctgatactgaaaaagggctactgtatctttaaaaacaggaagttgaacccaagctgtgaaaagccagtggtgctctgtgcatggtgctgtgcggagcctgggtgctgtagtgttgtgctgggactttcttgactcttgggcaggtcacatcctacaggagctcagcagaccagtgtaacaacagttaatgcatctatcctgatccctgaatttccacattggacaatggtgcatgcctcacacctgagcctgcttcctccatgctgtcattgggttcgggggcctacacttaacaattttaaagtgcaagagtcaaacattttcaacaggttgctataattttcctccctaattggtgccatttctccatttgatcattttctttttttcctttctcccctcttcatccactttaatatagctgttctgaaattctggtgcattcattcggttctttgaaatgagaatgtggtgcttaatttttgtgacgttgtcgagagaggttgggcctgatgggagcaacactcatcatcaccaagtcaaactttgttggagtgttggtttttcttgtgatattagcagaaatgatctcatgctagccatgtggatgtgtgtgtggtgaatggggggcttcatcaggacacacagaggggaatgtggccacacggtggatgaccaccaagccctgagatgaacaggtatttactgagcagttgtattcagatatgggtcttcatgaatcatgtttaacaatcagatgaccgctataggcaagttcctgagcttccgggtgccttgagtaagagctgagaaccggcctgctgggtgtttactgtatctgtttggaagcactggcggagggtcgttgtaagatgtcctgagcatttatgtggtctggttttaactgtaaatagtgaaagatttttttaagcacttttgcctagatttaaacagcaacttgaaaaaaaaagtatgttttaacatgtaattgtgggagaaattgtaaatagtagccgaatatttaatgtgctttgtctatcctccacttttaccatattctgtaaagttgcatttattttacaggacaaaaaaatgaaatattattgcttttgaaataaatacccaagagcttatcaggacttagaattattcagaactcagatttataggaaaacctctgaccttcagtttgacaagctaaaggaagcagagtctttaatgagcatgctaattttctagttttgaggaaaaattgggtcctttaaatgctattttgcttatcgcatcagtacttttatgcaggtctcatttgactccgtgcttaggtagatgcgggggtgccttgaaaacttcattttaaatgatcttaagcaagaaatacaatattttacgaaacatttggagaatgtgaccgtctgtatgacccgtggaagccccaggttggctgttggtttggaaggtcccgagtgtaacccaggtgattctgatacttggcatgtgtgaatcttcctgatgtatgttaaataaactcttcccctcatcaccctttggtaggaaagccattagatgaaaggagaaaccaatacaagctaaaagcatgcgacgtctgtcccccagcccaaacagccttggttcatcagtttctgcagtaggagataggctgctgagaggtgagtcaagaggcagtctccattggatgtccccactccccgcagaatggcgtttccagagttaggcggtgtggttgccgtgctcaagcccatgctgatttgtacactacatgtctaacctacctcaaatctcagtcattaaaattagcatgctttagacatatatttaaaaagtaactatgcacagctctttatcccccccttgctgctgaagctttcttaaagagaaaaatcaaatttttattttttactggcactatcattttttaagtcctaaagatgattaacagacatttttatcatgagaagaaaaataaagccattgcaactaaagaacctaacagcatgaccaagttcgaagagtcatattatagcaacggaaatcgatggcgtcttagtcatctccccagtgtgccctgtccacggacaccatccacgtgcagtgcaaacatttggttccttttctgctctgttttgttttccctgcctgttgcgtgcaagggaagtgcttgtaaagttctgtgctacgagatttttaaaataaaaatcgcttcgcagcaggttctcacaaaataactggtgctagctcaagaaatcatcatctgaccatcagaaatcttgactaaaggtgttgcatggatttgggggtctttcggtttttggttttgggtctggcttttagcagggccaatgtttcccacaccccggcttcatgggtactgctttgccttctcaccaaggtgacgatggtgtgcgtggaaagagatgataccccaccgccccctcttggtccttccaccagcctcttttgggaacagtagtttgcagagcaagggatttttaaagcgctaaaggaaagaagtagcagagcttaactgctttgtaccacacagcagtagatgtgcaaggacggttgacaatgagtcgatgataacctaatttcattgagagaaacccagccagacttgcttctagaggtttaatcaccatgagatctcaaaccaaggcaaagctggtggaaaactatatgatatccctgacgtgcctcaaccagtatctctttccttttgttactgaagtgtgttttatggactaggaagcatttttatgaattgaaatagtctaaataaaatggtgctatggtgttttaatgtgactgtccctgatcctgtcttgctgaggtgctatcaacgttctgaaaccacaaccaaccaaaaacaaggtgggctccagtctcttggctttttttttttccctcccctcttttggtgctgtcttagacccgtttaccgtgctataatctgctctgagcagtgttgtgttgtgttgtattgttcttcccttggtggccaaacaaagcaagtcgagaaggcagctatctccctttctgtgatcgggagtgggcctgcctggcttggcaggtgctttttggttccacacctgtcttctcaggcttgatgtgaaagaaagggcgaagggttttttgagtttttgtttttgaggaaggggagttgggtacttctgcctctcctagcatgataggcattctcatagccagggacagattttctcctgcagcccagggtgctaagcagacatctctgggagtcccaagggcacaccaagggagaccagatggatctccttcctcccctggcactggctgggaccatggtgggcaggggcttcattctctgacccagcgttgcttctgcctctcattggtaaccccttatgttcggactaaaggaaggagctttctttgctcactcgatgccactgaggctgctttttagttggtgctaacctaaatttcttcttgggtccacagaagttgatgttttaaaaactcaccaggaagctccattttgtgtcatccactgtcacaataatttttttaaatacctcaaaaacaggacatcatgacaacttcagtaaagtagattccatgagggtctgatacctgcaggttgtccgtctgatgacatacttgaccttgaaaaatctggggtcattttgtttttcattcttcagcagttaagatagcggaacgccgaaaggaaggagcgtagttggctgtatttcatgtttaagttttgcttttgaataaaatgtgaatttcctatgcccatctcattgagctttctcagtcattgttgctgtcatttgaaatgactccctcaaaacctagttttattagccagctgcctctgctgtagtacatggccaacttcaacataccctggaccaaaacatttttgaggtgcatacccccaacataagttacacagtcccacatccaggtgcacagagtgcgagtgcactccgcgagtgcggggggaggggcggccccctctggtgctcccagcccttcctcctgcagagctgcaggcaagagcagagcaataggcttctcccctgagcagagaccgcagcacagaaatgcaaggtctaaagttgctttttgcctaagaatcagcgagcgatttggcctacttcctcattggcttctattctgatatcagggatgctttttgtagtggtattgtttgctccctcttcgcgttttgactacccgtcattcaggggtaactcatcactcttcacacggggatttaaattaagaaactaattggctcatgtgaacattccaaattttcttggtttcaataccctttttttttcttttgaggggaaaagaggggagaaaaacaggagtgatgtcatttctttttcatgtattccaattaaagaaacaaggcagtcgatatgcctttatacttaaattattgaacccgtactttgatgtgttattctatcctggaaccggcggcactgccacagggggactacacaattgtatcgctgtgtaaccgccaagcaactggggaacagaggtacgcacgagttatacacatcaaggcaattactaattcatgcgcccccctaaggatgccacctaccatttact

SEQ ID NO: 463499 - DNA, 7441 bp, Homo sapiens
taaacttgaataaaaaagcaaatcttgtgagaaatgtacaccaacaacgagatcgattttaacagtgagcaaaaagtttttaaagaaattagtggaaaaaatataggaaagttgaaacacattctgctggtctgcaccctgaccaaggaagacaatcgctgcgtgggcaagattcccgaggatgagcagctgcatgttctccccctgtacaagatggccaacacggatgagtttggtagcgaggagaaccagaatgcaaaggtgggcagcggagccatccaggtgctcaccgccttcccccgcgaggtccgacgcctgcccgagcctgccaagtcctgccgccagcggcagctggaagccagaaaggcagcagccgagaagaagaagattcagaaggagaagctgagcactccggagaagatcaagcaggaggccctggagctggcgggcattacgtcggacccaggcctgtctctgaagggtggattgtcccagcaaggcctgaagccctccctcaaggtggagccgcagaaccacttcagctccttcaagtacagcggcaacgcggtggtggagagctactcggtgctgggcaactgccggccctccgacccttacagcatgaacagcgtgtactcctaccactcctactatgcacagcccagcctgacctccgtcaatggcttccactccaagtacgctctcccgtcttttagctactatggctttccatccagcaaccccgtcttcccctctcagtgtcctgggtcctggtgcctgggggcacagtggcagcagtggcagttttgagaagaagccagacctccacgctctgcacaacagcctgagcccggcctacggtggtgctgagtttgccgagctgcccagccaggctgttcccacagacgcccaccaccccactcctcaccaccagcagcctgcgtacccaggccccaaggagtatctgcttcccaaggcccccctactccactcagtgtccagggacccctccccctttgcccagagctccaactgctacaacagatccatcaagcaagagccagtagacccgctgacccaggctgagctgtgcccagagacgctggcaagatgggcaagacacctctgtccgaggtgtctcagaatggaggacccagtcacctttggggacagtactcaggaggcccaagcatgtcccccaagaggactaacggtgtgggtggcagctggggtgtgttctcgtctggggagagtcctgccatcgtccctgacaagctcagttcctttggggccagctgcctggccccttcccacttcacagatggccagtgggggctgttccccggtgaggggcagcaggcagcttcccactctggaggacggctgcgaggcaaaccgtggagcccctgcaagtttgggaacagcacctcggccttggctgggcccagcctgactgagaagccgtgggcgctgggggcaggggatttcaactcggccctgaaaggtagtcctgggttccaagacaagctgtggaaccccatgaaaggagaggagggcaggattccagccgcaggggccagccagtggtcttctaccagcacaagaacctcaaccagcccaaccacgggctggccctctgggaagccaagatgaagcagctggcggagagggcacgggcacggcaggaggaggctgcccggctgggcctgggccagcaggaggccaagctctacgggaagaagcgcaagtgggggggcactgtggttgctgagccccagcagaaagagaagaagggggtcgtccccacccggcaggcactggctgtgcccacagactcggcggtcaccgtgtcctcctatgcctacacgaaggtcactggcccctacagccgctggatctaggtgccagggagccagcgtacctcagcgtcgggcctggcccgagctgtctctgtggtgcttttgccctcatacctgggggcgggttgggggtgcagaagtctttttatctctatatacatatatagatgcgcatatcatatatatgtatttatggtccaaacctcagaactgacccgcccctcccttacccccacttccccagcactttgaagaagaaactacggctgtcgggtgatttttccgtgatcttaatatttatatctccaagttgtccccccccttgtctggggggtttttatttttattttctctttgtttttaaaactctatccttgtatatcacaataatggaaagaaagtttatagtatcctttcacaaaggagtagttttaaattccatttaaaatgtgtatttattggattttttaaaagcgacaatagtaatggtaaaggatgggcaggaaaggccagtagtgctcccccgcccagtctcgctgggtctggcgagccaagcccctcgggcgctggcgaggtcctcagccatctgcccctcgagagccaagcgcggacggtagccacccagttcatccctcccgacatacaccccttccctttggggaagggagcctcaggacagcttctgtcctctctgataggatgggagagtctgcagaaaaccatctggggtcccttttccagtccccggcttggagtcgaagggcagatgcaccccaggccagccccacgagatgctggcatagctttccccagaaaccaggttggaagtagatggcttcaagcttgctagtctccacactgaatcctctgtccgttatttatggagtcacacgatgtcatggttcactaggcagcacctcacgctggagctggagtgcgaggttcttaggggccgtgcacccatgttgccaagccaatgcatgctgagctgaaggaatttgtcttagtggcagttttttaaaaaatgcccccaaagtctatgctgatactgaaaaagggctactgtatctttaaaaacaggaagttgaacccaagctgtgaaaagccagtggtgctctgtgcatggtgctgtgcggagcctgggtgctgtagtgttgtgctgggactttcttgactcttgggcaggtcacatcctacaggagctcagcagaccagtgtaacaacagttaatgcatctatcctgatccctgaatttccacattggacaatggtgcatgcctcacacctgagcctgcttcctccatgctgtcattgggttcgggggcctacacttaacaattttaaagtgcaagagtcaaacattttcaacaggttgctataattttcctccctaattggtgccatttctccatttgatcattttctttttttcctttctcccctcttcatccactttaatatagctgttctgaaattctggtgcattcattcggttctttgaaatgagaatgtggtgcttaatttttgtgacgttgtcgagagaggttgggcctgatgggagcaacactcatcatcaccaagtcaaactttgttggagtgttggtttttcttgtgatattagcagaaatgatctcatgctagccatgtggatgtgtgtgtggtgaatggggggcttcatcaggacacacagaggggaatgtggccacacggtggatgaccaccaagccctgagatgaacaggtatttactgagcagttgtattcagatatgggtcttcatgaatcatgtttaacaatcagatgaccgctataggcaagttcctgagcttccgggtgccttgagtaagagctgagaaccggcctgctgggtgtttactgtatctgtttggaagcactggcggagggtcgttgtaagatgtcctgagcatttatgtggtctggttttaactgtaaatagtgaaagatttttttaagcacttttgcctagatttaaacagcaacttgaaaaaaaaagtatgttttaacatgtaattgtgggagaaattgtaaatagtagccgaatatttaatgtgctttgtctatcctccacttttaccatattctgtaaagttgcatttattttacaggacaaaaaaatgaaatattattgcttttgaaataaatacccaagagcttatcaggacttagaattattcagaactcagatttataggaaaacctctgaccttcagtttgacaagctaaaggaagcagagtctttaatgagcatgctaattttctagttttgaggaaaaattgggtcctttaaatgctattttgcttatcgcatcagtacttttatgcaggtctcatttgactccgtgcttaggtagatgcgggggtgccttgaaaacttcattttaaatgatcttaagcaagaaatacaatattttacgaaacatttggagaatgtgaccgtctgtatgacccgtggaagccccaggttggctgttggtttggaaggtcccgagtgtaacccaggtgattctgatacttggcatgtgtgaatcttcctgatgtatgttaaataaactcttcccctcatcaccctttggtaggaaagccattagatgaaaggagaaaccaatacaagctaaaagcatgcgacgtctgtcccccagcccaaacagccttggttcatcagtttctgcagtaggagataggctgctgagaggtgagtcaagaggcagtctccattggatgtccccactccccgcagaatggcgtttccagagttaggcggtgtggttgccgtgctcaagcccatgctgatttgtacactacatgtctaacctacctcaaatctcagtcattaaaattagcatgctttagacatatatttaaaaagtaactatgcacagctctttatcccccccttgctgctgaagctttcttaaagagaaaaatcaaatttttattttttactggcactatcattttttaagtcctaaagatgattaacagacatttttatcatgagaagaaaaataaagccattgcaactaaagaacctaacagcatgaccaagttcgaagagtcatattatagcaacggaaatcgatggcgtcttagtcatctccccagtgtgccctgtccacggacaccatccacgtgcagtgcaaacatttggttccttttctgctctgttttgttttccctgcctgttgcgtgcaagggaagtgcttgtaaagttctgtgctacgagatttttaaaataaaaatcgcttcgcagcaggttctcacaaaataactggtgctagctcaagaaatcatcatctgaccatcagaaatcttgactaaaggtgttgcatggatttgggggtctttcggtttttggttttgggtctggcttttagcagggccaatgtttcccacaccccggcttcatgggtactgctttgccttctcaccaaggtgacgatggtgtgcgtggaaagagatgataccccaccgccccctcttggtccttccaccagcctcttttgggaacagtagtttgcagagcaagggatttttaaagcgctaaaggaaagaagtagcagagcttaactgctttgtaccacacagcagtagatgtgcaaggacggttgacaatgagtcgatgataacctaatttcattgagagaaacccagccagacttgcttctagaggtttaatcaccatgagatctcaaaccaaggcaaagctggtggaaaactatatgatatccctgacgtgcctcaaccagtatctctttccttttgttactgaagtgtgttttatggactaggaagcatttttatgaattgaaatagtctaaataaaatggtgctatggtgttttaatgtgactgtccctgatcctgtcttgctgaggtgctatcaacgttctgaaaccacaaccaaccaaaaacaaggtgggctccagtctcttggctttttttttttccctcccctcttttggtgctgtcttagacccgtttaccgtgctataatctgctctgagcagtgttgtgttgtgttgtattgttcttcccttggtggccaaacaaagcaagtcgagaaggcagctatctccctttctgtgatcgggagtgggcctgcctggcttggcaggtgctttttggttccacacctgtcttctcaggcttgatgtgaaagaaagggcgaagggttttttgagtttttgtttttgaggaaggggagttgggtacttctgcctctcctagcatgataggcattctcatagccagggacagattttctcctgcagcccagggtgctaagcagacatctctgggagtcccaagggcacaccaagggagaccagatggatctccttcctcccctggcactggctgggaccatggtgggcaggggcttcattctctgacccagcgttgcttctgcctctcattggtaaccccttatgttcggactaaaggaaggagctttctttgctcactcgatgccactgaggctgctttttagttggtgctaacctaaatttcttcttgggtccacagaagttgatgttttaaaaactcaccaggaagctccattttgtgtcatccactgtcacaataatttttttaaatacctcaaaaacaggacatcatgacaacttcagtaaagtagattccatgagggtctgatacctgcaggttgtccgtctgatgacatacttgaccttgaaaaatctggggtcattttgtttttcattcttcagcagttaagatagcggaacgccgaaaggaaggagcgtagttggctgtatttcatgttttatttcttatctctttgaattcctgtttggttacttggcttccaatggaggtgaacttaacaaccatacttgaatattccgtcttgactttgtaaactgtggctacttgaaatgaagtttatctggggttgatggatgaatggtagatttttgcaatgtctcaaggcaataggatgtgtattaaactgtagatattcttagtacagtaaatttatgctgataattttattttgtataatttttacctttttgttaatattttttccttccactttattggtttgcctcctgagctacccctccttaccctcccttctccctcagtgtttcagtaaatttaatttagggtgcctagaaattgcaagtatgtatcctttttgatttgtattttattataatttacacaaacaactgggtttgtgaactgtattactcctggtatctttaaaatattgtgggtgttttaataaattttatatttattttttgcactcaaattcagtgtgggttctctttttccccttcttgaaccaggactggaatgtgatgtgtcaggtaccctgtaacctcacccacccaccgtatgttgtagatgtacaaatgaagccctcactaatagcagcagcggaacctggccttgtccattctgccacctggataaaggaatgttcagaggctatcagctgttaaaacgggatctaaagggagaaaatagagatggcctttttctcatctatgtttctctttttgttttctttcccttttatgtttttttgtcc

SEQ ID NO: 463500 - DNA, 351 bp, Homo sapiens
ctgactgagaagccgtgggcgctgggggcaggggatttcaactcggccctgaaaggtagtcctgggttccaagacaagctgtggaaccccatgaaaggagaggagggcaggattccagccgcaggggccagccagctggacagggcctggcagtcctttggtctgcccctgggatccagcgagaagctgtttggggctctgaagtcagaggagaagctgtgggaccccttcagcctggaggaggggccggctgaggagccccccagcaagggagcggtgaaggaggagaagggcggtggtggtgcggaggaggaagaggaggagctgtggtcggacagtgaacacaacttc

SEQ ID NO: 463501 - DNA, 2910 bp, Homo sapiens
taaacttgaataaaaaagcaaatcttgtgagaaatgtacaccaacaacgagatcgattttaacagtgagcaaaaagtttttaaagaaattagtggaaaaaatataggaaagttgaaacacattctgctggtctgcaccctgaccaaggaagacaatcgctgcgtgggcaagattcccgaggatgagcagctgcatgttctccccctgtacaagatggccaacacggatgagtttggtagcgaggagaaccagaatgcaaaggtgggcagcggagccatccaggtgctcaccgccttcccccgcgaggtccgacgcctgcccgagcctgccaagtcctgccgccagcggcagctggaagccagaaaggcagcagccgagaagaagaagattcagaaggagaagctgagcactccggagaagatcaagcaggaggccctggagctggcgggcattacgtcggacccaggcctgtctctgaagggtggattgtcccagcaaggcctgaagccctccctcaaggtggagccgcagaaccacttcagctccttcaagtacagcggcaacgcggtggtggagagctactcggtgctgggcaactgccggccctccgacccttacagcatgaacagcgtgtactcctaccactcctactatgcacagcccagcctgacctccgtcaatggcttccactccaagtacgctctcccgtcttttagctactatggctttccatccagcaaccccgtcttcccctctcagtgtcctgggtcctggtgcctgggggcacagtggcagcagtggcagttttgagaagaagccagacctccacgctctgcacaacagcctgagcccggcctacggtggtgctgagtttgccgagctgcccagccaggctgttcccacagacgcccaccaccccactcctcaccaccagcagcctgcgtacccaggccccaaggagtatctgcttcccaaggcccccctactccactcagtgtccagggacccctccccctttgcccagagctccaactgctacaacagatccatcaagcaagagccagtagacccgctgacccaggctgagctgtgcccagagacgctggcaagatgggcaagacacctctgtccgaggtgtctcagaatggaggacccagtcacctttggggacagtactcaggaggcccaagcatgtcccccaagaggactaacggtgtgggtggcagctggggtgtgttctcgtctggggagagtcctgccatcgtccctgacaagctcagttcctttggggccagctgcctggccccttcccacttcacagatggccagtgggggctgttccccggtgaggggcagcaggcagcttcccactctggaggacggctgcgaggcaaaccgtggagcccctgcaagtttgggaacagcacctcggccttggctgggcccagcctgactgagaagccgtgggcgctgggggcaggggatttcaactcggccctgaaaggtagtcctgggttccaagacaagctgtggaaccccatgaaaggagaggagggcaggattccagccgcaggggccagccagtggtcttctaccagcacaagaacctcaaccagcccaaccacgggctggccctctgggaagccaagatgaagcagctggcggagagggcacgggcacggcaggaggaggctgcccggctgggcctgggccagcaggaggccaagctctacgggaagaagcgcaagtgggggggcactgtggttgctgagccccagcagaaagagaagaagggggtcgtccccacccggcaggcactggctgtgcccacagactcggcggtcaccgtgtcctcctatgcctacacgaaggtcactggcccctacagccgctggatctaggtgccagggagccagcgtacctcagcgtcgggcctggcccgagctgtctctgtggtgcttttgccctcatacctgggggcgggttgggggtgcagaagtctttttatctctatatacatatatagatgcgcatatcatatatatgtatttatggtccaaacctcagaactgacccgcccctcccttacccccacttccccagcactttgaagaagaaactacggctgtcgggtgatttttccgtgatcttaatatttatatctccaagttgtccccccccttgtctggggggtttttatttttattttctctttgtttttaaaactctatccttgtatatcacaataatggaaagaaagtttatagtatcctttcacaaaggagtagttttaaattccatttaaaatgtgtatttattggattttttaaaagcgacaatagtaatggtaaaggatgggcaggaaaggccagtagtgctcccccgcccagtctcgctgggtctggcgagccaagcccctcgggcgctggcgaggtcctcagccatctgcccctcgagagccaagcgcggacggtagccacccagttcatccctcccgacatacaccccttccctttggggaagggagcctcaggacagcttctgtcctctctgataggatgggagagtctgcagaaaaccatctggggtcccttttccagtccccggcttggagtcgaagggcagatgcaccccaggccagccccacgagatgctggcatagctttccccagaaaccaggttggaagtagatggcttcaagcttgctagtctccacactgaatcctctgtccgttatttatggagtcacacgatgtcatggttcactaggcagcacctcacgctggagctggagtgcatctgcccttcgactcccggggactggaaaagggaccccagatggttttctgcagactctcccatcctatcagagaggacagaagctgtcctgagatccctccccacggtccg

SEQ ID NO: 463502 - DNA, 2666 bp, Homo sapiens
tggctgcctgcaggtggcagcccgagggcctggtcccaaaggccggtgacgccttctcacctgcatccgctcctccagcccaggctggcggtgactgctctgatcactacgtgctgtgaagggcacggtgccagcctctgatctgggtccttgctgccatatgaagacacccacctaccctgctggagaggggctctggagggccagggagagagaggatagctgggctccagtcggtgccccatccagagcccacagacaggacaaagccatcccgggccctccagcccccgttggccatcgcagcacacgccacctgcacaaagatccggcaggcaccgggagccggctggcaggtacctctgagcacactggattaattcccagggcggccgtcacagcagtgacgttggcactgaccacccacggaaaggacagaatttaaagaggctgagtttttcatctctctctgctgttttctctctggtttcccttttaccattttgacaagtcccaccatactcagttccagcctgggacacacacttgtgattgctaacgggtggaaagttgcacgtgccatgttgtgttgctgacaccaaaggcaaaagcccaggtcctggccccaggttaggcccacacatgcctgggctgtcccatctcggggactccctggtcagagctgaaagtcttcgggctctgtctccctcgctggggagtgtgtccagccctgtcctctagcactgggcccctgtctccccagacacggcccccagggcggaggggaccacagacattctgaggtgaactctcctccgtgttggaaatatgaaaaataaaaagggaagggctgggggaagagacggggcattgtttacttcctcaaaattccatgttaacgagttcccgctgaattctctggttaagcagagaacggctgtgcagagcgtgagctgtgagccccaagctggtcctcctgtgggccccgcagcgctggagctgacctctcaccaagggtccctttgtaacttcctgtgactgattctttaatggcatctaatgatgatgcaaggaagctgccagctgggagtttcggcaccactgattgcccccataaggagccagtgggatggacaccagctcctgccccttgcctgaaacatccctgcagaccctcggcctgcaccggtgccccactgaaggcccccacctacggttctgcccacacaccagggtctctccagctcaccaccacccagggtccttccagctctcctcccccagggtccttcaagctctctccctccagggtccctccagctttccctgctctaggttccctccagttctcctcccccagggtccctcccgcttccccacttaacctccccggggtccctgcagctcgggcttccgcccccggggtccctccagctgggttttctcttgcaccctggggcctggtgctccacccctctctgtccacttcctgcctccaggctgtgtccgagctctgtgcacctgacacccacgagcagaattacagccctaaagacgtccgtgccccagttgctggcacctgtgaacaccagcaaatcaaaacccaattcagcagagggatgattttcgccttccggaagatgaaatcacgaaagctcagagacggcgcgcactccctggtgtttcagcatctgtcacggggatcaacaaagcatgacagccgccaatgtgcctccgtgtggacttttgtgatgctgtattttctcttgagaggggcccctgattctggacagaatgcactgggagaccctgtgatgaccactcagccccctctgctgctgctggttgagcagacaacagggtcctcccgaggagagaacacagtaggcacactggatgtggggagagggtccaaaagccccaagcagggggcaggtctgggcagaggagaaggcgctgtgtctgtggtggcactggatgcctcggaagtcatctttagagccctggagtcctcgccaagggcacgggctccctttgtggtcctggaataatggggcctgcctggcactctcagattgcgtggggatccgctggacttaggacaacatttataatcaattttgcttacaaaattctattggaagtttgagttgcatcaaattcataaattagtttggcaaaaacgtacatcttcttaatatttctttttagatatggaatatactgtatttctccatttgttcaaatattttctatggtgctctcttgggcttatggatttaattatttgagcctgacagacttcttgtaagattaatttccaggtactcagttttaaaattgtgaatagaattcttttcccattgtttctctaactgttaatgctgatatgtaggaaaacgactgctttttatgttcctattaaaatttttttaaaaattagtataattttacattatttttcttaggacatgctggctttgggaaatgaattattgggaaacatgccacctttttgtgttctctggaaacacttatctagcatggaaatcatctgttccatgacagtctgaaaacccagcctgtgaaaatgtctgtggctggaaacttgtgagaaataattcttcaacaacattttcaatttcatacatggcttttcatttatc

SEQ ID NO: 463503 - DNA, 941 bp, Homo sapiens
gcctagcgtgccctgactctcttaactaccaccgctacacggtcatcaaaaacaaggaaaacctaaaaaactggcagagccaagacagcccaaggcaacatgatgactaaaagtaatgtgggatcctggaagagaaaaggaatgtccgtgaacaactcgaaaatctgaataaggaagccagagaaagaaaagtaacggaagcctagagcaagcagaaaatgaataaataacaaaaaatacagcagaaatcaatgcattttaaaaattagaaaacaacagagaaaatcaatgaaaccaaaaatagatttttaaaaaaaatcaatcaagttgaaaacctctagctagtccaaccaagaaaataagggagaagatgcaaattactaatatcagaaacgggagagctctatctctgcagggtcctgtgagcgttaaaatggaatatgatgaagaactgattccacacctgcaaatgtgtggcggagctgcaaccctggaagcctgtgccggcctctacgggccccactgcaccctccgtgccatgaacctagttgctgacccccaggtcacagccaggcaggaaggaacagaagccatggaggacctgagggtgtggccagcaaagcccgcgctgggatccatgttggaaatggagatgggatgtatgggacaacaaagggctcctggtgcattgctgaggtatcctgggctcccacaggggccacacatggatttggtgtggaagtgtccccccaggctccgtgtcccaggctcggggcagagccagcgccagtggttgggaggttcagggagcgttttccaacatcagcagctaaactgtggagcccaccacacccggcatgtcccaggggaggctgagggactctgttagcgttcacaggcggcacatcccccagggcaggaggcagcccctctggccccac

SEQ ID NO: 463504 - DNA, 2558 bp, Homo sapiens
gcgtgagactccacggtcatccagtttcagccgtgggaggggaaactggccaaaggagcacgatgtgggtgtttttaatgggccaggcccgggtacactggcatcatttccactcacaggcatccaacagcaccttgtcacatggcacacctagacgcacggaagatgcacctagagctactttgcagcaggctggctgggccccattcccggctgccttaggtgatttgcatggttcactgcagagcccagcaccgctgcagggttgcacccctccctctacgtccaatgactcaaagcataagccacgcctaggaaaatgttcctggtgtcaaacgcaaatgacttttcctttcctagactttaccaattattcaaaaccatcattgtttttattgttccatactggggccctatctttattatgtggttgtttttctagaatttctaattgccttttccttgttgagaaagaagaaatattaatgctattcaccattgtcccaattatacatttgagcttcttatgcatttcatggattgcttagaatcagttctgtttttttttgcagttgtcattttcattaagttagattcactctggtccagtttggacccactgctccacatttaggccatctctgcttctctgcttgccctggctgggtcgagaggacatttgtcactattattattctgcttctttctaatggcttttttttccttcaacctctacttttatcttgtccttgcatttcccacccatcccgtctccccacttaatctactgagaatccccttccccaggaacacctgttctgagaccatccggtcgtacactcctgcatagaggggccaccctgggacctctggtccctcattgcagcctcagaccctggacagtcacttcctctgctcctattcagtgccctatttcaagtgctcaaataactcattaagaaatgatgcttggttaaaactgttccaatattggctaagctaaatgatagcactagtggtgagcatcacagtcacccctggagaccatggcaggcggggcttgggggggctgccagtgggcactgtggtgttccatctctttatgtggacaccagcctgcagagttcgattcactttgcccacttctctgcgtgtatgttgcactagagcaaaaaaaagtttattaaaaacagaaaggatcttgggacccttagaactcaccgcatgtctgaaaatcatacttgtttgatagatgtctagatgtggaacttaggtggaaactttgtcagcactcgaaaaaacatcaccctgctgccttctggaaaaacgtcaccctgccgccttctggaatgctactatgctatgttgctgttggagatctaatgccggtctgatttttatttctttgtagctgaattattttttctttaggtaatactttagtctctctttaaaccaggtgttctgaatttttacaatgacatgtgaagatatcttttaaaattcatcttacttagcagttcacaactttctcaatatgaacatttgagtctccctgacaatttggggaccttttctggtgctatttacttgaaaattgcctctactccattttctctgttttcttttcctaaaacttctattggctgaatgtggtctgtcctagaaggatccttcatgcctcattaccccttcacttctttcgttttactttttagaaaatttccccttttcttttgattaaaaaaaattcagaagttaccacattccaggtttccaagagcttttatgaggcacaattgctgttttcttaaagtacatgttcatgttttatggctgcattatatccttaaatctctctgagaattctaattattgggaggattttgtttctaaattgcttcttcataggctatttttattctctttgattattttagattatcttaaatatttccagtcacatttaagaatgaggcttacttgagttttgtagattgtcattggacaaattttgctttgggggagtgagccagaggcccaaaatgtcgtaatttgaagatctttattctaagtcaccaacactgcaaaagccctggatctactctagatgtacagccctttcagaatctttgaagaagagtgatttgggccagtcagtgggcactggcgccgtcagattgcaggggacctgaggagggagaggaaataaacaccatgctcagtcatcttgaatcagaatccagccaagtctgtcgaacagaggactggtgccaggtgctttggccttgggctaaggggctgttcaggaagaggtgggcgaggaggatccgtggctcgcctggtcacaagcatgttgagatgaatccagcctggtgccacctacagccgtgaaggcccgcggtctgaccctataatgtgctgccttcctgagacggctgcacttctgcaaagccctcgtgccctcatgtcctagccatgaaatcatgcagactttcgatcacaggccttagcagtgagaaacagaaaagtcttttggtttctgtcaattgcagggc

SEQ ID NO: 463505 - DNA, 1045 bp, Homo sapiens
tgtataatcagaggcgtccctgcaatgattaaacaccaagggaaggctgccttcccagtccatgaccggcgccggagttttgggtccacggataaaacgtgtctcctttgtctctaccagaaaatgaaaggaattgaaattaagagaagggagaaattgaagtgtggcaccaagattgaaaggagaaagaggttgagggatagacctgaggtcgtaggtggatctttctcatggagcaaagaacaggaggacaggggattgatctcccaagggaggtcccccgatccgagtcacggcaccaaatctcatgcgcgtccgtatgaagagaccaccaaacaggctttgtggagaagatgtcgaagacacaggagaagacaagccagggagaggggcttagagcagattctcccttgcagcctcagaaggaatcagtcctggtcacaccttgatctcagacttctggcctccagaatggtagcagcagcaaaaatggcaaaatgaggacttttgagaattcctttctctatggaaacaaaaccctgggggaaaatggtctgaatcaaccttttcagaactctggaaattagcccgagacttgaagcaattcaggttgcatttgtataagaaaagtgacagaatctcagtaagaacagcaagctttgaaggatttgaacttgcccagttgccttccttctttctccatctctgcaggggacttaaaaccaacatcccacactcataatgaaaacctggcaggaggcagaacaggattggagctgcttcaaagccttaggtccagagaactcatcacctatgcagatcctcaataagactcaaagctgattccgcctcagaaaccatggagacccaaagccaaattcaaagtgctgaaagttaactcatccaatcagtcaactcttgtacagacctcctttttttttgttcttggagtttgttttattctaataaaggtgttttatattgttgttgtattattcttaaataccatattttagttgctattataaatggtacttctattgcc

SEQ ID NO: 463506 - DNA, 1361 bp, Homo sapiens
gcagttcacatatgccagagagaagccatatagtgcttcctttaagtgaagagaagtcaacgagaggattctattttgcaaagctgtattatgaagctaaagaatatgatcttgctaaaaaatacatatgtacttacattaatgtgcgagagatggatcccagagctcacagatttctgggtcttctttatgaattggaagaaaacacagagaaagccgttgaatgttacagggaacagcttctagattgtgaaggtgaagatggatggaataaactttttgacttgattcagtcagaactttatgtaagacctgatgacgtccatgtgaacatccggctagtggagttgtatcgctcaactaaaagattgaaggatgctgtggcccgctgccatgaggcagagaggaacatagctttgcgttcaagtttagagtggaattcgtgtgttgtacagacccttaaggttccaagaccaaagattaaattaataaaaggtgaagctggacaaaatctgctggaaatgatggcctgtgaccgactgagccaatcagggcacatgttgctaaacttaagtcgtggcaagcaagattttttaaaagtggttgttgaaacttttgccaacaaaagcgggcagtctgcattatatgatgctctgttttctagtcagtcacctaaggatacatcttttcttggtagcgatgatattggaaacattgatgtacaagaaccagagcttgaagatttggctagatacgatgttggtgctattcgagcacataatggtagtcttcagcaccttacttggcttggcttacagtggaattcattgcctgctttacctggaatccgaaaatggctaaaacagcttttccatcatttgccccaggaaacctcaaggcttgaaacaaatgcacctgaatcaatatgtattttagatcttgaagtaagcaaagattttaacaaattaaatattctgaattttgtttaatttttttttctaacttaacttttccttaaataaaacaggtatttctccttggagtagtatataccagccacttacaattaaaggagaaatgtaattctcaccacagctcctatcagccgttatgcctgccccttcctgtatgtaaacagctttgtacagaaagacaaaaatcttggtgggatgcggtttgtactctgattcacagaaaagcagtttctgataattatttagcctgaaaattaaaaaaaaattagcacaaggctttgtaggtaagaccattatagatctttctaaatatttaaggtgtgttttgtgtcaccattaggtgtagatggtcagccttttgaacaaactgacactacagaagaggca

SEQ ID NO: 463507 - DNA, 2753 bp, Homo sapiens
gggttgatgggtgcagcaaaccaccatggcacagtagccatatattagtattgacatttttattaaattactatgtttccatcattaggaaccataattttcagtataaaaatgacatagcataaaatcaaggaagtttaagtaaaaatcttgtaatcttaaaagtgaattggaaattgcagtatgaactcacattgtgttttactctttaaaaaatacatattttctagttctgtccactgaaaagacccagaagcaatgaaaacccagtaacaatgagcacacttccacggctgaactctctagataacatttaccaatgaaattggctgattctaagtctagggcaaaaaatgtacaaaaggagactggatacaagtctcttattgtaccagaaagtgaaggagaaatcaaagactaatgaggtcacgttaaagtgatacaggacgacacagggcctgcctgcagcagctggtcaataatgaagggattaatccatgactgcaagactcgtgggaaggagggagtggggactgcagggagggtcctagtaaaagcagggtgggcctcgatgagcacagcatggacagtgcgatttaaatcccatcgcttgtgggcaggaggagtgaggatgccagaacctagttatcccccaccatcccacgctctcccaggaggcggcggcaggaagtgcagtctacagtaagggaaagccgccggagctggagacaggctggaaagagcaggtaacagcccacaaggagcgggggccctggctgtcagactcaacttgcaggaccatcaagtgcaggtgtggttcaagaaccggggccgcttgctctgcggtagcaacggcacataaccgcagcgatgaccagggcagccaagccagcagccgggaccccgggatgctcttggcacatgatccgactcccctgcctttgcgggtcctgtactcccgcgaggtccaggattgtgcagcccctccccaaccggccgttgggaatcttcgcagcagcagaacccgctgcctccaggtccgaccagacctgcataggtagagagtccccgcacagggcggccagcagagctacccagctgccccagggcctcgggacccctgggcctgggacccaggccagaccctgactcattcggtgatctcacaggactcctcccaccccaagaccctttcagggaccctgcctcgaactccacgacatgggaggcaggggcgggccttttgcaggggaaggactcccccagcaggacgtttactgaatctggagggagtcgccctgcagatatcccgcggaagccggaggagacccaggtgcgccccaccggctagctgcgcctgcgggtgcccaaattggtgtccgggccatcctcaccgcagtgactcctccgcagcgccaacgcactccattttccttccaccctgccggtggggggcgtttgcttgttctcactctgcagccgcagccagtggcgccgctaccaaggtccccgcctcgccatccgggtcctgcctgagcatccttattggtgctcagggctaggcgtgcattgctgctaggggcgcggaaaggtttatcgtgggtggatgctgcccggggcttgagtggtttttagaggtcttgagtggctcactctccaatcagcgctttctagagacagcgtggtcagcgtacttgcttactttcaggattgcgagacgtctttaacccttgctgatcggctgacgctgcagcttcctgtggcttcctgctcatttcccgcaagatagcactgataggcaattccattttggaaaatttatcctgaggaaataaataaagatgtaaacagagaataacttacagatgtgacgtttgtgatcgttaaaactggaaacagcgcaagagtggacgataggggatgagagagccacacagcgcatagaagatgatcagtctgaagagagggttttcagacatgcaattaactgctattcactgtacttcattttaactgcaaactagcagtctctttccccaggaaaaaagaggtcaactcggaggagccagggattcagcccactctggacaacactcagagccatggcacctacctgtatgaaaaaaaattgttaagcagctgccactcctagttactggcctctgctcggtgactgatgcacttctaacatccttgtcccaggataaagaccttgtaatggagaaaaaagatggcagggatcctttccatggaatttcggctgttgtctagtggaccttccaggaattgtctgattctatgggaacaggagcgaattccagggccatggcagttgcttaatgctgcacagcactctagatttgaaagctacaggccagggactggcctagaggaagatacctcagaggctgcaggcctaaccaggcctgaactaggaggggccagtgcagagggagaaacctatgcagaactctctaagaggccaaatctgaggactcgggcaggacatggcagcaatcagggaggcttcaagccacaaaacccccacagatgtgatgcctttatttgtttcatacaaaaacaagccaggaaagaaatggggttggactgcatactctctgcaaagccatatcccaccttctcgctctgccatcctcagtgagtggctcttcatcctcctgagtgtggcctcagggtcataagatggctgctgcacctcccgccctcattccaggcagaaggaggcaaaggcc

SEQ ID NO: 463508 - DNA, 2176 bp, Homo sapiens
gggttgatgggtgcagcaaaccaccatggcacagtagccatatattagtattgacatttttattaaattactatgtttccatcattaggaaccataattttcagtataaaaatgacatagcataaaatcaaggaagtttaagtaaaaatcttgtaatcttaaaagtgaattggaaattgcagtatgaactcacattgtgttttactctttaaaaaatacatattttctagttctgtccactgaaaagacccagaagcaatgaaaacccagtaacaatgagcacacttccacggctgaactctctagataacatttaccaatgaaattggctgattctaagtctagggcaaaaaatgtacaaaaggagactggatacaagtctcttattgtaccagaaagtgaaggagaaatcaaagactaatgaggtcacgttaaagtgatacaggacgacacagggcctgcctgcagcagctggtcaataatgaagggattaatccatgactgcaagactcgtgggaaggagggagtggggactgcagggagggtcctagtaaaagcagggtgggcctcgatgagcacagcatggacagtgcgatttaaatcccatcgcttgtgggcaggaggagtgaggatgccagaacctagttatcccccaccatcccacgctctcccaggaggcggcggcaggaagtgcagtctacagtaagggaaagccgccggagctggagacaggctggaaagagcaggtaacagcccacaaggagcgggggccctggctgtcagactcaacttgcaggaccatcaagtgcaggtgtggttcaagaaccggggccgcttgctctgcggtagcaacggcacataaccgcagcgatgaccagggcagccaagccagcagccgggaccccgggatgctcttggcacatgatccgactcccctgcctttgcgggtcctgtactcccgcgaggtccaggattgtgcagcccctccccaaccggccgttgggaatcttcgcagcagcagaacccgctgcctccaggtccgaccagacctgcataggtagagagtccccgcacagggcggccagcagagctacccagctgccccagggcctcgggacccctgggcctgggacccaggccagaccctgactcattcggtgatctcacaggactcctcccaccccaagaccctttcagggaccctgcctcgaactccacgacatgggaggcaggggcgggccttttgcaggggaaggactcccccagcaggacgtttactgaatctggagggagtcgccctgcagatatcccgcggaagccggaggagacccaggtgcgccccaccggctagctgcgcctgcgggtgcccaaattggtgtccgggccatcctcaccgcagtgactcctccgcagcgccaacgcactccattttccttccaccctgccggtggggggcgtttgcttgttctcactctgcagccgcagccagtggcgccgctaccaaggtccccgcctcgccatccgggtcctgcctgagcatccttattggtgctcagggctaggcgtgcattgctgctaggggcgcggaaaggtttatcgtgggtggatgctgcccggggcttgagtggtttttagaggtcttgagtggctcactctccaatcagcgctttctagagacagcgtggtcagcgtacttgcttactttcaggattgcgagacgtctttaacccttgctgatcggctgacgctgcagcttcctgtggcttcctgctcatttcccgcaagatagcactgatagggtattggaaatccttatgtaaagtatctgttcactgtttttgcccattttcttgatttatttgaactgattcttctattcttttgaagttaatgtgttgcaattttcacatctatgttgttttttcattagtggcatttctcaactccttgatttcttgaatttcatgttgtctatttcagtatgtattaaattatctgtgacggtggaccagttttggtttgtctgtttgttttatttcaatcaatggcacactgaaatgctcaaacattaaactgttgaaaaaatttaatggcattcgcaacctaagcccactctctcccgcttttttttttttttttttttcagagtcactctgtcgtccaggctggagagcag

SEQ ID NO: 463509 - DNA, 2226 bp, Homo sapiens
gggttgatgggtgcagcaaaccaccatggcacagtagccatatattagtattgacatttttattaaattactatgtttccatcattaggaaccataattttcagtataaaaatgacatagcataaaatcaaggaagtttaagtaaaaatcttgtaatcttaaaagtgaattggaaattgcagtatgaactcacattgtgttttactctttaaaaaatacatattttctagttctgtccactgaaaagacccagaagcaatgaaaacccagtaacaatgagcacacttccacggctgaactctctagataacatttaccaatgaaattggctgattctaagtctagggcaaaaaatgtacaaaaggagactggatacaagtctcttattgtaccagaaagtgaaggagaaatcaaagactaatgaggtcacgttaaagtgatacaggacgacacagggcctgcctgcagcagctggtcaataatgaagggattaatccatgactgcaagactcgtgggaaggagggagtggggactgcagggagggtcctagtaaaagcagggtgggcctcgatgagcacagcatggacagtgcgatttaaatcccatcgcttgtgggcaggaggagtgaggatgccagaacctagttatcccccaccatcccacgctctcccaggaggcggcggcaggaagtgcagtctacagtaagggaaagccgccggagctggagacaggctggaaagagcaggtaacagcccacaaggagcgggggccctggctgtcagactcaacttgcaggaccatcaagtgcaggtgtggttcaagaaccggggccgcttgctctgcggtagcaacggcacataaccgcagcgatgaccagggcagccaagccagcagccgggaccccgggatgctcttggcacatgatccgactcccctgcctttgcgggtcctgtactcccgcgaggtccaggattgtgcagcccctccccaaccggccgttgggaatcttcgcagcagcagaacccgctgcctccaggtccgaccagacctgcataggtagagagtccccgcacagggcggccagcagagctacccagctgccccagggcctcgggacccctgggcctgggacccaggccagaccctgactcattcggtgatctcacaggactcctcccaccccaagaccctttcagggaccctgcctcgaactccacgacatgggaggcaggggcgggccttttgcaggggaaggactcccccagcaggacgtttactgaatctggagggagtcgccctgcagatatcccgcggaagccggaggagacccaggtgcgccccaccggctagctgcgcctgcgggtgcccaaattggtgtccgggccatcctcaccgcagtgactcctccgcagcgccaacgcactccattttccttccaccctgccggtggggggcgtttgcttgttctcactctgcagccgcagccagtggcgccgctaccaaggtccccgcctcgccatccgggtcctgcctgagcatccttattggtgctcagggctaggcgtgcattgctgctaggggcgcggaaaggtttatcgtgggtggatgctgcccggggcttgagtggtttttagaggtcttgagtggctcactctccaatcagcgctttctagagacagcgtggtcagcgtacttgcttactttcaggattgcgagacgtctttaacccttgctgatcggctgacgctgcagcttcctgtggcttcctgctcatttcccgcaagatagcactgataggcaattccattttggaaaatttatcctgaggaaataaataaagatgtaaacagagaataacttacagatgtgacgtttgtgatcgttaaaactggaaacagcgcaagagtggacgataggggatgagagagccacacagcgcatagaagatgatcagtctgaagagagggttttcagacatgcaattaactgctattcactgtacttcattttaactgcaaactagcagaaagcctggatctttgagttgtgttgatgggcatattcgtgtttgccacttgaaggagtaagaggcccgcgtggatctggaggcaagtggctgtgccctcctgcaatctgctcacctgcagaaatgctcgcgtagggcagctctcaattttctgccacctcctcagctttttctgtgaaacagaagttggttactttgg

SEQ ID NO: 463510 - DNA, 1304 bp, Homo sapiens
cacaaccacttccttgcacccctgggtagcatgagccatgatgtgagctgttcgtttctcaggtcctacaaggaaaacaggagggaagagggtccttctgtgcttgaagcaggagtgctgagtgggtacccttgttgggagcctcatccacattcacagtggaactgcatgagcaacttaatattttatcaccaaaatgtactctatgttttacttgtcatttcctcatttatcctcagaaaaatcctgtgcaagactttttatcccaatgttcaaacaggaaacaggtgctcccaggctgtcacatgcacgggaagtcaccctcctgcgatgtggctccagccttccctggctatagcagccactgcagctctccaccctgctgctctgggccccattcgatgttggcttcatccgaaaatgcacatcctgggtgactttagctagagaagagcgagtagccaacaccaggtcgtgggcagcaattgctgtttttaaatggctgagttgctcactggtatagacagagatgagctgagctgagctgagtaatggacactgtcttgtggtcgagccacatcagcagttataatctctcatgtacctcctgcaaacaagtcaagtttagaataccttctagataagcacatgctatcaaagtctgtgccattcccaccttctatgccctgtaatttgggttcctctaagagttgataagactctttgctggcaaatttctttttcaatttttagaaacaaatatatgtacctaggtagacacagaaatatggatttattttgcttaaccatcattgttttttggcagtgttttctggggggcaattcctacattccaggcccgcttcaagaattgatgtgcaacccagcgtagggaagaactgcttctggactgcacctgaggcagcaccaccggcaacggagccccgccacctgctgtacccgtccaccttctctggttgacctccctggggccagacagcccactcagagtccgtgctccctcctatggagatgaaggagctgtgtccacaggcgtgcacacagggagaacgccgtgggaacctgcaggcagagactgggggtgcatctaccagccaaggaacacccaggactgccagcagtaccaggaagttgcagagcaacacgggcatcctccttaccgctctcagaagattccagccctgcagatacctgaaccttcagtttccaacctccagacctggaagacagtaaagctctgttgttgtagcccctggtgtgtggtcctttgtgacagcagccct

SEQ ID NO: 463511 - DNA, 1667 bp, Homo sapiens
caaggtgttagcaataatggacacttctctaccttctgccacactctgaacaatgccacacttccatcaaatggattcatcccaaagcctgtgctgcgtgcctaagggaacgtcacaagacagtaggtctggaaagaagcacccaggcagccaagggtgggagctgcaccccaggatcacaaacgccttggtgaatgcctgctctacctgcagtgtggcccctttggcctctacagctggaagtcttcatctgtacaaagtgaataataaaaatattataaaacaaaggcagtcacaaatagccacattggtgttgaggtacaatcagtttatgatcctgggagagcaagaagcaaggagccagcaagtctggacacattccagaggccacgaggggttttatgtcctgagtcctggattccatccaagccatgaggggttttatgccctaggcttaggttgtagtgcggcggggcagccttccacccttaagcacagaacctggtgttccataggccacaagaagttttaaactctggacccaggacatgttccaaggctcttttcatattatgtcagactagcaagtcttgcctcagcttttctcccaacaattggactgatgggttgctccactgggcacaagcatcatgggttcttaaaacaaggccctgaacaagcaccaaatatgttcctgtcaccacactccactagcccttcaactataaacatgcataggagtcacctgggggccttgctaaataaaatgcagcttctgattcaatagtctcaaacaggaccagagattctgcgtctcttgttgagttcccgagtgaggcagacaatgccagtccacagactcacattttgagatacagcacctgggccattgtgttccaatgtgcttgataacctggagcacctattaaatatccaagttgccaggactttcttctggaaatcttaattcagtatgttttgtttggagccttggacgtttgggaaaactagaatttctttctctccctttagacaaaagtcaactactgctgaggcatgggcttaataaatgttgactaaaatatccaactcaacaaccaatcctgtataattttcaaactctgtcaataacttgctgggtccaacctgcagaccctggctgcgtgatggatgaagaaatgcactcagacacagatcccctacaaaagaccatgtttcttctcagcttgctcagtccagctgagccagctttccactggactcctgaatgtgagaaggacacaggctcccaggaccatccagaagcatctctcatcaccttaaagctctgaaacactggctgggtgcagaggctcacacaagtaatcccaacacattaagaggctgaggtgggaggattgcttgaggccaggaattcaagaccagcctaggcagcatagcaagaccccatctctacaaaaagtacaccccaaaattacctgggtgtggtggcacatgcctatagtctcaattaggaggctgaggtgggactattctttgatcccaggagtttgaggctgcagtggggtatgatcgcaccaccgcactccagcctgggagacagattgagaccatctctaaaacaacaacaggccaggtgctgtggcttatgcctgtaatcccagcaa

SEQ ID NO: 463512 - DNA, 665 bp, Homo sapiens
agaacgatgtcacctgcctatcacagccagacaaaagtcaactactgctgaggcatgggcttaataaatgttgactaaaatatccaactcaacaaccaatcctgtataattttcaaactctgtcaataacttgctgggtccaacctgcagaccctggctgcgtgatggatgaagaaatgcactcagacacagatcccctacaaaagaccatgtttcttctcagcttgctcagtccagctgagccagctttccactggactcctgaatgtgagaaggacacaggctcccaggaccatccagaagcatctctcatcaccttaaagctctgaaacactggctgggtgcagaggctcacacaagtaatcccaacacattaagaggctgaggtgggaggattgcttgaggccaggaattcaagaccagcctaggcagcatagcaagaccccatctctacaaaaagtacaccccaaaattacctgggtgtggtggcacatgcctatagtctcaattaggaggctgaggtgggactattctttgatcccaggagtttgaggctgcagtggggtatgatcgcaccaccgcactccagcctgggagacagattgagaccatctctaaaacaacaacaggccaggtgctgtggcttatgcctgtaatcccagcaa

SEQ ID NO: 463513 - DNA, 2116 bp, Homo sapiens
caaggtgttagcaataatggacacttctctaccttctgccacactctgaacaatgccacacttccatcaaatggattcatcccaaagcctgtgctgcgtgcctaagggaacgtcacaagacagtaggtctggaaagaagcacccaggcagccaagggtgggagctgcaccccaggatcacaaacgccttggtgaatgcctgctctacctgcagtgtggcccctttggcctctacagctggaagtcttcatctgtacaaagtgaataataaaaatattataaaacaaaggcagtcacaaatagccacattggtgttgaggtacaatcagtttatgatcctgggagagcaagaagcaaggagccagcaagtctggacacattccagaggccacgaggggttttatgtcctgagtcctggattccatccaagccatgaggggttttatgccctaggcttaggttgtagtgcggcggggcagccttccacccttaagcacagaacctggtgttccataggccacaagaagttttaaactctggacccaggacatgttccaaggctcttttcatattatgtcagactagcaagtcttgcctcagcttttctcccaacaattggactgatgggttgctccactgggcacaagcatcatgggttcttaaaacaaggccctgaacaagcaccaaatatgttcctgtcaccacactccactagcccttcaactataaacatgcataggagtcacctgggggccttgctaaataaaatgcagcttctgattcaatagtctcaaacaggaccagagattctgcgtctcttgttgagttcccgagtgaggcagacaatgccagtccacagactcacattttgagatacagcacctgggccattgtgttccaatgtgcttgataacctggagcacctattaaatatccaagttgccaggactttcttctggaaatcttaattcagtatgttttgtttggagccttggacgtttgggaaaactagaatttctttctctccctttagacaaaagtcaactactgctgaggcatgggcttaataaatgttgactaaaatatccaactcaacaaccaatcctgtataattttcaaactctgtcaataacttgctgggtccaacctgcagaccctggctgcgtgatggatgaagaaatgcactcagacacaggtatcctgtgaaagaatggggtaggggactgggcagctcccagacactgaggagggtgctataaagagtcagcaggtgctataaagagtcaccaggcacagccctgtcaggctggggctccaggcatttattcagtacagatttaatgacaaagttctcaagtaaacaccacaccactagagggtaattaacattgctgacctcctgagtagagagcagtcatgcgcccgcaaatgatcaaaggtctgttttaggaccacatgagtaaacaagctatttagataaacttctctacattcctatgtatctacgccctaagcttttaagagaattcagctgccttcagccaaatcttttactgaaggtatgcaaacctcccagccttccaagaagttttgtgtctatctcctacaacttaatttttataatttctcccaccaccctgacagatcccctacaaaagaccatgtttcttctcagcttgctcagtccagctgagccagctttccactggactcctgaatgtgagaaggacacaggctcccaggaccatccagaagcatctctcatcaccttaaagctctgaaacactggctgggtgcagaggctcacacaagtaatcccaacacattaagaggctgaggtgggaggattgcttgaggccaggaattcaagaccagcctaggcagcatagcaagaccccatctctacaaaaagtacaccccaaaattacctgggtgtggtggcacatgcctatagtctcaattaggaggctgaggtgggactattctttgatcccaggagtttgaggctgcagtggggtatgatcgcaccaccgcactccagcctgggagacagattgagaccatctctaaaacaacaacaggccaggtgctgtggcttatgcctgtaatcccagcaa

SEQ ID NO: 463514 - DNA, 666 bp, Homo sapiens
gaggcacctgaggaactaagagcccaggaagaaaggacagtaatgaaaaagccaacaaatgagaccaattctactctaaaagtcaccaggaaaaattcagctccactggtcctggctctaagtctactagcaaaatcttccagagaagtggaaaagccatcagccaatgtttggaaaccattttccattataaaagaaattcttccaaatcacacaaaacactctgacacttctccaattccccctatcatggggctggcagcagccgctttgcgtcctgaatgtcatgacagtgatgataacagtaatgatgataacagcaatgatgaagtctcacatttaaaattttcaagtcactcatcacatcccaagtcactcccttcattaccttttatttatactggagtcatcctgtgtgcctcagtcagaccattttgtatgtacaatgaccgacaatgagatttaacatgcagtttgcagatcctcccttctctgggtcacctgaaaataagccacaaacaaaggaatgaaattgttgatgaaaagggaagaggcaagactccatatgaagaatacaactgactcacctgtctgtacatgcctctgtgtgtgtgttttatattggtgctggtgaagatagttctttatgctgatgcttaataaggt

SEQ ID NO: 463515 - DNA, 849 bp, Homo sapiens
gaggcacctgaggaactaagagcccaggaagaaaggacagtaatgaaaaagccaacaaatgagaccaattctactctaaaagtcaccaggaaaaattcagctccactggtcctggctctaagtctactagcaaaatcttccagagaagtggaaaagccatcagccaatgtttggaaaccattttccattataaaagaaattcttccaaatcacacaaaacactctgacacttctccaattccccctatcatggggctggcagcagccgctttgcgtcctgaatgtcatgacagtgatgataacagtaatgatgataacagcaatgatgaagtctcacatttaaaattttcaagtcactcatcacatcccaagtcactcccttcattaccttttatttatactggagtcatcctgtgtgcctcagtcagaccattttgtatgtacaatgaccatctgaggcactgcctataaagtggaagatataattataatactacagacgtcattccagctttccagttgcttatggtccagcagggaggatgcacatgggaaaaataataactaatgacaaatgtgatgagtcttaacaaagaagaagagcatattgcaagggaatgtaattcactccagggacaatgagatttaacatgcagtttgcagatcctcccttctctgggtcacctgaaaataagccacaaacaaaggaatgaaattgttgatgaaaagggaagaggcaagactccatatgaagaatacaactgactcacctgtctgtacatgcctctgtgtgtgtgttttatattggtgctggtgaagatagttctttatgctgatgcttaataaggt

SEQ ID NO: 463516 - DNA, 3168 bp, Homo sapiens
aattttatagggtagagtacaagttatggaagataaattaaaagcagctaatattcaaaccagtgaatcagagacaagattatataataagtgtcaagatctggagtcgctaatacaggaaaaagatgacgtcattcaaaacttggaattgcaacttgaagagcagctggaattggagaatcagaatcttcgtttgatcaaccaaaaccaaactgaagagataagaacaatgcagtcaaaactacaagaagttcaaggaaagaagtcatccactgtctctacactaaagctttcggaaggccagcgcctgagcagtttgacctttgggtgctttttatctcgagcaaggagtcctcctcaagtagtaaaatctgaggaaatgagcaagatatcatcgaaagaacctgagttcactgaaggaaaagacatggaagaaatggaaattccagaaaagtctgttgataaccaagttctagaaaacaacagaggccagagaacattgcatcaaaccccttgtggctcagaacagaatcggaaaacaagaacaagctttgccacagatggtggcatctcccagaattctggggctcctgtgagtgactggagctctgatgaggaagacgggagcaaaggaagatccaagtccagatgcacatccaccctctccagtcacacatctgaggaaggggtccagtgtagcaggatgggaagtgaaatgtatctgacagcatctgatgacagcagctctatatttgaggaagagacttttggcataaagagaccagaacacaagaagctatattcttggcagcaggaggcacagtggaaagctctaaatagtcctcttggaaagggaaattctgaattaagtaaaaaggaacaagatagttcctcggatgaactgaataaaaaatttcaatcccagagactcgattattcatcttcatcgagtgaagccaacaccccaagccctattttgaccccagctttaatgccaaagcatcctaactcactctctggaaaaggaacacaattagtgccttcatcacacctgccacccccaaagttaaggattcctaatgttttcagtataagtgtagcactagccaaaaggcacttaagccagccacagttaagctctgacaggatgtttggtacaaatagaaacgctataagcatgatacgaccactgagacctcaggaaactgatcttgatctagttgatggagacagtacagaagttttagagaatatggacacgagttgtgatgatggattattttcctatgactccttggactctccaaattcagatgaccaggaacactgtgactcagcaaagaaggtggcatacagcaaacctccaactcctcccctgcaccgttttccttcttgggaaagcagaatttatgctgtagccaaatcaggtattcgaatgtctgaggccttcaatatggagagtgttaataaaaattctgctgcaaccctttcctatactacatcaggactttatacatctctgatatacaagaacatgaccaccccagtgtatacaactttgaaggggaaggcgacccaaataagtagcagccctttcctggatgactcatctgggtcagaggaagaagacagctccagatccagctcccggacgtcagagtcagactcacgcagtaggagtgggccaggcagccccagagccatgaaacgaggtgtgtctctctcctctgtggcttctgaaagtgattatgctattcctcctgatgcttactccacagacacggagtactcacagccagagcagaagctcccaaaaacttgctcatcttccagtgataatgggaaaaatgaaccactggaaaaatctggttatttattaaaaatgagtggtaaagtcaagtcttggaagcggcggtggtttgttcttaaaggtggtgaattactttactacaaatctccgagtgatgtaattagaaaaccccagggccatattgaacttagtgcatcctgtagtattttaagaggagataacaaacaaacagttcaggtacttaacttttttttttttttttttttttttgtatcatgccagactcaattctcaattatccaacctaatggaaaggagataggataattcagtgtttctttattcactttggggggttagtttgatgccttggaagtatgtgaaactccacgaatttttggttaaaactataatgtaagttaggtgtgtgttgagtaactcccaccacactttacctttcttcctttatactcttctttcctcatatttaatctcctaggtattttcagctgtccaactgtgaagctattttaaggaagggttatctggtaaatgaattctcaataagatgttagttatataatgtactgtgaaattcaggaatgtttgtattttaatatagaatctgaaaatgacagttcttatatgaacttcagatgccataacaccaaagtgggaaatatattgcaagaaagggaaaatgtgacaaataaacaagatataaaatcataaccccaaaattaggtaaactggagtaacaaagttatttccacaaaaatttaattgctgtaattctcacaaagtggttaaaatattctaactgatatggagtcatttatttagaaactgggacttgagatttagcatgtttgcttctgtgttaagtaatgacgtttgaataatgaacaaggaaatgctaacaatcctaaatcttcacagttttctttcctatacctttctcgttgcattctagttgaccactgaaaaacacacatactatctgactgcagattctcccaatatattggaagagtggattaaagtgttacagaatgttcttcgagtacaagctgccaacccactttccctgcagcctgagggcaaacccaccatgaagggattgctcactaaggtaaaacatggatattccaagagagtctggtgtacactaataggaaagacattatattattttcggagtcaagaagataagtttcctttaggtcagatcaaactctgggaggctaaagtggaagaggttgacagatcttgtgattcagatgaagattatgaagccagtggacgaagtctgttatccacacattatactatcgttatccatcccaaagaccaaggtc

SEQ ID NO: 463517 - DNA, 1763 bp, Homo sapiens
aattttatagggtagagtacaagttatggaagataaattaaaagcagctaatattcaaaccagtgaatcagagacaagattatataataagtgtcaagatctggagtcgctaatacaggaaaaagatgacgtcattcaaaacttggaattgcaacttgaagagcagctggaattggagaatcagaatcttcgtttgatcaaccaaaaccaaactgaagagataagaacaatgcagtcaaaactacaagaagttcaaggaaagaagtcatccactgtctctacactaaagctttcggaaggccagcgcctgagcagtttgacctttgggtgctttttatctcgagcaaggagtcctcctcaagtagtaaaatctgaggaaatgagcaagatatcatcgaaagaacctgagttcactgaaggaaaagacatggaagaaatggaaattccagaaaagtctgttgataaccaagttctagaaaacaacagaggccagagaacattgcatcaaaccccttgtggctcagaacagaatcggaaaacaagaacaagctttgccacagatggtggcatctcccagaattctggggctcctgtgagtgactggagctctgatgaggaagacgggagcaaaggaagatccaagtccagatgcacatccaccctctccagtcacacatctgaggaaggggtccagtgtagcaggatgggaagtgaaatgtatctgacagcatctgatgacagcagctctatatttgaggaagagacttttggcataaagagaccagaacacaagaagctatattcttggcagcaggaggcacagtggaaagctctaaatagtcctcttggaaagggaaattctgaattaagtaaaaaggaacaagatagttcctcggatgaactgaataaaaaatttcaatcccagagactcgattattcatcttcatcgagtgaagccaacaccccaagccctattttgaccccagctttaatgccaaagcatcctaactcactctctggaaaaggaacacaattagtgccttcatcacacctgccacccccaaagttaaggattcctaatgttttcagtataagtgtagcactagccaaaaggcacttaagccagccacagttaagctctgacaggatgtttggtacaaatagaaacgctataagcatgatacgaccactgagacctcaggaaactgatcttgatctagttgatggagacagtacagaagttttagagaatatggacacgagttgtgatgatggattattttcctatgactccttggactctccaaattcagatgaccaggaacactgtgactcagcaaagaaggtggcatacagcaaacctccaactcctcccctgcaccgttttccttcttgggaaagcagaatttatgctgtagccaaatcaggtattcgaatgtctgatgcaggatcaaaggcaggggaaagtgctcaatgggacagttacttcttctctagtgcagaagctacccctgtacaatgggggcaacatttttggatgcacagggtgtgcctggcacttggggggagattgaggaagccagctgcattgggagttggttggggctatggtgatggggatggctttctagaacctggggctggaactgggctttggaggctgggtggaatttgggggaggtggctgaatagtgtctttagtggataaggtgtgtagggaagccaagggatttgctctgggcctaagggtcctgcttgttcct

SEQ ID NO: 463518 - DNA, 2963 bp, Homo sapiens
agcaaggtgcagtggctcttgcctgcaatcccagtgctttgtgattagaggattagaggattggaacttaagccccacccaccaacatctggaagggctgagggtgcaagaaatttagctctattaaaaatttaaacactgcagtcggctcgagtactcccagtaacgaggaggtgttctcggtcgtcccaccctcccctgccgtcgccgggctgcgccgccggagccgggacgcgcctccgctgccctcgcctcctccgtccccgctgccctcgccgcccccgtccccgctgccctcgccgcctccgtccccgcggccgccgctcccctcgtcgtccgcgcgcacacgatgaagaaggagtccctcaaccagagcctcgccgagtggaagctcttcatctacaacccgaccaccggagagttcctgtggcgcaccgccaagagctggggtttgatcttgctcttctacctaattttttatgggttcctggctgcactcttctcattcacgatgtgggttatgcttcagactcaacgatgaggttccaaaataccgtgaccagattcttaacccaggactgatggtttttccaaaaccagtcactgcattggaatatgcattcagtaggtctgatctaacttcgtatgcagggtacactgaagaccttaagaagtttctaaaaccatatactttagaagaacagaaaaacctcacagtctgtcctgatggagcactttttgaacagaagggtccagtttatgttgcttgtcaatctcccatttcgttacttcaagcatgccgtggtatgaatgatcttgatttcggctattctcaaagaaacccttgtattcttgtgaaaatgaacagaataattggattaaagtctgaaggagtgccaaggatagattgtgtttcgaagaatgaagatataccaaatgtagcagtttatcctcataatggaattatagacttaaaatatttcccatattatggggaaaaactgcatgtggggtatctacagccattggttgctgttcaggtcagctttgctcctaacgatactgggaaagaagtaacagttgaatgcaagattgatggatcagccaaccttaaaagtcaggatgatcgtgacaagtttttgggacgagttatgttcaaaatcacagcatgtgcatacaagccaggccctggggaattctactaccatgggagatacacgcagacaatgctctctctctccgactacatgaggtattgcagagtgtattaattctctctctctctttttttttttttttttttgagatggagtctggctctgtcgcccaggctggagtgcaatggcatgatctcagctcactgcaagctctgcctcctaggttcacgccattctcctgcctcagcctcccgagtagctgggactacaggcgcccgccaccacacccagtgagaattcaaggggaaacagaaataaatgcagctggagaaccatcccaccatcccgaccacaactgatcttccctggacacgatgaaccacgctgtccaaaccgtcttcactcccgccaacaccagccaccccctcaactatgaaatgctcaaggaggagcatgaggtggctgtgctgagggtgccccacaaccctgttcccccgacatccaccgtgatccacatccacagtgagaccactgtgcccagccatgtcgtctggtccctgttcaacactctcttcatgaattgatgccatctgggcttcatagcattcacctactccgtgaagtctagggacaggaagatggttggcgacctgactggggcccaggcctacgcctccactgccaagtgcctgaacgtttgcaccctcatcctgggcatccgtgtgaccacaacactcatcatccttttcaccagtagttctatgataatattccaagcaatttctcaaatgataaagaatctccaaggccagcagtagcgcccaggtactcgctgtccattgcgggccctgcaccctgggcctgagttctgtatcagccctttattctcacacacttttctacaatggcattcaataaagtgcacgtgttcctggaaaaaagaaggaaagaaagaaatgcagctgttcagtcctccacattcagcccagaggtctttatactctgaacccacttcagccagacttttatccctgccactttgctgaaactgttgttatcaagaaagttgctaagtattgggaagctgttaagctcattacggcaaggacaacttttccagacttcaagattttatttgaaagcttgagttttatcattggcaacaaatactgtccattgttttcttgagggaacaggtccacttagttattttggagaaaatctctgcctcataccctagtctgaagaatgactgtcagttgttctttcacataaaaataaagttgcctgaaaaaaatggctggttcggctttcaactcaacaactgcacaagtactttcactcaggatctttgtcctggaacacggcagatgctctatgtattctccccattttgtcctactaaatgttaactcaagggttgagatttaatacaattaaaaaattttattgcttcatcaaggacattcttcagggacactggctgttttcttcttaactgctcctatgtaataaagagtatgatgaccactggtacggtttggtgccattgctttgattcatgctaaagtatgagccattttgttcaccattgttttcataccattagtgaaaatgtcatcagagtgaaaaagccaaataatgtcttagtattattatgaagtaacttttgacctctcagatgcccctgaaaatgtcttggttttttattcttcccgtcagttcttctcttgtctatttacataccataactacatgggagtgtcctcaggatgctctttaacaagtcatcaccatcataatgta

SEQ ID NO: 463519 - DNA, 2144 bp, Homo sapiens
  misc_feature (2106)..(2106): n is a, c, g, or t
agcaaggtgcagtggctcttgcctgcaatcccagtgctttgtgattagaggattagaggattggaacttaagccccacccaccaacatctggaagggctgagggtgcaagaaatttagctctattaaaaatttaaacactgcagtcggctcgagtactcccagtaacgaggaggtgttctcggtcgtcccaccctcccctgccgtcgccgggctgcgccgccggagccgggacgcgcctccgctgccctcgcctcctccgtccccgctgccctcgccgcccccgtccccgctgccctcgccgcctccgtccccgcggccgccgctcccctcgtcgtccgcgcgcacacgatgaagaaggagtccctcaaccagagcctcgccgagtggaagctcttcatctacaacccgaccaccggagagttcctgtggcgcaccgccaagagctggggtttgatcttgctcttctacctaattttttatgggttcctggctgcactcttctcattcacgatgtgggttatgcttcagactcaacgatgaggttccaaaataccgtgaccagattcttaacccaggactgatggtttttccaaaaccagtcactgcattggaatatgcattcagtaggtctgatctaacttcgtatgcagggtacactgaagaccttaagaagtttctaaaaccatatactttagaagaacagaaaaacctcacagtctgtcctgatggagcactttttgaacagaagggtccagtttatgttgcttgtcaatctcccatttcgttacttcaagcatgccgtggtatgaatgatcttgatttcggctattctcaaagaaacccttgtattcttgtgaaaatgaacagaataattggattaaagtctgaaggagtgccaaggatagattgtgtttcgaagaatgaagatataccaaatgtagcagtttatcctcataatggaattatagacttaaaatatttcccatattatggggaaaaactgcatgtggggtatctacagccattggttgctgttcaggtcagctttgctcctaacgatactgggaaagaagtaacagttgaatgcaagattgatggatcagccaaccttaaaagtcaggatgatcgtgacaagtttttgggacgagttatgttcaaaatcacagcatgtgcatacaagccaggccctggggaattctactaccatgggagatacacgcagacaatgctctctctctccgactacatgaggtattgcagagtgtattaattctctctctctctttttttttttttttttttgagatggagtctggctctgtcgcccaggctggagtgcaatggcatgatctcagctcactgcaagctctgcctcctaggttcacgccattctcctgcctcagcctcccgagtagctgggactacaggcgcccgccaccacacccagtgagaattcaaggggaaacagaaataaatgcagctggagaaccatcccaccatcccgaccacaactgatcttccctggacacgatgaaccacgctgtccaaaccgtcttcactcccgccaacaccagccaccccctcaactatgaaatgctcaaggaggagcatgaggtggctgtgctgagggtgccccacaaccctgttcccccgacatccaccgtgatccacatccacagtgagaccactgtgcccagccatgtcgtctggtccctgttcaacactctcttcatgaattgatgccatctgggcttcatagcattcacctactccgtgaagtctagggacaggaagatggttggcgacctgactggggcccaggcctacgcctccactgccaagtgcctgaacgtttgcaccctcatcctgggcatccgtgtgaccacaacactcatcatccttttcaccagtagttctatgataatattccaagcaatttctcaaatgataaagaatctccaaggccagcagtagcgcccaggtactcgctgtccattgcgggccctgcaccctgggcctgagttctgtatcagccctttattctcacacacttttctacaatggcattcaataaaaacctggcctcgttggccttagaggggganctctggggccgttccgtgtagggggtgattctgaacct

SEQ ID NO: 463520 - DNA, 2624 bp, Homo sapiens
acagtgcatttcttaatggaattagctcttcttgggcaaggcgcaaatatatatacagatacaccacaaggccataactattttaacaaatgtataaataaaatactttggggaagaaaacaagtacttccctcttctttgcaaggaaagacctgggaaaacttccttaagaccaaggagatgagacagaggaaactcccaaaggagctttcttggctccttcccagaaagccagcagagatggggtttcaccatgttggccagactggtctcaaactcttgacctcaagtgatccacccgcctcggcctcccaaagtgctgggattacaggcatgtgccaccgcgcccggcctaaatatttgttttttaaatatcttgaagatacatttgcatatacgatagaaaccaaaacgttagcaaagctactttgggtggtaggattagggtaacttagatctttcccctttggtggtctttttgttttcttttcctttttgggagacagggtcttgctctatcacccaggctggagtgcagcagcgcagtcatggcagccttgacctcccaggctcaagtgatcctctcacttcagccttccaagtagctgacaccaaacatatgcaccaccacgcccagctaatttttttttaattttttttgtagagaagaggatctcactgtgttgccgaggcttgtttcgaacttctgggctcaagtgatcctcatgcctctgcctcccaaatagctagaattacaggcacaatccaccacgcccggctaactttgtatttttagtagaggtggggtttcatcatgttggccaggctggtctcaaactcctgacctcaggtgatctgcccacctcggcctcccaaagtgctgggattacaggcatgagccaccacgcccagcccatacctaacccttttctttttcctcttgtactgtttcctccagattttctagaataagtgtgtttattttgttaatgaaactaacaacaaaaaaactctaaaagacctaaatctaaggagtttagcaccaaaaaaattatcaagacggtgcttagtgttttgtcaagagcaaacacacaggagatgacaattcaattcataaaatccttctagtggtcaaactgtccatatatcatccaaagccttaaaaataaaacttttgatttaataattccacttccaagaaattaatccaaataaaatgatcagtgataaaaacaaaattgttcaagggtatatatacatatcatttacaatagcaaaacattaaaaacaactttactttccaacaattcattcatccatttaataaatatttattcagtacctatgtgccaggcactggagatacagcagtaaacaaactgtacaaaaatctatatcaaagtacctgccctcaatggagctcacagtctagtgggggttgaaagacaggatatagacaataaaataaatatgtaaaatatttgtcatgttacattttgatacacaacatgaagaaaaattaagcaaggaagagagatagggagtaaagggtggagggttatatagattgtcaggaaaggtctaaggtggcagcatttgaggaaaggcttaaagaaagacactattgctttatatgtagacaggatatacttggcattgaatgtatcatacccttttaaactgctctgatgataatgcaatatacttttttattctaagtagaaaaataatctaagacctaatgattccacagaccttaaaaagttcaagccttggccgggcgcagtggctcatgcttgcactcccagcactttgggaggacaaggtagacggatcacctgaggtcaggagttcgagaccagcctggccaacatggtgaaaccccgtctctactaaaattataaaaatcagctgggcgtggtggtgggtgcctgtaatctcagctactcaggaggttgagggagaagaatcacttgaaccctggaggcagaggttgcagtgagctgagatcatgccactgcactccagcctgggcgacagagcgaggctgactccatctcaaaaaaaaaaaaaaaaaaaaaaagttaaagcttacagccactcatggtctgttcctaccaaaattttcaattttctcccatcttcacaattgtccccagatacaaataaattgcttcatttttaagtatcccttattgaacatgttttacattattcacaaaaatgatgaccttaataaacaccgtatcacttagtgcttctgtctcatttagagttaattgcacactggttcgatgttaacaatctaaatcctgattctcaagtaccctgggcacagctctttacctcaagtttcacaaagaacgtcatacgtgaagaaaaattaggtagtactctctactcctactgcaactttccagctcaggattacttgggttacttaagggcctcatatactccctttgccagaaggaattttgacagatgatacaaatagggcactatgcctacttacacctgcattcctcagtgcatcagcatttcagatgactaagggaatgctcctaagctctaatgtctgcaattgtacagatgtacaattagaaacatattaatttgatact

SEQ ID NO: 463521 - DNA, 1232 bp, Homo sapiens
ggtttcctgagacctcccagccacgcttcctgtacagcctgcagaactgtgtgacgcagctcgagcggggactccaggccctggaggattcctctccccaggacctcttgtgtgcagctggattgcttccctccggttctgaaaacagccccgcagaccccaggccgtgctcaatggcaatgaaacccacttctgctaaacgcaggagcgcctatttggaggaagattttttccttgaaatgattccaactaatttcatgcctttcgtgtaagaattcttcgaacagccgtggccctcctttcctcctttgttcctgcaaacagctctgtttcctcccgaggacccgaggcctcaggcctcccccgacaccggctcccttggctgccgcgtcccggcaggtggcgctgagccaccgcctttcatggcgacggtgcttcccgcgatcgggctcgcttagattttcctctgacgcaacaatttacagaatccactgttgatttagggatctggggagcctaacttaaaattaagtaaatacataaaccagggagccagtgtcttccgaacatgagcgttcatcggcacctcggtcctcgggtgaggcccggccccggctgctgctggccgctggtgcctgccggacaccctcgctccgggagagcaggatccccggccttgcgcggagcagagggacgaaggcgccgcagcccaggcctctcccagggtggtcttgagacacttcccagactggacacggagcgggaggaccgagacgcacgccctccctacggcctgcagcgcctgcctgtgcagatggcgccgtcagcccggcgtcagggtggccgtttgggggctggtggcagctttgtgctcctgtctgcagacgctgtcagagatggattggggacaatcctgcggggaggtgctgaggagggcagctacgacaactggccccacaccaggccctgggaagctcaaggtgccaggagtcctcggaaggggcgctacatctgtagggggcctggctctcggttgcggcccccaggcatgggaccagcttgctctcaggccaaggggagagggggcaaagcgcccacaaggccagtgtctgtgaccctgtgtccctcacccaacgtgggacctcccagaaccttcctccagtggcaccagtgaccgggggcagctttgaggtggtgggagatgatttagagcaacagtgggcagtttgcct

SEQ ID NO: 463522 - DNA, 462 bp, Homo sapiens
ctcagctggccgccctgctggggccaggtgacgtgcgagattccacagcctgcgggtctcgcagcagggatgttagggacggtctgagcttctctggtcctgttttggttttgtttgaaagggcttctcagagagatgctcctgattttttttttttttaatagactttcccctcctatcctaggctcaactccgaatggattggattgcgagtctgcacgtgagaaaaccgtttggcttggcttggacccctgccgccccccacctcctccacacacacccagtccaggggtcccctttatcaccctttgcttgcaactccaaaagaagttgcccacctcctgagtcacaacacaaggtcgaataattcctctagatgaaagatcagtttcatttcaaaacgagaataggttcctttttttattttctccacatggtacaaaataaacagaatttgcttta

SEQ ID NO: 463523 - DNA, 743 bp, Homo sapiens
  misc_feature (1)..(1): n is a, c, g, or t
  misc_feature (4)..(4): n is a, c, g, or t
  misc_feature (7)..(9): n is a, c, g, or t
  misc_feature (11)..(12): n is a, c, g, or t
  misc_feature (14)..(16): n is a, c, g, or t
ngcncannnanntnnnagcgagggagaagagtggatgttaagaaacaaaacaagaaattgcaaaagggagatatcagatagaaaggagaacgtaggaaatgcaactgggaaagaatttcaagaaaataaggataaagggcagggagggctgaaaggagggccagagggaggaaaagcaggagggagatttttggttttcaattccctggtgaggctgctggcgtccgcgccctcaacgccccagccttccaagttgaggcgaaagccacctcctcgggcctgctcgcgtggaggaggcttttccaggcacagcctttctcatggtaatcagcccccggcatcacctcccggccgcggctgcgcccgctcggagcgcggctcgcggaccccggggaccggaaacagggcggcgggcggggagcaggcgagcgagccaggctcaactccgaatggattggattgcgagtctgcacgtgagaaaaccgtttggcttggcttggacccctgccgccccccacctcctccacacacacccagtccaggggtcccctttatcaccctttgcttgcaactccaaaagaagttgcccacctcctgagtcacaacacaaggtcgaataattcctctagatgaaagatcagtttcatttcaaaacgagaataggttcctttttttattttctccacatggtacaaaataaacagaatttgctttaaaaaaaatcattagctgtggccaaattc

SEQ ID NO: 463524 - DNA, 1318 bp, Homo sapiens
  misc_feature (2)..(4): n is a, c, g, or t
  misc_feature (6)..(6): n is a, c, g, or t
tnnncngagcagcctacagagtctgacctacactgagggattgggctcctgcccttcccaacacagggggcacggagccgccacggccccttggctgggattagcccgtgtgtccccctcaccagaaatcagccccttcatggggccgcctcacactcccagcccagccctgtgggctttcagcaccgacgtggggacgctcactattgcagcaccgacaaggggcaccaacacggggatgttcacaattccagcaccgacatggggacgctcactattccagcaccgacacggggatgctcactattccagcaccgacgtggggacgctcgctatttcagcaccgacaaggggcaccgacacggggacgctcactattccagcaccgacaaggggcaccgacacggggacactcactattccagcaccgacacggggacgttcactatttcagcaccgacacggggacgatcactattccagcaccgacacggggacgttcactatttcagcaccgacacggggacgatcactattccagcaccgacacggggacgctcactattccagcaccgacaaggggcaccgacatggggatgctcactattccagcactgacaaggggcaccgatacggggacgcccactctaccagcaccgacacggggacgctcactattgcagcaccgacaaggggcaccgacatggggacgctcactattccagcaccgacacggggcaccgacatggggacgctcactattccagcaccgacacggggtcgctcactattccagcaccgacacggggacactcactattccagcaccgacacggggcaccgacacggggacgctcactattccagcaccgacacggggacgctcactattccagcaccgacacggggcaccgacacggggacgctcactgttccagcaccgatacggggcaccaacatgaggacgctcactattgcagcaccgatacagggatgctcactattccagcgctaatacggggacgttcactattccagcaccgacacggggacgttcacccttccagcaccaacacggggacgtttactattccagcaccgacaaggggcactgacaggggaatgcacactattccagcactgacacagggatgctcactattccagcacggacacgggtcactgacacagtgacggtcactattccagcacggacaaggggcaccgatatggggacgctcactattcaagcgccgacatgggaacactcactagtattccagtgttcccgacacgggaacactcacttctcagtaac

SEQ ID NO: 463525 - DNA, 1006 bp, Homo sapiens
ttttcataagggttaatattattattgatttccttaagtctttccaacatccacgactgtgcattaatcagtagctaaaaagaccagaaaagacagaaaaatttaactactttgttccctaattcaaatttcttcaagaagtccttctaaagatatggaactcctgcatttttcataaaacagtggttagatcaatttccgtgtaagcaatgaatcatctttatacttcacaaaagatggggagcaaagtttgacttaccaaagaaaggctgactgattagtctctgggtgaacagtctggtgggaagaccacagattcctgacccctgcacaggtttaacatgaagccctccaaggaacctttcagaactgcagcaatgacttacggtggcttcagagtggggtggttggatgaatctgaggatgtggaacccgtggatatggagggctgactcaatgccttgatgagcttgaagataagtatatacccccgaaaccaccaccacaaacaatgccataaacttaaccactgcctctaaaaaacttcctggtgctcaggcctggcctcacaaaagggaacaaccgttcatgtccagacacattgcagacttctggcaaagcagcctgagctcacgaaaatttacacttttcctggcaactggccgagagtatgagcaggacttggcttgggtttgctttcagttagagggtgggagtggagggaggaaggtggggctgggggatggggcagcaacatttaaaataccaaataaaactgagcatgtgaacgaagctcagagttgccattttggtcctgccctccgagtgaggatccattttgggtcccaccctcgtgtagccattctccatctcccctctgaaaaacttgagagaaaccagccgtctgccagtccacagcccgtgtgtcatttccttctccaagcctcactctttccacagaggagacttttcaaattaacgttttcagttcattaaagaccttttc

SEQ ID NO: 463526 - DNA, 3574 bp, Homo sapiens
  misc_feature (2)..(3): n is a, c, g, or t
  misc_feature (7)..(7): n is a, c, g, or t
  misc_feature (10)..(10): n is a, c, g, or t
tnnatanacnctcagcccaaatcgtactaaatgggaaatgttagaagcattcccattaagaactggaagaggacaagggtgccaactttcactattcatattcaacatagtactggaagtcctagccagagcaatcaggccagagaaacaaataaaaggcatccaaataggaaaagaagtcaaattgtctctcttcattgatgagattattctatacctagaaaaccctaaagactccactaaaaggttcctggagctaataaacaacttcagtaaagattcaggacacaaaaccaatgtacaaaaatcagtagcattcccatacaccataacattcaagctgggagccaaatcaagaatacaatgccatttacaacacacaaacacacacacacacacacacacacacacacacacacccctaggaatacatataaccaggggggtgaaaggtctctatgaagggaactataaaacattgctgaaagaaatcatagatgacacaaacaaatagagaagcaccccatgctcctggattggaagaatcaatatcatgaacatggccataatacgcaaagcaatcagtctacagattcaatgctattcctatcaaactaccaatgtcattttttacagaattatacaaaacaattgtaaaattcacatagaactgaaaaagagcctgaagagccaaagcaaatataagcaaaaagaacaaagccagagaaacagctttggaatagccaataattcatattagcaaaaataaaaacgtataatggcataaaacctacccaatgggctgtatctatttatttatttatttaatggataattatatgattaaatatatacacaaaataattatacatatttatatattaaagtgatatgtttcaacacatatatacattgtgtaataatcaaatcagggcatttagcatttttattatatcaaagattcatcgtttctttgtggtgagaacattcaaaatcatctcttctggttattttgaaatatactacactattattaattttaattacctttattcacaatagcacgtcagcacttattccttctatctaactgtgaccctataaccattagccaacgtctccctcttccccctccgcactcaattccccagcctctggtaatcactattctactctctacttctataagatcgacttttgggtgcagcacactagcatggcacatgtatacatatgtaactaacctgcacattgtgcacatgtaccctaaaacttaaagtataataataataaaatttaaaaaaagatcgacttttttagattctgcatatgagtgatatcatgcagcatttgtctttctgtgcctagctcacttcggttaatttcttctaggttcaactacattggtgcaaatgacaataattcattcattttttatggctgaatagtattcaatatatacatattttcttcctccattcatctgttgatgaacacttgagttgattccatatcttggctattgtaaatagcactgcaataaacatggtagtccatatatctatttgacatattaatttcatttttgggggaaggcgaagggaaaattttcccatggccctggcaattgtaaaggtttttaatgttttaaaagtttttgctagtgattgtattagctatataataataataaccataagtagaagacctccagacatataaaatgtaggtgagtaacttagctacagtttttcagatgtatattttgttaatatgatttttaatgaatgaaaaatcataaaattaagatatattttaacctaaaatataaaataaaatgtgaaagtcacttctccttatcaaagcctaccacattgtctggtgtttgaaattatttaggttgttttcttgtctatgaaagcatgtatctagatctgtatctgtatacacatacagaaacacatgtagatatgtagactttccaaacacaaaaatatccttacttaattaaaagtacattgaactataaatgtttattcatctttgattttataattatatttatcctatacttcataggtcaactttttaataactaatttatatttttaaatgtattgaccaaatatgcccatcttatccttcataagcatttatgttttatctatatgtagttttatctcattctttatccttatgtatattttgcttcttgccttttctttcatagatgctttttattctctaaaattatagtaaaaaatttacttggattgtcaaataaataaataaataaatgtgttatatttatttatttatttatatttatgagaagagtttggctcatcttatggaaaggagacatagagcgtatcaatcacataaagcagaatttaccaatacaggtcaatatgccactgggggaattttttagctacctgcgataaaaaaagaaaatacagtgttcataattttaatgattttcttttaatccaacatcatattgtgtccagaattggttccttctggtgggttcttggtctcgctgacttcaagaatgaagccgcagaacctcacggccttcctgactaccaacagccagcacttgtgactctttgtaaagagtttactcttatagaagaaaaatgcaccaacaatgtgaatgaaaagccagaaattctaggaaatagaggtctttctccatcagcacaactaatgaatgacataaactggtgtataattcattacttctccaggagaatgattctgagatgtatggtctgctttacctcccaaatataacttccttgataatatgctttttgctaaatttttcccttcttaccttaattcctcactttcttatcattattttcctgaataaactactagcacttagattattgtctcaggttctggtttttgtgaaaccatagtaagacacacagtaccatatgtgatcctgggaagcaaagcctcaggattgggttctagaatttgatcacttttgggccaggtattttattttaaaaagggccattttattaaaggtaaggggtggtaataaactctggcatgatgatgtgagaaatagtgcagatgaaagatgacacattgctttactcagaatctctaacattggaggtctgcagggagaaataaagttgtaaggaggatagagctttttgttaactgttattgagttcttgaaaagaaaaaaacagcaactactgaccaaatatgaactcagagctcagagtcaaggtcataggctctatagaaaggagaccctcatctcctgcagctgcagggaaatctgcacagaaaaatgcctaaaatctgtttatgaaaaaaaaagaaaaaaatgcatttttggaccaatacatcttctatagcaaagcaatggtcttgatagggaaggagaggtatctgaaatagagacacctcagtgattgcaattgaaaatcttgaacacctcagtttccatgacctctctgggctgtcataagtggctttctttcttgtgctaggggatatcaaagtacctttgattggagacttcaaaaaagcaata

SEQ ID NO: 463527 - DNA, 472 bp, Homo sapiens
  misc_feature (437)..(438): n is a, c, g, or t
ccaagcgtgaacgactctcttaatttccaccgctacagaattggttccttctggtgggttcttggtctcgctgacttcaagaatgaagccgcagaacctcacggccttcctgactaccaacagccagcacttgtgactctttgtaaagagtttactcttatagaagaaaaatgcaccaacaatgtgaatgaaaagccagaaattctaggaaatagaggtctttctccatcagcacaactaatgaatgacataaactggtgtataattcattacttctccaggagaatgattctgagatgtatggtctgctttacctcccaaatataacttccttgataatatgctttttgctaaatttttcccttcttaccttaattcctcactttcttatcattattttcctgaataaactactagcagatgcggccgactacccnnccccaccccccccgcgacgtgttaagaacgtacc

SEQ ID NO: 463528 - DNA, 452 bp, Homo sapiens
ccaagcgtgaacgactctcttaatttccaccgctacagaattggttccttctggtgggttcttggtctcgctgacttcaagaatgaagccgcagaacctcacggccttcctgactaccaacagccagcacttgtgactctttgtaaagagtttactcttatagaagaaaaatgcaccaacaatgtgaatgaaaagccagaaattctaggaaatagaggtctttctccatcagcacaactaatgaatgacataaactggtgtataattcattacttctccaggagaatgattctgagatgtatggtctgctttacctcccaaatataacttccttgataatatgctttttgctaaatttttcccttcttaccttaattcctcactttcttatcattattttcctgaataaactactagcaaaaacaaaaacacaaatggcctcgctggactca

SEQ ID NO: 463529 - DNA, 343 bp, Homo sapiens
ccaagcgtgaacgactctcttaatttccaccgctacagaattggttccttctggtgggttcttggtctcgctgacttcaagaatgaagccgcagaacctcacggccttcctgactaccaacagccagcacttgtgactctttgtaaagagtttactcttatagaagaaaaatgcaccaacaatgtgaatgaaaagccagaaattctaggaaatagaggtctttctccatcagcacaactaatgaatgacataaactggtgtataattcattacttctccaggagaatgattctgagatgtatggtctgctttacctcccaaatataacttccttgataatatg

SEQ ID NO: 463530 - DNA, 1099 bp, Homo sapiens
ccaagcgtgaacgactctcttaatttccaccgctacagaattggttccttctggtgggttcttggtctcgctgacttcaagaatgaagccgcagaacctcacggccttcctgactaccaacagccagcacttgtgactctttgtaaagagtttactcttatagaagaaaaatgcaccaacaatgtgaatgaaaagccagaaattctaggaaatagaggtctttctccatcagcacaactaatgaatgacataaactggtgtataattcattacttctccaggagaatgattctgagatgtatggtctgctttacctcccaaatataacttccttgataatatgctttttgctaaatttttcccttcttaccttaattcctcactttcttatcattattttcctgaataaactactagcacttagattattgtctcaggttctggtttttgtgaaaccatagtaagacacacagtaccatatgtgatcctgggaagcaaagcctcaggattgggttctagaatttgatcacttttgggccaggtattttattttaaaaagggccattttattaaaggtaaggggtggtaataaactctggcatgatgatgtgagaaatagtgcagatgaaagatgacacattgctttactcagaatctctaacattggaggtctgcagggagaaataaagttgtaaggaggatagagctttttgttaactgttattgagttcttgaaaagaaaaaaacagcaactactgaccaaatatgaactcagagctcagagtcaaggtcataggctctatagaaaggagaccctcatctcctgcagctgcagggaaatctgcacagaaaaatgcctaaaatctgtttatgaaaaaaaaagaaaaaaatgcatttttggaccaatacatcttctatagcaaagcaatggtcttgatagggaaggagaggtatctgaaatagagacacctcagtgattgcaattgaaaatcttgaacacctcagtttccatgacctctctgggctgtcataagtggctttctttcttgtgctaggggatatcaaagtacctttgattggagacttcaaaaaagcaata

SEQ ID NO: 463531 - DNA, 2972 bp, Homo sapiens
agcccctgtgctgcaccgcggggaacctggcgtccctgcttagaacacatgcagcgtctcgggccggctaggggtacaccaaagcggacaaaagccactgaggggaaggacctcggcaaaacctgagtcctgtcctctcgctttcctccccgtgcacagcgagcttcaccacttgctccgcaccttctccatcaactactacctgtccctgggatctgtccagtcgcccagctaaagtgctcagcaggtcagcagcgcggcgagcttctatgcaggcgtggggtctggggctcctggatctctgtgtcccatttcacagagattgccacctactgccgcctgctagaagatggggaggacttcaatcttggtggtattctggacagcagcaaatacctgtaaagcatccaaaagaccaactcccacaggatagtggacggcaaagtggtgtctgagaccaacatcacagacgtcttgaggtgctaaaccagcagaagcaaggtccctttgcggagcaggagggcaataaaaacttctgtggtcaaaaaaaaaaaaaaaaaaaaaaattaccctcgcatcacagaggtgttttcctcacgcaaacgtaatatagattcattaatacatagatgtggaaattagggcaatttccacaactactcacccagagaggattaaaaaaataattgaccaccaactaattaaataaatacagaagtcataaataaagcatgagtaatgtttatacagtcaaacgaacagagaattatgagatccacgagaaagttctaaacgaagtcgtgggcgccatgatgtaccacaccttctccctcaccagggaagacctggaaaatttcaaggccctgagagtgatcgtgcaggtgggcagtggctacgacaacgtggccatcaaggctgctggcgagctcgaaattgctgtgtgcagcatcccgtccgcagccgtggaagagacagccgactccaccaccggccacatcctcaatctgtactgggggaacaggtcgctgtaccaggcactgagggaaggcacgcgagttcagagcgtggagcagattggcgaggtggcctcagtaaaggctcgcattcgtggggagatattgggcctcatcggcttcggtcgcacgcagcaggaggatgggatcgagcggtccctgggtgtgcatagggtctacacccagcaggatttgctgtatcagaacgactgcgtcttcttgcattgcaatctcaacgaacaaaactaccaccttatccatgactttactataaagcagatgaggcagggagcattccttgtgaacgcagcccgtggtggcctggagggcagaatacgaggggcagccctcgacgtgaatgagtcggagccctttagttttgctcggggtctgttgaaagatgcctggaatctcatctgcactcctctcactgcctgctacagccagcaggtgtcactggagatgagcgaggcagttgccactgagatccgccaagccatcataagtcgcatcccgggaagcttaagaaactgtgtgaacaaggaattctttgtcacatcagcgctttggaggacttctgcagccagggaagacatcatccctggagacatcccagtgactgacaacctcccaacagtggtacatccttcccaagggccctctcccaacagcccacaaaacacggggacagtcgagagcatcccaacgagcaatagcagagaatgccggaagaaaactgacaatgtcgtctgcttacggaagctctgaaagactagggtgtgatttattaacgcccaacttctattattgtgtgttaagtttttcatctgtgcatcaaatcacaaagaataaatagaacttttccctttatcagtcccttaggcacagcaggtcctgaacaccctgcttatatgttgcatcagcagttcaaatatgaaaataaaaaccatgaagaggaaatccgcatcctgtgactggagtcccttcagtctacagggactggttaccgctttttgctaataggaagattacattactagaaaatgtggagtaaactgtttgcctgtggtaaacacctgcatgcaaaggattgaagacagtaccggctcctgtacagagacgcgtctctcacatctgagctgcatattgagcggcaagttggttgtaagttcagtaaaagccgctgatgatgcaaaaaaaaaaaaaaaaagtattaagtttcacaagttgttagtaatcaagtatattttctcagtttcagatcctctgcgattttattgagtggaaagtcttgcgctgaaagggttcaagaaaaataatattgcatttccttatgtcacaggaaacacttttaatggtaacttgtcagactatgaacaaacccactttttaagatattgataaagtcttcttttcttcacgtgatattttatacaagtacacttcagatgtattggatgtggctgattttaacaaatcctattagatttgtatcaattagttacatgttctattcatagtcttttgtgaatcattgcctttttgtttaaaaagatggcctattttgagcctttgtataagtacattcctgtttttgtgacaaaagaaaaactttaaatttgtcccaaagagaaaaataatggctatcagaagtatgctttgttttagtgcgagttaccgttactgtatttgtgtattgtaaaggtggacattctaattacattaaaatgtaattagaaaaaagtgcttaatgaacaaaaacagaacatagacaacaaaagaatattagaagtgatgcatgaagaaaacgagatatcaataaaaagatttttaaaaaccaagaaaaattgtgactctgaagaacacagtaactatattaaaaatttaatcagcagtcacaaaagtggatttaataaagcagaaaaaattagacagttgataacattgcacttataaata

SEQ ID NO: 463532 - DNA, 2921 bp, Homo sapiens
agcccctgtgctgcaccgcggggaacctggcgtccctgcttagaacacatgcagcgtctcgggccggctaggggtacaccaaagcggacaaaagccactgaggggaagcgagcttcaccacttgctccgcaccttctccatcaactactacctgtccctgggatctgtccagtcgcccagctaaagtgctcagcaggtcagcagcgcggcgagcttctatgcaggcgtggggtctggggctcctggatctctgtgtcccatttcacagagattgccacctactgccgcctgctagaagatggggaggacttcaatcttggtggtattctggacagcagcaaatacctgtaaagcatccaaaagaccaactcccacaggatagtggacggcaaagtggtgtctgagaccaacatcacagacgtcttgaggtgctaaaccagcagaagcaaggtccctttgcggagcaggagggcaataaaaacttctgtggtcaaaaaaaaaaaaaaaaaaaaaaattaccctcgcatcacagaggtgttttcctcacgcaaacgtaatatagattcattaatacatagatgtggaaattagggcaatttccacaactactcacccagagaggattaaaaaaataattgaccaccaactaattaaataaatacagaagtcataaataaagcatgagtaatgtttatacagtcaaacgaacagagaattatgagatccacgagaaagttctaaacgaagtcgtgggcgccatgatgtaccacaccttctccctcaccagggaagacctggaaaatttcaaggccctgagagtgatcgtgcaggtgggcagtggctacgacaacgtggccatcaaggctgctggcgagctcgaaattgctgtgtgcagcatcccgtccgcagccgtggaagagacagccgactccaccaccggccacatcctcaatctgtactgggggaacaggtcgctgtaccaggcactgagggaaggcacgcgagttcagagcgtggagcagattggcgaggtggcctcagtaaaggctcgcattcgtggggagatattgggcctcatcggcttcggtcgcacgcagcaggaggatgggatcgagcggtccctgggtgtgcatagggtctacacccagcaggatttgctgtatcagaacgactgcgtcttcttgcattgcaatctcaacgaacaaaactaccaccttatccatgactttactataaagcagatgaggcagggagcattccttgtgaacgcagcccgtggtggcctggagggcagaatacgaggggcagccctcgacgtgaatgagtcggagccctttagttttgctcggggtctgttgaaagatgcctggaatctcatctgcactcctctcactgcctgctacagccagcaggtgtcactggagatgagcgaggcagttgccactgagatccgccaagccatcataagtcgcatcccgggaagcttaagaaactgtgtgaacaaggaattctttgtcacatcagcgctttggaggacttctgcagccagggaagacatcatccctggagacatcccagtgactgacaacctcccaacagtggtacatccttcccaagggccctctcccaacagcccacaaaacacggggacagtcgagagcatcccaacgagcaatagcagagaatgccggaagaaaactgacaatgtcgtctgcttacggaagctctgaaagactagggtgtgatttattaacgcccaacttctattattgtgtgttaagtttttcatctgtgcatcaaatcacaaagaataaatagaacttttccctttatcagtcccttaggcacagcaggtcctgaacaccctgcttatatgttgcatcagcagttcaaatatgaaaataaaaaccatgaagaggaaatccgcatcctgtgactggagtcccttcagtctacagggactggttaccgctttttgctaataggaagattacattactagaaaatgtggagtaaactgtttgcctgtggtaaacacctgcatgcaaaggattgaagacagtaccggctcctgtacagagacgcgtctctcacatctgagctgcatattgagcggcaagttggttgtaagttcagtaaaagccgctgatgatgcaaaaaaaaaaaaaaaaagtattaagtttcacaagttgttagtaatcaagtatattttctcagtttcagatcctctgcgattttattgagtggaaagtcttgcgctgaaagggttcaagaaaaataatattgcatttccttatgtcacaggaaacacttttaatggtaacttgtcagactatgaacaaacccactttttaagatattgataaagtcttcttttcttcacgtgatattttatacaagtacacttcagatgtattggatgtggctgattttaacaaatcctattagatttgtatcaattagttacatgttctattcatagtcttttgtgaatcattgcctttttgtttaaaaagatggcctattttgagcctttgtataagtacattcctgtttttgtgacaaaagaaaaactttaaatttgtcccaaagagaaaaataatggctatcagaagtatgctttgttttagtgcgagttaccgttactgtatttgtgtattgtaaaggtggacattctaattacattaaaatgtaattagaaaaaagtgcttaatgaacaaaaacagaacatagacaacaaaagaatattagaagtgatgcatgaagaaaacgagatatcaataaaaagatttttaaaaaccaagaaaaattgtgactctgaagaacacagtaactatattaaaaatttaatcagcagtcacaaaagtggatttaataaagcagaaaaaattagacagttgataacattgcacttataaata

SEQ ID NO: 463533 - DNA, 2939 bp, Homo sapiens
tttcttataacaatgtaaacaataataatatctaagtgagataccgttttaatgcatttcaataattatcttcaggacctcggcaaaacctgagtcctgtcctctcgctttcctccccgtgcacagcgagcttcaccacttgctccgcaccttctccatcaactactacctgtccctgggatctgtccagtcgcccagctaaagtgctcagcaggtcagcagcgcggcgagcttctatgcaggcgtggggtctggggctcctggatctctgtgtcccatttcacagagattgccacctactgccgcctgctagaagatggggaggacttcaatcttggtggtattctggacagcagcaaatacctgtaaagcatccaaaagaccaactcccacaggatagtggacggcaaagtggtgtctgagaccaacatcacagacgtcttgaggtgctaaaccagcagaagcaaggtccctttgcggagcaggagggcaataaaaacttctgtggtcaaaaaaaaaaaaaaaaaaaaaaattaccctcgcatcacagaggtgttttcctcacgcaaacgtaatatagattcattaatacatagatgtggaaattagggcaatttccacaactactcacccagagaggattaaaaaaataattgaccaccaactaattaaataaatacagaagtcataaataaagcatgagtaatgtttatacagtcaaacgaacagagaattatgagatccacgagaaagttctaaacgaagtcgtgggcgccatgatgtaccacaccttctccctcaccagggaagacctggaaaatttcaaggccctgagagtgatcgtgcaggtgggcagtggctacgacaacgtggccatcaaggctgctggcgagctcgaaattgctgtgtgcagcatcccgtccgcagccgtggaagagacagccgactccaccaccggccacatcctcaatctgtactgggggaacaggtcgctgtaccaggcactgagggaaggcacgcgagttcagagcgtggagcagattggcgaggtggcctcagtaaaggctcgcattcgtggggagatattgggcctcatcggcttcggtcgcacgcagcaggaggatgggatcgagcggtccctgggtgtgcatagggtctacacccagcaggatttgctgtatcagaacgactgcgtcttcttgcattgcaatctcaacgaacaaaactaccaccttatccatgactttactataaagcagatgaggcagggagcattccttgtgaacgcagcccgtggtggcctggagggcagaatacgaggggcagccctcgacgtgaatgagtcggagccctttagttttgctcggggtctgttgaaagatgcctggaatctcatctgcactcctctcactgcctgctacagccagcaggtgtcactggagatgagcgaggcagttgccactgagatccgccaagccatcataagtcgcatcccgggaagcttaagaaactgtgtgaacaaggaattctttgtcacatcagcgctttggaggacttctgcagccagggaagacatcatccctggagacatcccagtgactgacaacctcccaacagtggtacatccttcccaagggccctctcccaacagcccacaaaacacggggacagtcgagagcatcccaacgagcaatagcagagaatgccggaagaaaactgacaatgtcgtctgcttacggaagctctgaaagactagggtgtgatttattaacgcccaacttctattattgtgtgttaagtttttcatctgtgcatcaaatcacaaagaataaatagaacttttccctttatcagtcccttaggcacagcaggtcctgaacaccctgcttatatgttgcatcagcagttcaaatatgaaaataaaaaccatgaagaggaaatccgcatcctgtgactggagtcccttcagtctacagggactggttaccgctttttgctaataggaagattacattactagaaaatgtggagtaaactgtttgcctgtggtaaacacctgcatgcaaaggattgaagacagtaccggctcctgtacagagacgcgtctctcacatctgagctgcatattgagcggcaagttggttgtaagttcagtaaaagccgctgatgatgcaaaaaaaaaaaaaaaaagtattaagtttcacaagttgttagtaatcaagtatattttctcagtttcagatcctctgcgattttattgagtggaaagtcttgcgctgaaagggttcaagaaaaataatattgcatttccttatgtcacaggaaacacttttaatggtaacttgtcagactatgaacaaacccactttttaagatattgataaagtcttcttttcttcacgtgatattttatacaagtacacttcagatgtattggatgtggctgattttaacaaatcctattagatttgtatcaattagttacatgttctattcatagtcttttgtgaatcattgcctttttgtttaaaaagatggcctattttgagcctttgtataagtacattcctgtttttgtgacaaaagaaaaactttaaatttgtcccaaagagaaaaataatggctatcagaagtatgctttgttttagtgcgagttaccgttactgtatttgtgtattgtaaaggtggacattctaattacattaaaatgtaattagaaaaaagtgcttaatgaacaaaaacagaacatagacaacaaaagaatattagaagtgatgcatgaagaaaacgagatatcaataaaaagatttttaaaaaccaagaaaaattgtgactctgaagaacacagtaactatattaaaaatttaatcagcagtcacaaaagtggatttaataaagcagaaaaaattagacagttgataacattgcacttataaata

SEQ ID NO: 463534 - DNA, 744 bp, Homo sapiens
tatagttcctattttataaatggagagatgaggccctgagagctcttatatggtagaaccaggatttggatccaagtttgtctggtctggagtccatgtactttctattctgcactactgcttctgaagagtggattgacaattattctctggactttttggtaaccaagaacttctagcaactaaccctggcatgaccaccagaatctgcagggctgagagaagaaagaaaggcaaaagtggatgaatgcagctgaagatgctgtggaactcctatcacattccaagtgctgtgttgatatctggagatatagacaagatcgaagcagatgcagtctttcacatgaatatttgaatcaggcagtatgttccccaaattagcaaagtatctcccagattttttctttgatgatatatttgaaatcctaatgctgaaagttaaattatcagggttttaaaactagaagcagtcattatcagaattttatatactatttatttttaagaacgtaatttgactgtttaagtcttattataattttaagtgaagtactttgggcagtcataaataaagtaatgggcaggtatttagtattcatattgtgtggattcatatccatactctgccactcagtatctctgggattttgatgaatgatcaaactctctgagcctcagttttctaatctgtaaagcagaaatgataatggtatgtagtgataattaaacaatttactagttgta

SEQ ID NO: 463535 - DNA, 960 bp, Homo sapiens
tatgttgcaattaactggtgggttttgtgaacatgccaacaatgctcgagtcatctgaattagaagtgataaccagtgaggcccaggggccaccagagagcctcacggtgaggtgctggatgatactctcagacccttctcctcaagtaaaggaggacatgctacacaaggaaggattgcaagtttatggaggtggctttataggcatggacgtgtgctctaactctgagctatgtggaactaagatctcctcgaagcatctgaagaagacttttctagacagagaaaatcctttcaaggagagcactgatggcccacccctgattgtggccctggtcttcatgtctgcatcagcctcagccatctcaagaccacaacaggaacatagccaagtcagagaaggaagaccaaaagcaccagggcccttcatattattaagctgctaaattaactaatcttggaaacttctagactctacaattcttgttgtatgagaaatcatctactacataaaattctggtttcatacttggccattcctgcttaacggagctaacaaagaaatttaagagtggattgacaattattctctggactttttggtaaccaagaacttctagcaactaaccctggcatgaccaccagaatctgcagggctgagagaagaaagaaaggcaaaagtggatgaatgcagctgaagatgctgtggaactcctatcacattccaagtgctgtgttgatatctggagatatagacaagatcgaagcagatgcagtctttcacatgaatatttgaatcaggcattaatggaatggcttcaataatacagtaaaattaagatattcaaacaagcaggatgcaggtgatgggtattggcctcagctttagagaccagaggttaaatctcagtgctgcctgccacaaaacgatccatgtaagtcaataaacaatgcttttta

SEQ ID NO: 463536 - DNA, 997 bp, Homo sapiens
tatagttcctattttataaatggagagatgaggccctgagagctcttatatggtagaaccaggatttggatccaagtttgtctggtctggagtccatgtactttctattctgcactactgcttctgaagagtggattgacaattattctctggactttttggtaaccaagaacttctagcaactaaccctggcatgaccaccagaatctgcagggctgagagaagaaagaaaggcaaaagtggatgaatgcagctgaagatgctgtggaactcctatcacattccaagtgctgtgttgatatctggagatatagacaagatcgaagcagatgcagtctttcacatgaatatttgaatcaggcattaatggaatggcttcaataatacagtaaaattaagatattcaaacaagcaggatgcaggtgatgggtattggcctcagctttagagaccagaggttaaatctcagtgctgcctgccacaaaacgatccatgtaagtcaataaacaatgctttttaaaatattattataaagatatagtgtgtggatccctctcaattgtccattcttccctgtcacaaaaatttgcctgcttttcgttaccatgtgagaggcaaatgaattgaactaaatggtttctaatgccctgtccacctctaaaattctatagaactgtgatttgattccaatgggccatatcaggactcggcattattttcatcagtgaaccatttcattagaaatttatttttccaaatgatattagtaaatattgaaggaggcttctcccacagagcttcttgtacaaattaaaacagggcagtagaaggttttcaggttggtgaagtcaactctggcttttagtcaaccattccaaaaaaacattttctttagaatccaagggcttgcaattgttctgaataaagcataaagaagctgttctgatttattaaataaaaagagtaccaaatatatgatttttaaaatgtttcaaag

SEQ ID NO: 463537 - DNA, 1314 bp, Homo sapiens
tatgttgcaattaactggtgggttttgtgaacatgccaacaatgctcgagtcatctgaattagaagtgataaccagtgaggcccaggggccaccagagagcctcacggtgaggtgctggatgatactctcagacccttctcctcaagtaaaggaggacatgctacacaaggaaggattgcaagtttatggaggtggctttataggcatggacgtgtgctctaactctgagctatgtggaactaagatctcctcgaagcatctgaagaagacttttctagacagagaaaatcctttcaaggagagcactgatggcccacccctgattgtggccctggtcttcatgtctgcatcagcctcagccatctcaagaccacaacaggaacatagccaagtcagagaaggaagaccaaaagcaccagggcccttcatattattaagctgctaaattaactaatcttggaaacttctagactctacaattcttgttgtatgagagtggattgacaattattctctggactttttggtaaccaagaacttctagcaactaaccctggcatgaccaccagaatctgcagggctgagagaagaaagaaaggcaaaagtggatgaatgcagctgaagatgctgtggaactcctatcacattccaagtgctgtgttgatatctggagatatagacaagatcgaagcagatgcagtctttcacatgaatatttgaatcaggcacaggatgcaggtgatgggtattggcctcagctttagagaccagaggttaaatctcagtgctgcctgccacaaaacgatccatgtaagtcaataaacaatgctttttaaaatattattataaagatatagtgtgtggatccctctcaattgtccattcttccctgtcacaaaaatttgcctgcttttcgttaccatgtgagaggcaaatgaattgaactaaatggtttctaatgccctgtccacctctaaaattctatagaactgtgatttgattccaatgggccatatcaggactcggcattattttcatcagtgaaccatttcattagaaatttatttttccaaatgatattagtaaatattgaaggaggcttctcccacagagcttcttgtacaaattaaaacagggcagtagaaggttttcaggttggtgaagtcaactctggcttttagtcaaccattccaaaaaaacattttctttagaatccaagggcttgcaattgttctgaataaagcataaagaagctgttctgatttattaaataaaaagagtaccaaatatatgatttttaaaatgtttcaaag

SEQ ID NO: 463538 - DNA, 1110 bp, Homo sapiens
tatgttgcaattaactggtgggttttgtgaacatgccaacaatgctcgagtcatctgaattagaagtgataaccagtgaggcccaggggccaccagagagcctcacggtgaggtgctggatgatactctcagacccttctcctcaagtaaaggaggacatgctacacaaggaaggattgcaagtttatggaggtggctttataggcatggacgtgtgctctaactctgagctatgtggaactaagatctcctcgaagcatctgaagaagacttttctagacagagaaaatcctttcaaggagagcactgatggcccacccctgattgtggccctggtcttcatgtctgcatcagcctcagccatctcaagaccacaacaggaacatagccaagtcagagaaggaagaccaaaagcaccagggcccttcatattattaagctgctaaattaactaatcttggaaacttctagactctacaattcttgttgtatgagagtggattgacaattattctctggactttttggtaaccaagaacttctagcaactaaccctggcatgaccaccagaatctgcagggctgagagaagaaagaaaggcaaaagtggatgaatgcagctgaagatgctgtggaactcctatcacattccaagtgctgtgttgatatctggagatatagacaagatcgaagcagatgcagtctttcacatgaatatttgaatcaggcagtatgttccccaaattagcaaagtatctcccagattttttctttgatgatatatttgaaatcctaatgctgaaagttaaattatcagggttttaaaactagaagcagtcattatcagaattttatatactatttatttttaagaacgtaatttgactgtttaagtcttattataattttaagtgaagtactttgggcagtcataaataaagtaatgggcaggtatttagtattcatattgtgtggattcatatccatactctgccactcagtatctctgggattttgatgaatgatcaaactctctgagcctcagttttctaatctgtaaagcagaaatgataatggtatgtagtgataattaaacaatttactagttgta

SEQ ID NO: 463539 - DNA, 1613 bp, Homo sapiens
ctggattcaatccagaaaacaaaatccactctcctagaggtttacgcgggtcattgggcattcttgagaaatagccacagcgtaacctcatcgcttgctcacttgcaccatgcttgctggaatcgccacggcaaggttttacaccgcttcccctctcccaccctcgggcccacctttcctgtcctttgaggaggacccgcggcagcaggcactggagctggtggtgcaggaggtctccagcgtgctcaggtcggcggaggagaaggtggtggtctgtcacgtggtgggccaggctattcagttcttggtcagcgagacgcctgccttgggtgctggatgccggctgtacgacatgcggctctcccctttccatttacaggaccaggtggctgagacaagtgcgatgtctgacgttctcaaggacatcttgaagcatttggctggttctgcctctccatcagtggttctgattaccaagcccacgactgtaaaggaagctcagaacttacagtgtgctgcatctactgctcaggaatcctgtcctcctaaacctccaagggctcacgagctgaagctactggtgaggaacatccacgtcttgctgctcagcgagcccggtgcctcaggccacattaatgcagtgtgcgtcgtgcagctgaacgatcctgttcagaggttctccagcaccctgacgaaaaacactccggacctcatgtgggaagaggaattcaccttcgagttgaatgccaagtcgaaggagttacacctgcagatttcagaggctgggcgatcctcagaaggtctgctggcgacggcgacagttcctctggacttatttaagaagcagccttctgggccacagagcttcacgctgaccagcgggtctgcctgcggcagctcggtgctgggctcggtcacggcagagttctcttacatggaacctggtgaattgaaatcctggcccatccctccccctgttcctgctgcaaaaatagaaaaggaccgcacggtgatgccctgtgggactgtggtcactactgtcactgctgtgaagaccaagcctcgcgtcgacgtggggagggcgtccccgctgagctctgattctccggtgaagactcccatcaaggtgaaggtgatcgagaaggacatctctgtccaggccatcgcctgccgcagcgcccccgtcagcaaaacactctcttcttcagacacagaattgttggtgttgaatggttcggatccagtggctgaagtggccattcgacagctcagtgaatcttcaaagctgaaactcaagtcgccacggaagaaaagcactattatcatatcagggatctccaaggtaccatcgtggtggctggggaggtgttcatctggtcatctgtcagtgacctgctgctcctctgccctttgaagaagttagcccaagcacttggttaacgtccagagagttccatttacaaatgtcaaattatgttcctcaccccacaaaggagtcatgtgtggtgttgtgtttacacagtttatcctattcaccaaggacatgggagactttctaatcagggacgctttacacgttgagaggttggcaaatcatttcaagaaaaattatc

SEQ ID NO: 463540 - DNA, 5612 bp, Homo sapiens
ctggattcaatccagaaaacaaaatccactctcctagaggtttacgcgggtcattgggcattcttgagaaatagccacagcgtaacctcatcgcttgctcacttgcaccatgcttgctggaatcgccacggcaaggttttacaccgcttcccctctcccaccctcgggcccacctttcctgtcctttgaggaggacccgcggcagcaggcactggagctggtggtgcaggaggtctccagcgtgctcaggtcggcggaggagaaggtggtggtctgtcacgtggtgggccaggctattcagttcttggtcagcgagacgcctgccttgggtgctggatgccggctgtacgacatgcggctctcccctttccatttacaggaccaggtggctgagacaagtgcgatgtctgacgttctcaaggacatcttgaagcatttggctggttctgcctctccatcagtggttctgattaccaagcccacgactgtaaaggaagctcagaacttacagtgtgctgcatctactgctcaggaatcctgtcctcctaaacctccaagggctcacgagctgaagctactggtgaggaacatccacgtcttgctgctcagcgagcccggtgcctcaggccacattaatgcagtgtgcgtcgtgcagctgaacgatcctgttcagaggttctccagcaccctgacgaaaaacactccggacctcatgtgggaagaggaattcaccttcgagttgaatgccaagtcgaaggagttacacctgcagatttcagaggctgggcgatcctcagaaggtctgctggcgacggcgacagttcctctggacttatttaagaagcagccttctgggccacagagcttcacgctgaccagcgggtctgcctgcggcagctcggtgctgggctcggtcacggcagagttctcttacatggaacctggtgaattgaaatcctggcccatccctccccctgttcctgctgcaaaaatagaaaaggaccgcacgtgaatcttcaaagctgaaactcaagtcgccacggaagaaaagcactattatcatatcagggatctccaagtatctcaggaccacgacgctgccctgatgcagggctacacggcctctgtggacagcacccaccaggaggacgccccatcccatccggagagggcggcagcctctgccccgccagaggaagccgagtcagcccaggcatcccttgcccccaagccccaggaggacgagctagactcctgggacttggagaaggagccacaggccgcggcatggagcagccaggtcctgctggaccccgacggtgatgagctgtcagagagctccatgagtgtcttggagccgggcactgccaaaaagcataaaggaggaattctaaggaaaggtgcaaagctgttcttccgccggcggcatcaacagaaagacccaggcatgagtcagtcacacaatgaccttgtgttcctggagcagccagagggttcccggaggaaaggcatcaccctcaccaggatcctgaacaagaagctgctctccaggcacagaaacaagaacaccatgaacggtgcccccgtggagccctgcacgtagggcctgaggtcatcacctccaagccagaagacgtgcacccatgttaactaccctcaccaggacgcagccagtgtgtccgccggatgtccagatgccccgcttgtcttgctgggtttcttccaaccatctcgtcatttaaagggaaaacaaaatctgagtctccagccaggaggcttctcccagagaggacaaaaaagcccaacttgccaccagatgctaaatgagacttgacagctgcagagcttgggctgtgctcatagctaagggttagggttcaatattagaaggagattaacattataagtgaaataatatgctctaatagattgtggagggcaggtttgagggacttagtttacctattctacactaacaagtgttgttttgggtccatgcctggaccatgtcacaaaaaggaggtgcccccctgtgctgtcactgtgaatggaaaggatgggtcacctctcttcatctgctgcttggaataaaaaatgcagctggccctgagtacagggaagtggaacataggcaggattttggattaatagagaaattttgataagaatggagacgctacgacagatgtaggaagtcatctacctttgatattagccatagaacttgaacactaactatatcctatgcatagtatgcagaacacttttctaagtttactttgagcctacttgcaagtggaagatatatatattctcacatggtttttacatttttctctatcgtgttaaaagctctaataatgctagtggagcagttgacatccagggttttttttcctgcctgtcatacttgctaaacaagagcacagcgggcctgtcagatgaagtcaggagccatacgtgaccgctcgtagaacacagtaaccaaacacatacatggattttgccaagtgctgccagtagccaaaacaaagtctttttagggcaatagaggaaattattttgtgtctcaggtgtcagtcttaggaatggaagtttaataacaaatgggccaaactcgcaggacattccttctatgagcgcttcagaattttgctgtgaacagtcctcttggacacaggttggggtgcccttgtttgggtttgttttggtggaaaacatcacaaacctggcacaccatttgaatatccctaatatcattccagtcgctttcctcatcagttgcctttctatttcagttcattcacagatctcacttctgaatgtgccacttccagtagacatgctggtcaaagagcagtcatcattggggtgaagtgttcttgacagtttaatatgattcacttttctccaaagacatgtaaaaggctgttacgaaagcttggcttctgtcatggagacggaaatgggcaagcttccttccgtagcctcttgttaatccttaaacattaaatatttcgggggtaatagagccactggtgagtaaaaacctatataaaaaccaaaattataggattttttcttttttagtaaaaacctgtatcaaaaccaaaattataggatttttttcttttttagtaaaaacctatataaaaaccaaaattataggattttttcttttttagtaaaaacctatatgaaaaccaaaattataggatttttttcttttttagtaaaaacctgtataaaaaccaaaattataggatttttttttcttcttttttagagagagagattagaaaacgacattaggaatttcactttaaaatgcgcattacaaacttcttaggtgttccaggaattatcaagtgactttaaaatgacttttccaacctgctttgtttttaaaaattatattccagttttaatcattgtaaaaaaagcacctggagtttcaaaacatgtgaatactaccaagtttctgtccccaaagtcaggcatcactgctagtcttttgggacagatgggacagatgttcactttaatgttttacttgaagttttactgctctttgccatgtggtaaaaagaggctgagacatatttaagaattccaagaggatattatgtgtcagaatttcagacactgatgagaagtttttaattgttcttttttatttgattttggaattcaggtgcactctattcaagtgcaaggatatcagaagtttttttttatttaaaaaatttttttttcgagatggagtttcactctgttgcccaggctggagtgcaatggcagcttactgcaacctccacctcctggttcaagcgattctcctgcctcagcctcccaagtagctgggattacaggcacgcgccaccacacctggctaattctatttagtagaaatggagtctcaccatgttggtcaggctggtctcgaactcctgacctcaggtgatccacccaccttggcctcccagcgtgctgggattataggcatgagccaccaggccggccccaggattttatattaagccttcttgctctcaaaaaaaaaaaaaggttttaactattccatttccagatgaatcccatgagcgctgcttactgttgaataccaaggtctagggctctgcttcctgtagacacgcacacgttgtctccatccaatggccttttctgaagttacagaaaacaccaacatgggagggagtttatgaagcaaaggcaaaggcaacacgtcggctagcttcagggtagcaccgtgagaaatgggctgtattgatactgtgaatgtttgttttccaagctgttttatacaggtttgttttttcatggtgtagggtatttatgacaaagtaaatgttgtgaaggttaaagataaattaagattatccaccaaatgctaaaaatactgatgtgtaaatcacctttatcgcctcacctcttctacaagcttttgtggcttgagggcttttgtttttggcttttgtctggatgaaagttttgcccagttgtgttttaaaaacaattcctcatgaacactaagattaattgtgtctgtatctctggaactgggtgctcatgttggttttaatgagcttgcaacccttccccgtttgctttgtttaaggaggtgcctctgttctttgtggaggagtgaaatggagctttaagtgtgtgtgtgtgttatgtgtgtttgcacacacgcgtgtgttattgtagcaataacaaaaagtagccatctccttgttccagctgaaaacctgctgtgagagttttgacagagcactttattttcgtcaagtttcaagtctgagttcaaaaccagccctgatcccttatgaccaactgctactcgaccagtcgccactcagtggccacctggtgcccgtttagatttttgcttgggttttactggccacctctatagacgagagttgcaaagttgctttgagcagagagggaaagattaatttacactgctggccaccgaaggcaggtgtttcctgggtagtaatctcacggctcttgatctggaaacttcagagtacaaattggtggatggtggaaggcaggacacgtatctctgtctgacggaaaacagacctcggggctggcgtaaaccctgctgccaggccctctccccactgccccaaaccggcctagacacgaagaccaaagcagcctgcacagggcaaggcccccgcggaatcctgcagagcaaactcaggttaacttgggtccatgaccgtttgcattcgaaacacaatacactgcctcgttctctcagttagcagctgggcagcagcgcaccattcatcatttaggcttgtggtttgttgtttactctaccaatgttatgtcgaaactgcattgtaaaaagagaagaaaatggcaggttttccaggtccacggaaaggtttggcctgacgctggagtgcggtgatgaacttacgtgacaatgattgtattcctcagtagcactttaaacgccgaagacagccctgcagcaagcctgcacacgggcttgggtgggttcctttggagaagatgtggctggaacacaaacaatctttgaaagaaataaatgtgcacacagaaca

SEQ ID NO: 463541 - DNA, 4071 bp, Homo sapiens
gttcagaggatcccttagcacatttagtcatgaacggtgcccccgtggagccctgcacgtagggcctgaggtcatcacctccaagccagaagacgtgcacccatgttaactaccctcaccaggacgcagccagtgtgtccgccggatgtccagatgccccgcttgtcttgctgggtttcttccaaccatctcgtcatttaaagggaaaacaaaatctgagtctccagccaggaggcttctcccagagaggacaaaaaagcccaacttgccaccagatgctaaatgagacttgacagctgcagagcttgggctgtgctcatagctaagggttagggttcaatattagaaggagattaacattataagtgaaataatatgctctaatagattgtggagggcaggtttgagggacttagtttacctattctacactaacaagtgttgttttgggtccatgcctggaccatgtcacaaaaaggaggtgcccccctgtgctgtcactgtgaatggaaaggatgggtcacctctcttcatctgctgcttggaataaaaaatgcagctggccctgagtacagggaagtggaacataggcaggattttggattaatagagaaattttgataagaatggagacgctacgacagatgtaggaagtcatctacctttgatattagccatagaacttgaacactaactatatcctatgcatagtatgcagaacacttttctaagtttactttgagcctacttgcaagtggaagatatatatattctcacatggtttttacatttttctctatcgtgttaaaagctctaataatgctagtggagcagttgacatccagggttttttttcctgcctgtcatacttgctaaacaagagcacagcgggcctgtcagatgaagtcaggagccatacgtgaccgctcgtagaacacagtaaccaaacacatacatggattttgccaagtgctgccagtagccaaaacaaagtctttttagggcaatagaggaaattattttgtgtctcaggtgtcagtcttaggaatggaagtttaataacaaatgggccaaactcgcaggacattccttctatgagcgcttcagaattttgctgtgaacagtcctcttggacacaggttggggtgcccttgtttgggtttgttttggtggaaaacatcacaaacctggcacaccatttgaatatccctaatatcattccagtcgctttcctcatcagttgcctttctatttcagttcattcacagatctcacttctgaatgtgccacttccagtagacatgctggtcaaagagcagtcatcattggggtgaagtgttcttgacagtttaatatgattcacttttctccaaagacatgtaaaaggctgttacgaaagcttggcttctgtcatggagacggaaatgggcaagcttccttccgtagcctcttgttaatccttaaacattaaatatttcgggggtaatagagccactggtgagtaaaaacctatataaaaaccaaaattataggattttttcttttttagtaaaaacctgtatcaaaaccaaaattataggatttttttcttttttagtaaaaacctatataaaaaccaaaattataggattttttcttttttagtaaaaacctatatgaaaaccaaaattataggatttttttcttttttagtaaaaacctgtataaaaaccaaaattataggatttttttttcttcttttttagagagagagattagaaaacgacattaggaatttcactttaaaatgcgcattacaaacttcttaggtgttccaggaattatcaagtgactttaaaatgacttttccaacctgctttgtttttaaaaattatattccagttttaatcattgtaaaaaaagcacctggagtttcaaaacatgtgaatactaccaagtttctgtccccaaagtcaggcatcactgctagtcttttgggacagatgggacagatgttcactttaatgttttacttgaagttttactgctctttgccatgtggtaaaaagaggctgagacatatttaagaattccaagaggatattatgtgtcagaatttcagacactgatgagaagtttttaattgttcttttttatttgattttggaattcaggtgcactctattcaagtgcaaggatatcagaagtttttttttatttaaaaaatttttttttcgagatggagtttcactctgttgcccaggctggagtgcaatggcagcttactgcaacctccacctcctggttcaagcgattctcctgcctcagcctcccaagtagctgggattacaggcacgcgccaccacacctggctaattctatttagtagaaatggagtctcaccatgttggtcaggctggtctcgaactcctgacctcaggtgatccacccaccttggcctcccagcgtgctgggattataggcatgagccaccaggccggccccaggattttatattaagccttcttgctctcaaaaaaaaaaaaaggttttaactattccatttccagatgaatcccatgagcgctgcttactgttgaataccaaggtctagggctctgcttcctgtagacacgcacacgttgtctccatccaatggccttttctgaagttacagaaaacaccaacatgggagggagtttatgaagcaaaggcaaaggcaacacgtcggctagcttcagggtagcaccgtgagaaatgggctgtattgatactgtgaatgtttgttttccaagctgttttatacaggtttgttttttcatggtgtagggtatttatgacaaagtaaatgttgtgaaggttaaagataaattaagattatccaccaaatgctaaaaatactgatgtgtaaatcacctttatcgcctcacctcttctacaagcttttgtggcttgagggcttttgtttttggcttttgtctggatgaaagttttgcccagttgtgttttaaaaacaattcctcatgaacactaagattaattgtgtctgtatctctggaactgggtgctcatgttggttttaatgagcttgcaacccttccccgtttgctttgtttaaggaggtgcctctgttctttgtggaggagtgaaatggagctttaagtgtgtgtgtgtgttatgtgtgtttgcacacacgcgtgtgttattgtagcaataacaaaaagtagccatctccttgttccagctgaaaacctgctgtgagagttttgacagagcactttattttcgtcaagtttcaagtctgagttcaaaaccagccctgatcccttatgaccaactgctactcgaccagtcgccactcagtggccacctggtgcccgtttagatttttgcttgggttttactggccacctctatagacgagagttgcaaagttgctttgagcagagagggaaagattaatttacactgctggccaccgaaggcaggtgtttcctgggtagtaatctcacggctcttgatctggaaacttcagagtacaaattggtggatggtggaaggcaggacacgtatctctgtctgacggaaaacagacctcggggctggcgtaaaccctgctgccaggccctctccccactgccccaaaccggcctagacacgaagaccaaagcagcctgcacagggcaaggcccccgcggaatcctgcagagcaaactcaggttaacttgggtccatgaccgtttgcattcgaaacacaatacactgcctcgttctctcagttagcagctgggcagcagcgcaccattcatcatttaggcttgtggtttgttgtttactctaccaatgttatgtcgaaactgcattgtaaaaagagaagaaaatggcaggttttccaggtccacggaaaggtttggcctgacgctggagtgcggtgatgaacttacgtgacaatgattgtattcctcagtagcactttaaacgccgaagacagccctgcagcaagcctgcacacgggcttgggtgggttcctttggagaagatgtggctggaacacaaacaatctttgaaagaaataaatgtgcacacagaaca

SEQ ID NO: 463542 - DNA, 1400 bp, Homo sapiens
  misc_feature (10)..(10): n is a, c, g, or t
taagcccaanctgaattccgggcaaaggcaacacgtcggctagcttcagggtagcaccgtgagaaatgggctgtattgatactgtgaatgtttgttttccaagctgttttatacaggtttgttttttcatggtgtagggtatttatgacaaagtaaatgttgtgaaggttaaagataaattaagattatccaccaaatgctaaaaatactgatgtgtaaatcacctttatcgcctcacctcttctacaagcttttgtggcttgagggcttttgtttttggcttttgtctggatgaaagttttgcccagttgtgttttaaaaacaattcctcatgaacactaagattaattgtgtctgtatctctggaactgggtgctcatgttggttttaatgagcttgcaacccttccccgtttgctttgtttaaggaggtgcctctgttctttgtggaggagtgaaatggagctttaagtgtgtgtgtgtgttatgtgtgtttgcacacacgcgtgtgttattgtagcaataacaaaaagtagccatctccttgttccagctgaaaacctgctgtgagagttttgacagagcactttattttcgtcaagtttcaagtctgagttcaaaaccagccctgatcccttatgaccaactgctactcgaccagtcgccactcagtggccacctggtgcccgtttagatttttgcttgggttttactggccacctctatagacgagagttgcaaagttgctttgagcagagagggaaagattaatttacactgctggccaccgaaggcaggtgtttcctgggtagtaatctcacggctcttgatctggaaacttcagagtacaaattggtggatggtggaaggcaggacacgtatctctgtctgacggaaaacagacctcggggctggcgtaaaccctgctgccaggccctctccccactgccccaaaccggcctagacacgaagaccaaagcagcctgcacagggcaaggcccccgcggaatcctgcagagcaaactcaggttaacttgggtccatgaccgtttgcattcgaaacacaatacactgcctcgttctctcagttagcagctgggcagcagcgcaccattcatcatttaggcttgtggtttgttgtttactctaccaatgttatgtcgaaactgcattgtaaaaagagaagaaaatggcaggttttccaggtccacggaaaggtttggcctgacgctggagtgcggtgatgaacttacgtgacaatgattgtattcctcagtagcactttaaacgccgaagacagccctgcagcaagcctgcacacgggcttgggtgggttcctttggagaagatgtggctggaacacaaacaatctttgaaagaaataaatgtgcacacagaaca

SEQ ID NO: 463543 - DNA, 5555 bp, Homo sapiens
ctggattcaatccagaaaacaaaatccactctcctagaggtttacgcgggtcattgggcattcttgagaaatagccacagcgtaacctcatcgcttgctcacttgcaccatgcttgctggaatcgccacggcaaggttttacaccgcttcccctctcccaccctcgggcccacctttcctgtcctttgaggaggacccgcggcagcaggcactggagctggtggtgcaggaggtctccagcgtgctcaggtcggcggaggagaaggtggtggtctgtcacgtggtgggccaggctattcagttcttggtcagcgagacgcctgccttgggtgctggatgccggctgtacgacatgcggctctcccctttccatttacaggaccaggtggctgagacaagtgcgatgtctgacgttctcaaggacatcttgaagcatttggctggttctgcctctccatcagtggttctgattaccaagcccacgactgtaaaggaagctcagaacttacagtgtgctgcatctactgctcaggaatcctgtcctcctaaacctccaagggctcacgagctgaagctactggtgaggaacatccacgtcttgctgctcagcgagcccggtgcctcaggccacattaatgcagtgtgcgtcgtgcagctgaacgatcctgttcagaggttctccagcaccctgacgaaaaacactccggacctcatgtgggaagaggaattcaccttcgagttgaatgccaagtcgaaggagttacacctgcagatttcagaggctgggcgatcctcagaaggtctgctggcgacggcgacagttcctctggacttatttaagaagcagccttctgggccacagagcttcacgctgaccagcgggtctgcctgcggcagctcggtgctgggctcggtcacggcagagttctcttacatggaacctggtgaattgaaatcctggcccatccctccccctgttcctgctgcaaaaatagaaaaggaccgcacgtgaatcttcaaagctgaaactcaagtcgccacggaagaaaagcactattatcatatcagggatctccaagtatctcaggaccacgacgctgccctgatgcagggctacacggcctctgtggacagcacccaccaggaggacgccccatcccatccggagagggcggcagcctctgccccgccagaggaagccgagtcagcccaggcatcccttgcccccaagccccaggaggacgagctagactcctgggacttggagaaggagccacaggccgcggcatggagcagccaggtcctgctggaccccgacggtgatgagctgtcagagagctccatgagtgtcttggagccgggcactgccaaaaagcataaaggaggaattctaaggaaaggtgcaaagctgttcttccgccggcggcatcaacagaaagacccaggcatgagtcagtcacacaatgaccttgtgttcctggagcagccagagggttcccggaggaaaggcatcaccctcaccaggatcctgaacaagaagctgctctccaggcacagaaacaagaacaccatgaacggtgcccccgtggagccctgcacgtagggcctgaggtcatcacctccaagccagaagacgtgcacccatgttaactaccctcaccaggacgcagccagtgtgtccgccggatgtccagatgccccgcttgtcttgctgggtttcttccaaccatctcgtcatttaaagggaaaacaaaatctgagtctccagccaggaggcttctcccagagaggacaaaaaagcccaacttgccaccagatgctaaatgagacttgacagctgcagagcttgggctgtgctcatagctaagggttagggttcaatattagaaggagattaacattataagtgaaataatatgctctaatagattgtggagggcaggtttgagggacttagtttacctattctacactaacaagtgttgttttgggtccatgcctggaccatgtcacaaaaaggaggtgcccccctgtgctgtcactgtgaatggaaaggatgggtcacctctcttcatctgctgcttggaataaaaaatgcagctggccctgagtacagggaagtggaacataggcaggattttggattaatagagaaattttgataagaatggagacgctacgacagatgtaggaagtcatctacctttgatattagccatagaacttgaacactaactatatcctatgcatagtatgcagaacacttttctaagtttactttgagcctacttgcaagtggaagatatatatattctcacatggtttttacatttttctctatcgtgttaaaagctctaataatgctagtggagcagttgacatccagggttttttttcctgcctgtcatacttgctaaacaagagcacagcgggcctgtcagatgaagtcaggagccatacgtgaccgctcgtagaacacagtaaccaaacacatacatggattttgccaagtgctgccagtagccaaaacaaagtctttttagggcaatagaggaaattattttgtgtctcaggtgtcagtcttaggaatggaagtttaataacaaatgggccaaactcgcaggacattccttctatgagcgcttcagaattttgctgtgaacagtcctcttggacacaggttggggtgcccttgtttgggtttgttttggtggaaaacatcacaaacctggcacaccatttgaatatccctaatatcattccagtcgctttcctcatcagttgcctttctatttcagttcattcacagatctcacttctgaatgtgccacttccagtagacatgctggtcaaagagcagtcatcattggggtgaagtgttcttgacagtttaatatgattcacttttctccaaagacatgtaaaaggctgttacgaaagcttggcttctgtcatggagacggaaatgggcaagcttccttccgtagcctcttgttaatccttaaacattaaatatttcgggggtaatagagccactggtgagtaaaaacctatataaaaaccaaaattataggattttttcttttttagtaaaaacctgtatcaaaaccaaaattataggatttttttcttttttagtaaaaacctatataaaaaccaaaattataggattttttcttttttagtaaaaacctatatgaaaaccaaaattataggatttttttcttttttagtaaaaacctgtataaaaaccaaaattataggatttttttttcttcttttttagagagagagattagaaaacgacattaggaatttcactttaaaatgcgcattacaaacttcttaggtgttccaggaattatcaagtgactttaaaatgacttttccaacctgctttgtttttaaaaattatattccagttttaatcattgtaaaaaaagcacctggagtttcaaaacatgtgaatactaccaagtttctgtccccaaagtcaggcatcactgctagtcttttgggacagatgggacagatgttcactttaatgttttacttgaagttttactgctctttgccatgtggtaaaaagaggctgagacatatttaagaattccaagaggatattatgtgtcagaatttcagacactgatgagaagtttttaattgttcttttttatttgattttggaattcaggtgcactctattcaagtgcaaggatatcagaagtttttttttatttaaaaaatttttttttcgagatggagtttcactctgttgcccaggctggagtgcaatggcagcttactgcaacctccacctcctggttcaagcgattctcctgcctcagcctcccaagtagctgggattacaggcacgcgccaccacacctggctaattctatttagtagaaatggagtctcaccatgttggtcaggctggtctcgaactcctgacctcaggtgatccacccaccttggcctcccagcgtgctgggattataggcatgagccaccaggccggccccaggattttatattaagccttcttgctctcaaaaaaaaaaaaaggttttaactattccatttccagatgaatcccatgagcgctgcttactgttgaataccaaggtctagggctctgcttcctgtagacacgcacacgttgtctccatccaatggccttttctgaagttacagaaaacaccaacatgggagggagtttatgaagcaaaggcaaaggcaacacgtcggctagcttcagggtagcaccgtgagaaatgggctgtattgatactgtgaatgtttgttttccaagctgttttatacaggtttgttttttcatggtgtagggtatttatgacaaagtaaatgttgtgaaggttaaagataaattaagattatccaccaaatgctaaaaatactgatgtgtaaatcacctttatcgcctcacctcttctacaagcttttgtggcttgagggcttttgtttttggcttttgtctggatgaaagttttgcccagttgtgttttaaaaacaattcctcatgaacactaagattaattgtgtctgtatctctggaactgggtgctcatgttggttttaatgagcttgcaacccttccccgtttgctttgtttaaggaggtgcctctgttctttgtggaggagtgaaatggagctttaagtgtgtgtgtgtgttatgtgtgtttgcacacacgcgtgtgttattgtagcaataacaaaaagtagccatctccttgttccagctgaaaacctgctgtgagagttttgacagagcactttattttcgtcaagtttcaagtctgagtggccacctggtgcccgtttagatttttgcttgggttttactggccacctctatagacgagagttgcaaagttgctttgagcagagagggaaagattaatttacactgctggccaccgaaggcaggtgtttcctgggtagtaatctcacggctcttgatctggaaacttcagagtacaaattggtggatggtggaaggcaggacacgtatctctgtctgacggaaaacagacctcggggctggcgtaaaccctgctgccaggccctctccccactgccccaaaccggcctagacacgaagaccaaagcagcctgcacagggcaaggcccccgcggaatcctgcagagcaaactcaggttaacttgggtccatgaccgtttgcattcgaaacacaatacactgcctcgttctctcagttagcagctgggcagcagcgcaccattcatcatttaggcttgtggtttgttgtttactctaccaatgttatgtcgaaactgcattgtaaaaagagaagaaaatggcaggttttccaggtccacggaaaggtttggcctgacgctggagtgcggtgatgaacttacgtgacaatgattgtattcctcagtagcactttaaacgccgaagacagccctgcagcaagcctgcacacgggcttgggtgggttcctttggagaagatgtggctggaacacaaacaatctttgaaagaaataaatgtgcacacagaaca

SEQ ID NO: 463544 - DNA, 5792 bp, Homo sapiens
ctggattcaatccagaaaacaaaatccactctcctagaggtttacgcgggtcattgggcattcttgagaaatagccacagcgtaacctcatcgcttgctcacttgcaccatgcttgctggaatcgccacggcaaggttttacaccgcttcccctctcccaccctcgggcccacctttcctgtcctttgaggaggacccgcggcagcaggcactggagctggtggtgcaggaggtctccagcgtgctcaggtcggcggaggagaaggtggtggtctgtcacgtggtgggccaggctattcagttcttggtcagcgagacgcctgccttgggtgctggatgccggctgtacgacatgcggctctcccctttccatttacaggaccaggtggctgagacaagtgcgatgtctgacgttctcaaggacatcttgaagcatttggctggttctgcctctccatcagtggttctgattaccaagcccacgactgtaaaggaagctcagaacttacagtgtgctgcatctactgctcaggaatcctgtcctcctaaacctccaagggctcacgagctgaagctactggtgaggaacatccacgtcttgctgctcagcgagcccggtgcctcaggccacattaatgcagtgtgcgtcgtgcagctgaacgatcctgttcagaggttctccagcaccctgacgaaaaacactccggacctcatgtgggaagaggaattcaccttcgagttgaatgccaagtcgaaggagttacacctgcagatttcagaggctgggcgatcctcagaaggtctgctggcgacggcgacagttcctctggacttatttaagaagcagccttctgggccacagagcttcacgctgaccagcgggtctgcctgcggcagctcggtgctgggctcggtcacggcagagttctcttacatggaacctggtgaattgaaatcctggcccatccctccccctgttcctgctgcaaaaatagaaaaggaccgcacgtgaatcttcaaagctgaaactcaagtcgccacggaagaaaagcactattatcatatcagggatctccaagtatctcaggaccacgacgctgccctgatgcagggctacacggcctctgtggacagcacccaccaggaggacgccccatcccatccggagagggcggcagcctctgccccgccagaggaagccgagtcagcccaggcatcccttgcccccaagccccaggaggacgagctagactcctgggacttggagaaggagccacaggccgcggcatggagcagccaggtcctgctggaccccgacggtgatgagctgtcagagagctccatgagtgtcttggagccgggcactgccaaaaagcataaaggaggaattctaaggaaaggtgcaaagctgttcttccgccggcggcatcaacagaaagacccaggcatgagtcagtcacacaatgaccttgtgttcctggagcagccagagggttcccggaggaaaggcatcaccctcaccaggatcctgaacaagaagctgctctccaggcacagaaacaagaacaccatgaacggtgcccccgtggagccctgcacgtagggcctgaggtcatcacctccaagccagaagacgtgcacccatgttaactaccctcaccaggacgcagccagtgtgtccgccggatgtccagatgccccgcttgtcttgctgggtttcttccaaccatctcgtcatttaaagggaaaacaaaatctgagtctccagccaggaggcttctcccagagaggacaaaaaagcccaacttgccaccagatgctaaatgagacttgacagctgcagagcttgggctgtgctcatagctaagggttagggttcaatattagaaggagattaacattataagtgaaataatatgctctaatagattgtggagggcaggtttgagggacttagtttacctattctacactaacaagtgttgttttgggtccatgcctggaccatgtcacaaaaaggaggtgcccccctgtgctgtcactgtgaatggaaaggatgggtcacctctcttcatctgctgcttggaataaaaaatgcagctggccctgagtacagggaagtggaacataggcaggattttggattaatagagaaattttgataagaatggagacgctacgacagatgtaggaagtcatctacctttgatattagccatagaacttgaacactaactatatcctatgcatagtatgcagaacacttttctaagtttactttgagcctacttgcaagtggaagatatatatattctcacatggtttttacatttttctctatcgtgttaaaagctctaataatgctagtggagcagttgacatccagggttttttttcctgcctgtcatacttgctaaacaagagcacagcgggcctgtcagatgaagtcaggagccatacgtgaccgctcgtagaacacagtaaccaaacacatacatggattttgccaagtgctgccagtagccaaaacaaagtctttttagggcaatagaggaaattattttgtgtctcaggtgtcagtcttaggaatggaagtttaataacaaatgggccaaactcgcaggacattccttctatgagcgcttcagaattttgctgtgaacagtcctcttggacacaggttggggtgcccttgtttgggtttgttttggtggaaaacatcacaaacctggcacaccatttgaatatccctaatatcattccagtcgctttcctcatcagttgcctttctatttcagttcattcacagatctcacttctgaatgtgccacttccagtagacatgctggtcaaagagcagtcatcattggggtgaagtgttcttgacagtttaatatgattcacttttctccaaagacatgtaaaaggctgttacgaaagcttggcttctgtcatggagacggaaatgggcaagcttccttccgtagcctcttgttaatccttaaacattaaatatttcgggggtaatagagccactggtgagtaaaaacctatataaaaaccaaaattataggattttttcttttttagtaaaaacctgtatcaaaaccaaaattataggatttttttcttttttagtaaaaacctatataaaaaccaaaattataggattttttcttttttagtaaaaacctatatgaaaaccaaaattataggatttttttcttttttagtaaaaacctgtataaaaaccaaaattataggatttttttttcttcttttttagagagagagattagaaaacgacattaggaatttcactttaaaatgcgcattacaaacttcttaggtgttccaggaattatcaagtgactttaaaatgacttttccaacctgctttgtttttaaaaattatattccagttttaatcattgtaaaaaaagcacctggagtttcaaaacatgtgaatactaccaagtttctgtccccaaagtcaggcatcactgctagtcttttgggacagatgggacagatgttcactttaatgttttacttgaagttttactgctctttgccatgtggtaaaaagaggctgagacatatttaagaattccaagaggatattatgtgtcagaatttcagacactgatgagaagtttttaattgttcttttttatttgattttggaattcaggtgcactctattcaagtgcaaggatatcagaagtttttttttatttaaaaaatttttttttcgagatggagtttcactctgttgcccaggctggagtgcaatggcagcttactgcaacctccacctcctggttcaagcgattctcctgcctcagcctcccaagtagctgggattacaggcacgcgccaccacacctggctaattctatttagtagaaatggagtctcaccatgttggtcaggctggtctcgaactcctgacctcaggtgatccacccaccttggcctcccagcgtgctgggattataggcatgagccaccaggccggccccaggattttatattaagccttcttgctctcaaaaaaaaaaaaaggttttaactattccatttccagatgaatcccatgagcgctgcttactgttgaataccaaggtctagggctctgcttcctgtagacacgcacacgttgtctccatccaatggccttttctgaagttacagaaaacaccaacatgggagggagtttatgaagcaaaggcaaaggcaacacgtcggctagcttcagggtagcaccgtgagaaatgggctgtattgatactgtgaatgtttgttttccaagctgttttatacaggtttgttttttcatggtgtagggtatttatgacaaagtaaatgttgtgaaggttaaagataaattaagattatccaccaaatgctaaaaatactgatgtgtaaatcacctttatcgcctcacctcttctacaagcttttgtggcttgagggcttttgtttttggcttttgtctggatgaaagttttgcccagttgtgttttaaaaacaattcctcatgaacactaagattaattgtgtctgtatctctggaactgggtgctcatgttggttttaatgagcttgcaacccttccccgtttgctttgtttaaggaggtgcctctgttctttgtggaggagtgaaatggagctttaagtgtgtgtgtgtgttatgtgtgtttgcacacacgcgtgtgttattgtagcaataacaaaaagtagccatctccttgttccagctgaaaacctgctgtgagagttttgacagagcactttattttcgtcaagtttcaagtctgagttcaaaaccagccctgatcccttatgaccaactgctactcgaccagtcgccactcagtggccacctggtgcccgtttagatttttgcttgggttttactggccacctctatagacgagagttgcaaagttgctttgagcagagagggaaagattaatttacactgctggccaccgaaggcaggtgtttcctgggtagtaatctcacggctcttgatctggaaacttcagagtacaaattggtggatggtggaaggcaggacacgtatctctgtctgacggaaaacagacctcggggctggcgtaaaccctgctgccaggccctctccccactgccccaaaccggcctagacacgaagaccaaagcagcctgcacagggcaaggcccccgcggaatcctgcagagcaaactcaggttaacttgggtccatgaccgtttgcattcgaaacacaatacactgcctcgttctctcagttagcagctgggcagcagcgcaccattcatcatttaggcttgtggtttgttgtttactctaccaatgttatgtcgaaactgcattgtaaaaagagaagaaaatggcaggttttccaggtccacggaaaggtttggcctgacgctggagtgcggtgatgaacttacgtgacaatgattgtattcctcagtagcactttaaacgccgaagacagccctgcagcaagcctgcacacgggcttgggtgggttcctttggagaagatgtggctggaacacaaacaatctttgaaagaaataaatgtgcacacagaacaaaaaaaaaaaaaaaaaaaaattggggcggcggccggcccggaaaaagttcaacaccctggttggggccgggcccactagggaatgcacacgcccaagcgtcccggagaccggccgacaggcggtcccccaaaaaaccgggaacgggtgacaccaggccgggccggtcaaggcggctacga

SEQ ID NO: 463545 - DNA, 734 bp, Homo sapiens
gccgtataaaacacagcccctatgaagatttttgcttgggttttactggccacctctatagacgagagttgcaaagttgctttgagcagagagggaaagattaatttacactgctggccaccgaaggcaggtgtttcctgggtagtaatctcacggctcttgatctggaaacttcagagtacaaattggtggatggtggaaggcaggacacgtatctctgtctgacggaaaacagacctcggggctggcgtaaaccctgctgccaggccctctccccactgccccaaaccggcctagacacgaagaccaaagcagcctgcacagggcaaggcccccgcggaatcctgcagagcaaactcaggttaacttgggtccatgaccgtttgcattcgaaacacaatacactgcctcgttctctcagttagcagctgggcagcagcgcaccattcatcatttaggcttgtggtttgttgtttactctaccaatgttatgtcgaaactgcattgtaaaaagagaagaaaatggcaggttttccaggtccacggaaaggtttggcctgacgctggagtgcggtgatgaacttacgtgacaatgattgtattcctcagtagcactttaaacgccgaagacagccctgcagcaagcctgcacacgggcttgggtgggttcctttggagaagatgtggctggaacacaaacaatctttgaaagaaataaatgtgcacacagaaca

SEQ ID NO: 463546 - DNA, 1826 bp, Homo sapiens
ctggattcaatccagaaaacaaaatccactctcctagaggtttacgcgggtcattgggcattcttgagaaatagccacagcgtaacctcatcgcttgctcacttgcaccatgcttgctggaatcgccacggcaaggttttacaccgcttcccctctcccaccctcgggcccacctttcctgtcctttgaggaggacccgcggcagcaggcactggagctggtggtgcaggaggtctccagcgtgctcaggtcggcggaggagaaggtggtggtctgtcacgtggtgggccaggctattcagttcttggtcagcgagacgcctgccttgggtgctggatgccggctgtacgacatgcggctctcccctttccatttacaggaccaggtggctgagacaagtgcgatgtctgacgttctcaaggacatcttgaagcatttggctggttctgcctctccatcagtggttctgattaccaagcccacgactgtaaaggaagctcagaacttacagtgtgctgcatctactgctcaggaatcctgtcctcctaaacctccaagggctcacgagctgaagctactggtgaggaacatccacgtcttgctgctcagcgagcccggtgcctcaggccacattaatgcagtgtgcgtcgtgcagctgaacgatcctgttcagaggttctccagcaccctgacgaaaaacactccggacctcatgtgggaagaggaattcaccttcgagttgaatgccaagtcgaaggagttacacctgcagatttcagaggctgggcgatcctcagaaggtctgctggcgacggcgacagttcctctggacttatttaagaagcagccttctgggccacagagcttcacgctgaccagcgggtctgcctgcggcagctcggtgctgggctcggtcacggcagagttctcttacatggaacctggtgaattgaaatcctggcccatccctccccctgttcctgctgcaaaaatagaaaaggaccgcacgtgaatcttcaaagctgaaactcaagtcgccacggaagaaaagcactattatcatatcagggatctccaagtatctcaggaccacgacgctgccctgatgcagggctacacggcctctgtggacagcacccaccaggaggacgccccatcccatccggagagggcggcagcctctgccccgccagaggaagccgagtcagcccaggcatcccttgcccccaagccccaggaggacgagctagactcctgggacttggagaaggagccacaggccgcggcatggagcagccaggtcctgctggaccccgacggtgatgagctgtcagagagctccatgagtgtcttggagccgggcactgccaaaaagcataaaggaggaattctaaggaaaggtgcaaagctgttcttccgccggcggcatcaacagaaagacccaggcatgagtcagtcacacaatgaccttgtgttcctggagcagccagagggttcccggaggaaaggcatcaccctcaccaggatcctgaacaagaagctgctctccaggcacagaaacaagaacaccatgaacggtgcccccgtggagccctgcacgtagggcctgaggtcatcacctccaagccagaagacgtgcacccatgttaactaccctcaccaggacgcagccagtgtgtccgccggatgtccagatgccccgcttgttttaaacgccgaagacagccctgcagcaagcctgcacacgggcttgggtgggttcctttggagaagatgtggctggaacacaaacaatctttgaaagaaataaatgtgcacacagaaca

SEQ ID NO: 463547 - DNA, 5553 bp, Homo sapiens
ctggattcaatccagaaaacaaaatccactctcctagaggtttacgcgggtcattgggcattcttgagaaatagccacagcgtaacctcatcgcttgctcacttgcaccatgcttgctggaatcgccacggcaaggttttacaccgcttcccctctcccaccctcgggcccacctttcctgtcctttgaggaggacccgcggcagcaggcactggagctggtggtgcaggaggtctccagcgtgctcaggtcggcggaggagaaggtggtggtctgtcacgtggtgggccaggctattcagttcttggtcagcgagacgcctgccttgggtgctggatgccggctgtacgacatgcggctctcccctttccatttacaggaccaggtggctgagacaagtgcgatgtctgacgttctcaaggacatcttgaagcatttggctggttctgcctctccatcagtggttctgattaccaagcccacgactgtaaaggaagctcagaacttacagtgtgctgcatctactgctcaggaatcctgtcctcctaaacctccaagggctcacgagctgaagctactggtgaggaacatccacgtcttgctgctcagcgagcccggtgcctcaggccacattaatgcagtgtgcgtcgtgcagctgaacgatcctgttcagaggttctccagcaccctgacgaaaaacactccggacctcatgtgggaagaggaattcaccttcgagttgaatgccaagtcgaaggagttacacctgcagatttcagaggctgggcgatcctcagaaggtctgctggcgacggcgacagttcctctggacttatttaagaagcagccttctgggccacagagcttcacgctgaccagcgggtctgcctgcggcagctcggtgctgggctcggtcacggcagagttctcttacatggaacctggtgaattgaaatcctggcccatccctccccctgttcctgctgcaaaaatagaaaaggaccgcacgtgaatcttcaaagctgaaactcaagtcgccacggaagaaaagcactattatcatatcagggatctccaagtatctcaggaccacgacgctgccctgatgcagggctacacggcctctgtggacagcacccaccaggaggacgccccatcccatccggagagggcggcagcctctgccccgccagaggaagccgagtcagcccaggcatcccttgcccccaagccccaggaggacgagctagactcctgggacttggagaaggagccacaggccgcggcatggagcagccaggtcctgctggaccccgacggtgatgagctgtcagagagctccatgagtgtcttggagccgggcactgccaaaaagcataaaggaggaattctaaggaaaggtgcaaagctgttcttccgccggcggcatcaacagaaagacccaggcatgagtcagtcacacaatgaccttgtgttcctggagcagccagagggttcccggaggaaaggcatcaccctcaccaggatcctgaacaagaagctgctctccaggcacagaaacaagaacaccatgaacggtgcccccgtggagccctgcacgtagggcctgaggtcatcacctccaagccagaagacgtgcacccatgttaactaccctcaccaggacgcagccagtgtgtccgccggatgtccagatgccccgcttgtcttgctgggtttcttccaaccatctcgtcatttaaagggaaaacaaaatctgagtctccagccaggaggcttctcccagagaggacaaaaaagcccaacttgccaccagatgctaaatgagacttgacagctgcagagcttgggctgtgctcatagctaagggttagggttcaatattagaaggagattaacattataagtgaaataatatgctctaatagattgtggagggcaggtttgagggacttagtttacctattctacactaacaagtgttgttttgggtccatgcctggaccatgtcacaaaaaggaggtgcccccctgtgctgtcactgtgaatggaaaggatgggtcacctctcttcatctgctgcttggaataaaaaatgcagctggccctgagtacagggaagtggaacataggcaggattttggattaatagagaaattttgataagaatggagacgctacgacagatgtaggaagtcatctacctttgatattagccatagaacttgaacactaactatatcctatgcatagtatgcagaacacttttctaagtttactttgagcctacttgcaagtggaagatatatatattctcacatggtttttacatttttctctatcgtgttaaaagctctaataatgctagtggagcagttgacatccagggttttttttcctgcctgtcatacttgctaaacaagagcacagcgggcctgtcagatgaagtcaggagccatacgtgaccgctcgtagaacacagtaaccaaacacatacatggattttgccaagtgctgccagtagccaaaacaaagtctttttagggcaatagaggaaattattttgtgtctcaggtgtcagtcttaggaatggaagtttaataacaaatgggccaaactcgcaggacattccttctatgagcgcttcagaattttgctgtgaacagtcctcttggacacaggttggggtgcccttgtttgggtttgttttggtggaaaacatcacaaacctggcacaccatttgaatatccctaatatcattccagtcgctttcctcatcagttgcctttctatttcagttcattcacagatctcacttctgaatgtgccacttccagtagacatgctggtcaaagagcagtcatcattggggtgaagtgttcttgacagtttaatatgattcacttttctccaaagacatgtaaaaggctgttacgaaagcttggcttctgtcatggagacggaaatgggcaagcttccttccgtagcctcttgttaatccttaaacattaaatatttcgggggtaatagagccactggtgagtaaaaacctatataaaaaccaaaattataggattttttcttttttagtaaaaacctgtatcaaaaccaaaattataggatttttttcttttttagtaaaaacctatataaaaaccaaaattataggattttttcttttttagtaaaaacctatatgaaaaccaaaattataggatttttttcttttttagtaaaaacctgtataaaaaccaaaattataggatttttttttcttcttttttagagagagagattagaaaacgacattaggaatttcactttaaaatgcgcattacaaacttcttaggtgttccaggaattatcaagtgactttaaaatgacttttccaacctgctttgtttttaaaaattatattccagttttaatcattgtaaaaaaagcacctggagtttcaaaacatgtgaatactaccaagtttctgtccccaaagtcaggcatcactgctagtcttttgggacagatgggacagatgttcactttaatgttttacttgaagttttactgctctttgccatgtggtaaaaagaggctgagacatatttaagaattccaagaggatattatgtgtcagaatttcagacactgatgagaagtttttaattgttcttttttatttgattttggaattcaggtgcactctattcaagtgcaaggatatcagaagtttttttttatttaaaaaatttttttttcgagatggagtttcactctgttgcccaggctggagtgcaatggcagcttactgcaacctccacctcctggttcaagcgattctcctgcctcagcctcccaagtagctgggattacaggcacgcgccaccacacctggctaattctatttagtagaaatggagtctcaccatgttggtcaggctggtctcgaactcctgacctcaggtgatccacccaccttggcctcccagcgtgctgggattataggcatgagccaccaggccggccccaggattttatattaagccttcttgctctcaaaaaaaaaaaaaggttttaactattccatttccagatgaatcccatgagcgctgcttactgttgaataccaaggtctagggctctgcttcctgtagacacgcacacgttgtctccatccaatggccttttctgaagttacagaaaacaccaacatgggagggagtttatgaagcaaaggcaaaggcaacacgtcggctagcttcagggtagcaccgtgagaaatgggctgtattgatactgtgaatgtttgttttccaagctgttttatacaggtttgttttttcatggtgtagggtatttatgacaaagtaaatgttgtgaaggttaaagataaattaagattatccaccaaatgctaaaaatactgatgtgtaaatcacctttatcgcctcacctcttctacaagcttttgtggcttgagggcttttgtttttggcttttgtctggatgaaagttttgcccagttgtgttttaaaaacaattcctcatgaacactaagattaattgtgtctgtatctctggaactgggtgctcatgttggttttaatgagcttgcaacccttccccgtttgctttgtttaaggaggtgcctctgttctttgtggaggagtgaaatggagctttaagtgtgtgtgtgtgttatgtgtgtttgcacacacgcgtgtgttattgtagcaataacaaaaagtagccatctccttgttccagctgttcaaaaccagccctgatcccttatgaccaactgctactcgaccagtcgccactcagtggccacctggtgcccgtttagatttttgcttgggttttactggccacctctatagacgagagttgcaaagttgctttgagcagagagggaaagattaatttacactgctggccaccgaaggcaggtgtttcctgggtagtaatctcacggctcttgatctggaaacttcagagtacaaattggtggatggtggaaggcaggacacgtatctctgtctgacggaaaacagacctcggggctggcgtaaaccctgctgccaggccctctccccactgccccaaaccggcctagacacgaagaccaaagcagcctgcacagggcaaggcccccgcggaatcctgcagagcaaactcaggttaacttgggtccatgaccgtttgcattcgaaacacaatacactgcctcgttctctcagttagcagctgggcagcagcgcaccattcatcatttaggcttgtggtttgttgtttactctaccaatgttatgtcgaaactgcattgtaaaaagagaagaaaatggcaggttttccaggtccacggaaaggtttggcctgacgctggagtgcggtgatgaacttacgtgacaatgattgtattcctcagtagcactttaaacgccgaagacagccctgcagcaagcctgcacacgggcttgggtgggttcctttggagaagatgtggctggaacacaaacaatctttgaaagaaataaatgtgcacacagaaca

SEQ ID NO: 463548 - DNA, 4661 bp, Homo sapiens
  misc_feature (6)..(9): n is a, c, g, or t
gagacnnnnatttcagctcacactccccatgctattaatttgttaaaggctttggtgttgtacagtactgaataactgccaatgccatctgcctgtggccttctcaagtttgtctgcacctgtggttatcctgacttcaaacccggggagacagaggctagaagaggcagacagctcttgtgtattctgtccagtgcaaagaacacctggaactctgagccctaaccttaaatgcaagacctcatctgcaggtgttcctcatccttttagcccctcagtgatgtaagcaacaaacgtcacccagctcctggggcacacttcactcccagatgagcttgtcctggatttgcagggagcctggctccctagaccttttggccagatccccacaggggaattgtgcaggtgcgccctccccagatccccagttggtattggaatcacaccaactgtcacacatggggagggcagctgcacccagccaccctctgacttctctcctcccacagattggccatctgcaagcttcccttctccgtggagagcaggaagacagtcatgggacctcagggagccaggagacaggctttcttggcatttggggatgtcactgtggatttcacccagaaggaatggaggctgctgagccctgctcagagggccctgtacagggaggtgacactggagaactacagccacctggtctcactaggaattctccattctaaaccagaactcatcaggcggctagagcaaggggaagtgccctggggagaagagagaagacgccggccaggcccctgtgcaggaatatatgcagaacatgtcctgcggcccaagaatcttggacttgcacatcagaggcaacagcaactacaattttctgatcaaagcttccagagtgacacagctgaaggtcaagagaaagaaaaaagcactaagcccatggcattttccagcccacccctaagacatgcagtaagctcaaggaggaggaacagtgtagtggaaatagagtctagtcaaggccagagggaaaatcctacagaaatagacaaagtattgaaaggaatagaaaattcaagatggggagcattcaagtgtgcagagcgtgggcaagacttcagccggaagatgatggtaatcatacacaaaaaagcacattccaggcagaaactttttacatgcagggagtgtcaccagggctttagagatgagtcagcattgctcttgcaccagaacacacacacaggagagaagtcctatgtgtgcagtgtgtgtgggcgaggcttcagcctcaaggccaacctcctcagacaccagaggacacactcaggagagaagccttttctgtgcaaggtgtgtggacgaggctataccagtaagtcatacctcactgtgcatgagagaacacacacaggagagaagccttatgaatgccaggagtgtgggcgaaggtttaacgataagtcctcatacaacaagcacttgaaggcgcattcaggggagaagccttttgtgtgcaaggagtgtgggcgaggctatactaataagtcatacttcgttgtgcacaagagaatacactcaggagagaagccttacagatgccaggagtgtggccgaggctttagcaataagtcacaccttatcacacaccagaggacacactcaggggagaagccctttgcgtgcaggcagtgtaagcaaagttttagcgtgaaaggaagtctcctcagacaccagagaacacactcaggggagaagccttttgtgtgcaaggattgtgagcgaagctttagccaaaagtcaactcttgtctaccaccagagaacacactcaggggagaaaccttttgtttgtagagaatgtgggcaaggatttattcagaagtcaacccttgtgaaacatcagatcacacactcagaggagaagccttttgtgtgcaaggactgtggacgaggctttatccaaaagtcaaccttcactttacaccagaggacacactcagaggagaagccttatggatgtcgggagtgtgggcgaaggtttcgggataagtcctcctataacaagcacctgagggcacacttgggtgagaaacgttttttctgcagggattgtgggcgaggctttaccttgaagccaaatctcaccatacatcagaggacacactcaggagagaagcccttcatgtgcaagcagtgtgagaaaagttttagtttgaaggcaaatcttcttagacatcagtggacacactcgggggaaaggccatttaattgcaaggattgcgggcgaggcttcatcctaaaatcaactctcctcttccaccagaagacacactcaggggagaagcctttcatctgtagtgaatgtgggcaaggatttatctggaagtcaaatcttgtgaaacaccagcttgcacattctggcaagcagccttttgtatgcaaggagtgtgggcgaggcttcaactggaagggaaatctcctcacacaccagaggacacactcaggggagaagcccttcgtgtgtaatgtgtgtgggcaaggcttcagctggaagagaagtctcaccagacaccactggcggatacactcaaaggagaagccttttgtttgccaggagtgtaagcgaggctataccagtaagtcagacctcactgtgcatgaaagaatacacacaggagagaggccttatgaatgccaagagtgtggacgaaagtttagcaataagtcatactacagtaagcacttaaagagacacttacgtgagaagcgtttttgtacagggagtgtgggtgaggcttcatcttgaagttatatctcaccatccatcagaggacacactcaggagagtaactttgctttgttacaagctttagttgaggctgcataacttgttcgtgaagatataacagaggcagacagaatccagagggctacagagaacctgaattcaacccatgtgtccccaagagattcagagaaaagaggtcaatgtttagggaacagagatgccagttgaggggagggcattacctgggctattggggaaatgtggtctctttcctactgagcacatattcttgttgtatttgtgccaggctgtgctttctaaggactgctcttagccagtgactgcagagcagggataccaaggcaggcctgttacactctccccaacctccttggactgcaaacaatctaggacacctccaccaaacctcctcttgcactttccctctggcttccctcccagccttccttggtttggatgttttgtcccctccttaatttatgttgaaactctacataaactgtttactgttgaaacagtgtaagtattaggaggtgggacctttgggaagtgattaagtcaagtcacgaagatagagctttgcgaatgggatcaggtgcccttatgaaaaggcttgatagagggagtttgtcctgtggcccttctattttctgctctgtgaggacacaatgctcctcccttccaaaagatgcagcatgaaggcatcatcttggaaacagacatgagccctcaacagacaactgcacctactgatgttttgatgttgaacttcccagcctccagaactctgggaaaataaagtcctctttatacatttcctagtcagtggtattttattataacagctcaaatagactaagtaactgctcccctcatcattctctcacagtcatatctggaaataaaatctctgtatatgcagtcccatattggtctttgcagagaactccctccaacacagctgataccaagaacagtctgacaaaacaagtggtaaaatagggatctggggaccactcacctgcctggcaggagtaaagcatgttggctggtggggcacaggtaggtggttagctgcaaaatatttcacaggtgatttcctgagaaaatgcctcaatgatagagaatgctgtggcagatgtgatgatgcaggcctttgaaaatgtagggaaagtgcctacaaagagcagagtagactgattatcgccgatctgcattaccacctgcagaaggaccttgagaaattgaagacttcattcagccattagcaaacagttaatggttaagtaaaccaggactccctggtgagtgcttacaaggcctttatcttcttggatagaaggcagaattattgcccaaatatgtgggctgaaggcctgtagcagagctctacagatgttggaatgctcagccaatgcatgtctattttgtagaggtcagacccttcgtaaggaaaatctgggatcctgaaaaatgacaccggaacatctccatggatgcccaagattgcctctgccatgctcccagccacagaccatctgggtgtgtagagatggcccatccttccttaggaatagcatttccaccattcattaccacagaaccttcacaattaaggccagcttaatgagcatgtgccctacatagctgcacacaacccttgtccagcacagggaagatacatgcaatatgcctatccttttgtaaatggtatttgtgatgcttgcccttcaacttccataactttcctcatactcattttgagtttcactgcacattgtgggttcaccagaattctgtgctcctcttccatattaaacacatttacatctgagtgatctggg

SEQ ID NO: 463549 - DNA, 600 bp, Homo sapiens
ggctggctgagcagagacaagggctgcccacactgggactggtagaggaagccggccctgacggatgggtggtctcgcccttcctgggttcatcctgctgcaggtgggcctgagtcgcagatcaggaagcaccgggaagatgcaggcctgcatggtgccggggctggccctctgcctcctactggggcctcttgcaggggccaagcctgtgcaggaggaaggagacccttacgcggagctgccggccatgccctactggcctttctccacctctgacttctggaactatgtgcagcacttccaggccctgggggcctacccccagatcgaggacatggcccgaaccttctttgcccacttccccctggggagcacgctgggcttccacgttccctatcaggaggactgaatggtgtccagcctggtgcccgcccaccccgccaggctgcactcggtcgggcctccacaggcatggagtccccgcaaaaacctggcccctgcaggagtcaggcctggtctcacgctcaataaactccggactgaagatgcacaaccagcgttgtggacgcggccgcgaatttagtagtagtaggcggccgc

SEQ ID NO: 463550 - DNA, 3659 bp, Homo sapiens
ggctggctgagcagagacaagggctgcccacactgggactggtagaggaagccggccctgacggatgggtggtctcgcccttcctgggttcatcctgctgcaggtgggcctgagtcgcagatcaggaagcaccgggaagatgcaggcctgcatggtgccggggctggccctctgcctcctactggggcctcttgcaggggccaagcctgtgcaggaggaaggagacccttacgcggagctgccggccatgccctactggcctttctccacctctgacttctggaactatgtgcagcacttccaggccctgggggcctacccccagatcgaggacatggcccgaaccttctttgcccacttccccctggggagcacgctgggcttccacgttccctatcaggaggactgaatggtgtccagcctggtgcccgcccaccccgccaggctgcactcggtcgggcctccacaggcatggagtccccgcaaaaacctggcccctgcaggagtcaggcctggtctcacgctcaataaactccggactgaagatgcacaaccagcgttgtggggacagcgggggacgcttccctttttcatttattataaataacgctgctgtgaacgtggggtaaagacgccccttggagcctcggcttttggtcctctgggcttgtgcccggaaggggagtgctgggccacgtgggtgtccgtgtttgattttctgggacctgcccccccccgtctcccgccccggctgccgcgtctcactccccgccgcggtgcgaggggccccgtgtgccgcgcacccttccacccgtgttttgctgtttttttgactctgggcgtcccaggggtgcagcggccgtggggccctggtttgctttcacctcttcatctgctcactggccgcgagtgtgtcttcttcagacaaacgtctgaaggtcaagccctgggctcctgtgaacccggccgtctttgcggcagagtctgaggctccttctttattctggatccggcctctggtcggaggcgtgctctgcaggcactgctcccattgctggcagccttttctccccgtggccgcccggccgcccatcagaggcgttgcagacgcccgccctcgccagcgcaaagacaaacgccggtggccgcggacgcgccggcggccgggagcaccccagcgggcgggcaccacagaggcgcggtcctccggcgtctagatctgccatgtggcgcgcgccggaagcggctctgaggccggaagtgagcctagagcgccgcggccccgagatgaagccggcggtggacgagatgttccccgagggcgccgggccctacgtggacctggacgaggtggcacgggcccggcgggagtctccgagcgtggggagcggggaagggggagcggaagggcggcgtcctggtgcgcgggtcccggggaggggaggccgggcgggtgggcgatgggcgcggctcccaggctccctgccccgcggagagcaaatcccggtttctccgagcacctggtgaaaggcggcgaccgaccgcggcgggaagcgtgtgccctagcccgggggaccaggaggcgcagcctgagggttgagtgcctgctgggtgcccccacggcccccgggaacacacccgtggtcagaggagttgcgtttgctgctcttcgatggctgcagcaccccatgggggcccgcggtgtcatagaaagccgaaggcgcaccgacggatggaccctcagggctttgagggggctcagcaaaggtacagctgaggagtcgactctgtggccaaatgctgggggacacattggtgtttgccagatcgtgaaaccatctggaaccatgctaaagagggtggctctgtgcaccccgctcccgaagcacttccattaaacccaggcttctcagtcctgttttacagtcctaggcttcacagtcctaggcgatgtggagccaccggagggctttacagtggggagtgagaggctccgacttgctctgtagggtggcagcatttacggaagagagagggaagggatcctgagtggaggcgatgggctcaatttcgcatgtttgtggcctctggcgatgtccggcgagggatcggaaagctctccttgaggggcacagagaagtagtggtgcttaggtcagtggtaggtttcttttttaaaggcagacaggaatcaaggaacagaagcccttgagagaccttaaaaatcattcctttgaattcctccccctccccccaatacacattcctgtgtctggaactaaaatgttgactccaacttgagcctgtttcccctcacccatcttctttttttgtgggggtagtggccctgcaatgcacttatcacctgttctttcggaaaacgcacctgacataaccttgcctttccattccccaggcgggaggcagcaccgggctcttgatggacttggcagccaatgaaaaggccgttcatgcagacttttttaacgattttgaagatctttttgatgatgatgacatccagtgagatgccctctggctgcaggcggggccaagcccttggtacagagccgcagtgtgagcctgcgcaggacagtttcaggtggttttaaagaacacgtggaaatcccttgaatttaggacctggttaaccagaaagataagactgttcttaacgacctagatgattctgttcatctctgaacgggatcaggttttgtcctcactccaattaaaagaaagcaatgtcacatgtggagtgatctctttcttgcacttatgagtgaatgttgcagtccctaaacgtctctgtgtgtttgtgtgtgcatgcatgtgcgtgcatctgtcagcacgctgagagaaccacatttgtctggtagcagataccttgtgttaaggtgctgtatgtgctggagcaggaggcagcgcggcccgtgcacagctgggcctgctgacagcacttggaggaccttgccacggggccgcccctctgctgtgtgggcaggttcccactgtgtgtgtctgtcagcacagtcgtccttatgctgtcctctggcctccacgtcagggcagctgcccctaggcttaagaactaggacgacaggatgcgactgcaggagacgccttctacgtggaaatgcacattggtccatttcaaaggagagtgtaacgcccatgtgggaagaggggtcttgtttcctgtaggcccagctcagtagtcgatactggctgtaaagcagtgaagttgctgtttgacatccatctcgaagtgaagagtgtttctcaggccaggagacgcccaggcccaggacttcagcagttcccattttcagagttaaagcccctcagtggagggacctgctgcccccgctactgagaacccgctgaagggtgtcaccttgtcatgtttacagaagagacatttgtactggaggccaggtgagatcttaagcagaaccgaatgtcagctctgcctctttttctcatgagtggtgagtggatttccaccctgtcatcctgatggagctcctgtcctttgttggggctcagcagctcaggactgcccaggacaagccagcagtcctccatggttcccgcactgcagcgagggcagtcggagcacggggtccgtgggaaggcagcagagcggcctgtggtgtc

SEQ ID NO: 463551 - DNA, 706 bp, Homo sapiens
ctgtctcatgtgtcatgaactctccagtgatgattatggaagatgaaggcctcatgttctctcacactggaactctgagaccacttgcagaagaaaggatggcactagcttatgaatttcttgtgttgttcctgaacggctgccctgaggcccatggttctccaaagtccttgcagcaatgtttacagacaggaaatggcatgactctgagacagatggaggacggactgagtgtctgcaattgtaaggacatatcatactgttcatgtactgtattagtaattagagattcctggatagtgaaagatctgcactgggagcttactaccggggagcacattttctcacagccgcctctaatctcccacggaagctttcaaacttctcagcatgccttggtgacgtctccagcagagggtactcgcttcaatccccatgctgctgtgggtgggccacaacaacagatgactttttaaatgacatgctgtttcctgttctgctacttatagtttctgaagaaccaagttatatagaaagaagaagaaggtaaaggctgtgaaggaaaaagagaagaaactaactgcaagtaaaaaaaatgaaggccatatatttgttgctatgatctgaatgtctgtgttccctcctcaaaatatatgttaaaatcctaacccctaaagtgaaggcattagaaggtggaatctttgga

SEQ ID NO: 463552 - DNA, 1464 bp, Homo sapiens
aggaagagcacacaccgaagctcctagtgctggtgatgaatccagaccccacgcagaaaccgctgagtgtgcaatgtgcctctgtttcctgctgcataagaagggatgatgatagtactgacttcatggatttgttgggagaatttaaggagatgaaacctgcgaggcacctaggacagcacctgacacttaggtttactccagtaatatgggcgcaccttacaactatggccttcgccattccaggggcctgcatcaggagccacactccagcacccacccccacagtcatggaaaattacaacacagatgttcatacgggatcttccttctattgcccagtgccccgtgaagcccttgaacaaaaccagaagaaagtgaaaaataaacagccttatacggttgtcatcatcctatccccagtgatggagccatacttgggtctgaaatattttgacacagatgaagcaagtctttgcaatttccaaaggaaaggcttctgtgacacactctcttgtttgaaggagtgacaataacctgagaattgctggtagaattatttgttgttattactgtcatcaaaagatatttaattagaatctcttttatatgtgactgataaagccagtgaaatggtcacactgattctacagtaagccatttttgagcacctattatacacaaagcactgtgcaggaaggttgcatagtaagttgagtgtgacccagactccaactctgagaagcttataatagggtgaaggagacagagacagaaaggcaggctcttaatccagggaactacaggaggtaagcacaagggagacagaagcagaggcgggagacgtgacttagccttaccttccgaaactccacactggcatgaggaatagtgatatgcacttgtggaggaatggtctatagaatgaggataaagaggttaaagttttgcgatatctttcaattagtgattctgtaaccaaaacccagagaagcaggttatgatggagtcatcagcaacacatccctttttagcttaacttaggagttctcttaaatcagggtgctaagtgggaaccaaaaaaaccccagctttgtctgtccgagcttgcactgactgggccacgtcgggtgggttgcttattcatttgcccaacgtattttattccagtaatcattcatggcagtcactcaatgtctctgagcactagtttctgcaaaactttatgtatgacataaagtataacatactttatgcccatagaagtatctactctgttgtgagggtaaattagacaacatagccaacctgaaaagtctaattctaatgaatttgtaatgaaatattatcctaagtgattatttcctaaacctgtaaatgtaatcagtttcttaattatctgtgcatgttcacacatagttaaagacattaagttgatgtgtttctaaatttcttttttacatc

SEQ ID NO: 463553 - DNA, 1410 bp, Homo sapiens
aggaagagcacacaccgaagctcctagtgctggtgatgaatccagaccccacgcagaaaccgctgagtgtgcaatgtgcctctgtttcctgctgcataagaagggatgatgatagtactgacttcatggatttgttgggagaatttaaggagatgaaacctgcgaggcacctaggacagcacctgacacttaggtttactccagtaatatgggcgcaccttacaactatggccttcgccattccaggggcctgcatcaggagccacactccagcacccacccccacagtcatggaaaattacaacacagatgttcatacgggatcttccttctattgcccagtgccccgtgaagcccttgaacaaaaccagaagaaagtgaaaaataaacagccttatacggttgtcatcatcctatccccagtgatggagccatacttgggtctgaaatattttgacacagatgaagcaagtctttgcaatttccaaaggaaaggcttctgtgacacactctcttgtttgaaggagtgacaataacctgagaattgctggtagaattatttgttgttattactgtcatcggtcacactgattctacagtaagccatttttgagcacctattatacacaaagcactgtgcaggaaggttgcatagtaagttgagtgtgacccagactccaactctgagaagcttataatagggtgaaggagacagagacagaaaggcaggctcttaatccagggaactacaggaggtaagcacaagggagacagaagcagaggcgggagacgtgacttagccttaccttccgaaactccacactggcatgaggaatagtgatatgcacttgtggaggaatggtctatagaatgaggataaagaggttaaagttttgcgatatctttcaattagtgattctgtaaccaaaacccagagaagcaggttatgatggagtcatcagcaacacatccctttttagcttaacttaggagttctcttaaatcagggtgctaagtgggaaccaaaaaaaccccagctttgtctgtccgagcttgcactgactgggccacgtcgggtgggttgcttattcatttgcccaacgtattttattccagtaatcattcatggcagtcactcaatgtctctgagcactagtttctgcaaaactttatgtatgacataaagtataacatactttatgcccatagaagtatctactctgttgtgagggtaaattagacaacatagccaacctgaaaagtctaattctaatgaatttgtaatgaaatattatcctaagtgattatttcctaaacctgtaaatgtaatcagtttcttaattatctgtgcatgttcacacatagttaaagacattaagttgatgtgtttctaaatttcttttttacatc

SEQ ID NO: 463554 - DNA, 933 bp, Homo sapiens
gaacattaaagctgtgagtaaatgcctatggaatttcccagaagcctctgggtctacgtgcagctctctctttgtggctgagaagaatctgtctaagagctaatgaatgctctcaagaatcccagtcttacaggaaatgcataattactctactgctctaacaggcaccacatccagaacctaatccctaagtggttaaccacagggcagcagtctcccgacgacctgttcatttccaccagcctggggttcaggaggatttttcagccaatcctttagatacttggtttagcaaatctaattatgatctttatgcacacaatgttttccccaagattatatcatgtccctggcattccagaaactaagttacaaggctttgttcaatttttcaaattttttccagagttcaatcattcctatgtcattcactcacatttatttaaattcctttgtgataaacttttaggagggctgtcatgtggtagagctgtgcagaaattattgtgtacctacaccattaaaagtggaatgggcatcaccagcaagaggcaggagaaaagacagtgtggctgggacttgctcctggagagcagcactttccagaagccactcaccatcacagagaagaagcttgggacatacttgacacccacagagaacataacaattccaacagtggacagtaggggacataaagttgggtggggggagcaacaggagggggttactggaggggagggagcaaggagatacgaatcctgtgtttatgaaggccgaatgtggatgggagttgaaagggaccagaaaccagagcactaaattctttacctgcaaagagagatgtgagatgagcgttaccccctagtggtggcccagaattataaaccctgccaataaagcagtaattttcaaatttcatttgcctaaaaa

SEQ ID NO: 463555 - DNA, 462 bp, Homo sapiens
tctgtttagatgggctatgaatcataagcacatttaatacaaaaggcgcacttttggtagtcactttccacatggcatttcaagagtacgaccgcttaagacatgcagtaggccaatcaggattggtttgtcaagaaaagcaaggattaaacaacttcatccttatctgaaacaaatgtgttacggaaacttaaaagaaaatttttgactttcatatttcaaaacattttacaacatctagaaatgttttgttttctttggatatatgttcttccagcttgggggtttggggcttgctttattataaagtggagaagttttttttttgagtgtataaattatggtattacctttcaaagttataaaatattttatggatttttatatgatataaaaatgtacacattaaagccgtttcattattggataaaaaaatctcgcctctttagcctcacctggcgt

SEQ ID NO: 463556 - DNA, 3256 bp, Homo sapiens
tctgaggcaggcctgcatgacagagaggctttcagtgtgcaccgcagtaatagctccaaagcagggaaatgagaatcgaaaacaacagtttgtccaaggaagagacaatgttcacaaagaaaatccatttttagatgttaccttttacaaggaaactaaatcaccatttcatgaaattaagaacagatgtaaagctaacagtgttgtgccatcaaataaaagagaaaataacatttcatcatctgtactaaaaatatcaaaatctcaaaaccagcccagcttggaaattgccaaacctagctattttagagatagcggcacaataagtgtccctcagtttccaatggacttaaatagcaaaatgtcctctgtctatttaaaggaaatagcgaagaaaaagaatgacaaaaaagaggcatatgttagggatttcacaaacatttactggtcccaaaatagacctgatgttaagaagcaaaagttacagaatgataaaaaaactgtagaagcggaaaacattttttccaaatgttatgaaaatgactacccatcactcagcagccaaaatacttgtaagagaaaagacttgatcagttcaaactactgtaactgcagtagtatccagtgtaatgtaagagactctagaaagaatttcgctatactagaaaatgcaaattgggaggaagcagaatgtctggacagttacgtacttaccaggctggaaaaatctcaaaactgggactgtaacgttagacatattttgagaagaaatagaggaaattgttggattataaataattgcaagactaaatgtgaaaatatgaaaaaaactgaagaaaaatggaattggctattattattagaaatagaccttttaagcaaggaagattaccactgtgcaaaagtcatcaatgcatatgaagaacaatcaaagcttctcgtaagagaaatattaggtagtcagacagctttaataacgactgtttggctaaatggtaaaggagaaaatgataatactctacagttgagatacaatactacacaaaaagtctttcatgtgaacaacccttttgaaagtttcattatagaaattttttatttccataaaagtatttcaggaaataaaaaagataatagtattttaacctgctgtaacattttgaagtgtaaaaagcaaattggtataattggtattcaaaatctaataaccagaaacatgaatacaaatataaagaatggaattttaagcatatatttacaagatagtgtttcagaacctttagatattctattgaaaactaacatagcttttttgctcaataactttgactctttaacaagaattgaaaatgattttgaattagaagaggaatgcattttcaagtgcatgctttatttgaagtatccaaaaaatatagtggaaaatcatactgcatatctagtaaagattttaacttcttcaagactattagaagataatatgaaacctatgttaaagaaaaggaagttatttagaactgaacaagtttttgaaaagtctaagaaaaaactcattaattccttcagtatgacaactcaaaatacaggttttccgatttttgaaacatatgaaaaaattccccttttaatggactttgatgacatggatgaaatttctttaataagagaaattacttgtcagaatatgagttgtcctcaacaagttgtgaatgtggaaaattgggctcactataattctagtactgttaaagcacatggtaattcttgtcctcaatttatacagaacaaccgaggatacattaatgaaaatttttatgaagtaaatatgcacagccaagatttaaatatggaaagaaaacagggacataataagatcagtaactttgactgtgagcacatatttgaagatctctgcaatgttaggcaacaggccataccagcaagccacaacataatacataatgaagagacccataccacttctataactcaagtactaaatttttggaacttgctaagtgaaatagaagaaaaaaaatatgacttaattttgaaagaggaagtaaaagtcacagctgaaagtttaacaaatagttgccaagttcacaaagatactaagatagaaaaggaagagaaagatagtttttttccaatggatgacatgttttctgtacagtcagtttcattaataagtaaggaagtaaatgtggaagaaaataaatatgttaatcaaaattatgtaacaaatacaaatgaatatgagagtattttgccagaaagggagatagctaattcaaaggattttcacagaaagaatgactctgcattatatattaatcatcaatttgaaactggtctgagtgaagggaatgatgaatgttttcaggacttagctgctaaatatttatcaacagaagctctgacaatagtaaaagattttgagatgaagagaaaatttgacttagtacttgaagaacttcgtatgtttcatgaaattagtagggaaaatgaacttctaagcactgtggaaacaaacaatgggcaagaaaattactttggagaaaatgatgctgagaaggtaaaaatggagatagaaaaagatttgaaaatggttgtggtcaacaaaatacgtgcatcttcctcgttccatgatactatagcagatcctaatatgggcaaaagtcaccaaagtttatttaaatggaaaactgtacccaataatggagaacaggaagttcctaatgagagttgttatccaagtagatcagaggaagaattactttactctacttctgagaaagattgtgaaacacctttacctaaaagacctgcttttctccctgatgaatgtaaagaagaatttaattatttattgagaggaggtagtcactttccacatggcatttcaagagtacgaccgcttaagacatgcagtaggccaatcaggattggtttgtcaagaaaagcaaggattaaacaacttcatccttatctgaaacaaatgtgttacggaaacttaaaagaaaatttttgactttcatatttcaaaacattttacaacatctagaaatgttttgttttctttggatatatgttcttccagcttgggggtttggggcttgctttattataaagtggagaagttttttttttgagtgtataaattatggtattacctttcaaagttataaaatattttatggatttttatatgatataaaaatgtacacattaaagccgtttcattattggataa

SEQ ID NO: 463557 - DNA, 4125 bp, Homo sapiens
  misc_feature (3)..(6): n is a, c, g, or t
  misc_feature (8)..(8): n is a, c, g, or t
  misc_feature (10)..(10): n is a, c, g, or t
  misc_feature (12)..(12): n is a, c, g, or t
ctnnnntnananattggtttcagcaggtacaaaccttttcctgctggatcccttgactggatcacagtcaagtgggcctggagccatattacatggctgctgcctggtctgcagctgaatctctgattggcaggccgctatcaaggcataggttggtgatgcagtttctgctggatcctcaggagaactggactgcctctgataccctgattgaacaggactggagccagagttttgccacctcctgcctggatattaaaactcttgcaaaggcagttttgtccatgaatggctgccagatcattgtttgtgtggggagaggacattggtgtgtcatttctataccatctggctacgagaggagccgactgaaagtcacactgccggaggaggggagaggtgctcttccgtttctggtgtctgtagccatctccagtggtagctgcagtgataataatgctgcggtgccgacagttctggaaggagcaacaacagtgatttcagcagcagcagtattgcgggatccccacgatggagcaagggaaataattctggaagcaatgacaatatcagctgtggctatagcagctgagatgtgagttctcacggtggcagcttcaaggacagtagtgatggtccaatggcgcccagacctagaaatgcacatttcctcagcaccggctccagatgctgagcttggacagctgacgccttggatcatctgccactgatctctggtcaacatttttatcacccaacacaaaagaagcagagatttatcaagttacctgaccctttcatcttttgctacacatactcttgtaattgatctctccatgaattgttttctgtttaaaatatctagaatgttttctgcttcctgacttgattctaatattgtatagtgccactatctgtgctgagtttttcaaaggtcagagcagattgaacctttgtggtttcattttccctgattttgatttttcttatggggaacctgtgtggctgcattcaaggtgactcgaagaagccttccaaaaagcgtgtgaaaaggaagccctactctactaccaaggtgacttcagggagcacattcaatggtacgtattctggaatcactcactggttgttagaaaaggattctacaggaaatctggagcttaactgctggcttttgtctggagagcctccatgatccaagacatctggtgggaatgaggatgtagggtatagtaaaagaaactggttttcctggtgacatactctttttatctatgtatagtttctgggaacatgttcacattaggttgtgtgtgggtatgtgtgtattagggcgggggtgggaaaccttggcaactattaatatttttactatcgcttcagctttgccttttccagaatgtcatatagttggaatcatatattatgtagttttttcagatgaatttattgcactaaattgatgtacgctttagctgctttcatgtcttttttatgccttaatggcaaaaaatggcacattaaatcaccaaataatattgcattaaatgaatttttgtctttttattcacctgttgaagaattcggtagatttcatgagagaaaccatctgggcctggtgctttctttttcggaatgctcttaatgtgaattcaacttatttaatagacataagtttattcaaattaggatcctagcatgaccttgggaagattgcctttcaaggaattgatacatttcactgaggttatcaaactgcgctcatagaactgttcatgatattccttttaatgcctaacagttcagtagagatggctcctcttttatttctgaaattggtcatttgtgttatcttctttttcttggttagcctgcatatcaattcattcattgtaatgagcatatcaaagaaccagcttttggttttattgattttctgatgatttcagtgttttaattttattgatttctgtgatgttgtttattacttttacttgctttccattgcattcctctattttctatagttccctaattgaaacatgatattactgattttaggtcttgtgatttttagtatattgcatccaatgctatagatttccctctaaggactgcttttgctacatccagaaatcttgccaagtcacattttcttttaatgtagttaaaagtacttttaattttctattgagacttcttctttaacccaacagttatttaaaagtgcattgctaatttgcaaatatttggggattttgtggctcttttacagttgttgattttttgttgtcaggtgtgtgttgcaaaagcagtcgtctacctcatcttgccaccacccaagatggcccaggatgtgggctctccctgagtgaatctttggcaatctgccaacctgatgtgttcggcctccttctttagtctgagcttgccttctgcttagaaagggccattctcagttctggcagggagttttcccaacattgagaaggtggcattcttactccccactgcagcctgcacctctgaccggtggtcagcagacaggacagaggtcctcattagacagagttcagcagggtctctgaccaaagtgcatcttcagagtctgcacctacccactgtgaccacgggcaggctctgagtcctaaagcaggaggaactgtgcgaccatcctgattggaaatttgtgaggatcaccgtgttactcaagtaaggtctttggaaagtgtcgtattactactgtttgtgaactgcttgttggtggcctggctgagccacacactttatgaaaaccaggacccctcagctggtgtgggtgtctatgcagcctgagaccctcatgtgaacagcctcgtggcagctgtctttgccccttgccaccatcagtgcctccttgttcctgggcactgctttctctgatggtgctccattgttttcctgcacctcagtgtctacagctggatgtctcttccgcaatctaggcgagggggcatcaatggcagttctgctgtggcactgccctccttcttagcttgtcttgctctgtcttaggctccctcaaagatcccacccttcaggttcttccacaagtttcttattgaaatccgagcagaaaactatgaccaatatgaccaatcctatacccactgaagacatgaatgaagaattaaaacaattctccatggactctaccatatagatccctagaagtaatttctaaaaaaaaaaaaaaatcaaggaagatgtaatagttttccataaattagaataccctacatgtacaattaaatgaaatggctagtatagtcttgaaaccaaaaccagataaggtaaattaaattctgtgatattttaaaatactgtaaattctgactaatgtgagttaatctcaatatatgaaatagtagattaacattgaaaatgcaataaataaaattagctacctcaagagtttaatggaaaaaaatgtgattattgcaatagattcaggaaattcatgaataacattcaccctatatttgtaggacaactatctaactttaagtgacctgtgacaaccatttgaattaatgctgctttcacagcatatctcttggcttgttaaaaacccgacaagaatttccgtaacattaatttatttttaacacctatattgggtgtgaacccaccataaagtttgcccactgaaaaggtctacaatttgatgctttattaaattgatactgtgtgcacccatcaccacgatctaatttaaatatgtttccctcacccaagttctctcttgcgcactggcagttaatccccactcccatctccagccctaagcaatactgctgtgacattccatctccataaatttcccatttgcttaatagaaatggacatatatatatatttggaatctgacttccttcatttagcatactatgtttgaagttaattgacgtgttagcacgtgctggtcatgtgttttccttcatagtctgctgtgtttactcatacagatagtgtttattcatttatcagttaatggacatttaattgttttgttattttctttgatgagtaatgtagctttgagcattcatatacagtcatgtaatgcataatgacattttggtc

SEQ ID NO: 463558 - DNA, 991 bp, Homo sapiens
  misc_feature (2)..(2): n is a, c, g, or t
  misc_feature (6)..(6): n is a, c, g, or t
  misc_feature (9)..(9): n is a, c, g, or t
  misc_feature (11)..(11): n is a, c, g, or t
  misc_feature (14)..(14): n is a, c, g, or t
tnaatntgntnacntaacaaataatcaccagaatgggagtgaatgacttgtggcaaattttggagcctgttaagcaacacatccccttgcgtaatcttggtgggaaaaccattgcagttgatctgagtctctgggtgtgtgaggcacagacagtcaaaaaaatgatgggcagcgtcatgaagccccacctcaggaacttattttttcgtatctcatatttaacacaaatggatgtaaaactggtatttgttatggaaggggaaccaccaaagctgaaagctgatgtcataagcaagaggaatcagtctcggtatgggtcttctggaaaatcgtggtctcagaaaacagggagatcacattttaaatcagtcttaagagagtgcctccatatgctcgaatgcttaggaatcccctgggttcaggctgctggggaagctgaagccatgtgtgcttatctcaatgctggtggtcatgtcgatggctgcctcaccaatgatggagatactttcctttatggggcccagactgtttacaggaatttcactatgaatacaaaggtgtttattttctttctctttttcagcatttgtttacgaactaccttttttaaagggctgattaaatgaaatagtagatataaaatgcttactgacccacatgttgactgttacacaatgtcatctatcaagagtaaactaggtttggatagagatgctctggttggattagcaatacttcttggctgtgattatctcccaaagttttcagtattctttgtgcacatgctcaatgctattactgttgctaagtcacgtgatcattgggataagccattcatatttccatgcctctcagcgttgtgctgggttttgttcatggaaatatttgtatcttaagatgcacaatctagtgctctgtaacaaataggtataacagaagattaatgttttatttaattttatatattactctttactcttctttctgatat

SEQ ID NO: 463559 - DNA, 836 bp, Homo sapiens
catagctgaacgactctcttaattttccaccgctacacgaacttattttttcgtatctcatatttaacacaaatggatgtaaaactggtatttgttatggaaggggaaccaccaaagctgaaagctgatgtcataagcaagaggaatcagtctcggtatgggtcttctggaaaatcgtggtctcagaaaacagggagatcacattttaaatcagtcttaagagagtgcctccatatgctcgaatgcttaggaatcccctgggttcaggctgctggggaagctgaagccatgtgtgcttatctcaatgctggtggtcatgtcgatggctgcctcaccaatgatggagatactttcctttatggggcccagactgtttacaggaatttcactatgaatacaaaggtgtttattttctttctctttttcagcatttgtttacgaactaccttttttaaagggctgattaaatgaaatagtagatataaaatgcttactgacccacatgttgactgttacacaatgtcatctatcaagagtaaactaggtttggatagagatgctctggttggattagcaatacttcttggctgtgattatctcccaaagttttcagtattctttgtgcacatgctcaatgctattactgttgctaagtcacgtgatcattgggataagccattcatatttccatgcctctcagcgttgtgctgggttttgttcatggaaatatttgtatcttaagatgcacaatctagtgctctgtaacaaataggtataacagaagattaatgttttatttaattttatatattactctttactcttctttctgatat

SEQ ID NO: 463560 - DNA, 387 bp, Homo sapiens
acctgctttttgttttcagtgcctccatatgctcgaatgcttaggaatcccctgggttcaggctgctggggaagctgaagccatgtgtgcttatctcaatgctggtggtcatgtcgatggctgcctcaccaatgatggagatactttcctttatggggcccagactgtttacaggaatttcactatgaatacaaaggacccacatgttgactgttacacaatgtcatctatcaagagtaaactaggtttggatagagatgctctggttggattagcaatacttcttggctgtgattatctcccaaagggagtccctggagttggaaaagagcaagcattaaaacttatacagattttgaaagggcaaagtttacttcagaggtaact

SEQ ID NO: 463561 - DNA, 993 bp, Homo sapiens
atttactatgtaacctgctattatggagttaaaagaagctccccttcattggctcgtcagctttcagagtagcgaaagtacgcataaagcacagggtgccggcccaccgagctgcgctcccttcccgggggtgcccgagagagagcacgcgagcccggcgcagccaaacccgggcaggggtgggtccccaccgcgtgtgcgtgtgccagcctgggagtgtcggcgcgagcgtggcggcgcgggtgtgcgagggagtgcgcgcgggtgggagcgccaggggctggcggggcccgcgccctgggacgagcccctcgtgctccggctctgcgctcccgcagcgcccacgcagccgagaggagtgggtgatgacttcgtgacctcaacgtcctcccccgtccctcgacatgttcccgcgcctgaaaggtgcagaaaactccccccaccgctctggacgagactgagctaggcgtcgagggcgggcgccgccgcagaccggagctcgggctcgctggccgctcaggcgcagcggtgtggagggaacggacgcgcggcaaggcgacccgctctgggcaacgcgggcgcagctgccccgacgcaaggcactagctggtcgggggctcgggcgagccggggccggcgtgccggggcgtgcgctctctcggcaggcgagcgccgggctccgcggaggtccctgcgcccactgcctgcttctccgcccggcgacccggagtccccaggctgcggtgcgccaggccagacctgaccgagggcggaagacccgagcggcagggaggcagaaagaaaagagtgagaggcagaaggaagaaagaggagaaagagaagacaaatgtttttcccttcttgaagaggtggtcttgactactgctcaaccacagcctactgaaagagccctggaaaatctgagttctagatctgcctgtaccactgtgggacccaaggcaagtcaacttctcctcaggccccagtttccta

SEQ ID NO: 463562 - DNA, 4010 bp, Homo sapiens
cgggccaccctgccctgccacaggctgatctgccgcccaccatccctgcagctgcccatgtgtgctgtgggagatacgactgaggcctttttctgcctggataatgtggggtgaggaagaggctgagatcaaggtgacctttcagccccttacagccgtcatctacgaggtgcaggccacgtgctggtacggggcgggcagccggcagaggagcagcatccagctgcaggctgtggccaagtgcgcccagctgctggtgagcataaagcacaagtgcccggaggaccaggatgccgagggcttccagaagctgttgtactttggctctgttgctgtgggctgcacctcggagaggcagatcaggctacacaacccgtcggcggtaaatgcccccttcaggattgaaatttccccggatgaactggccgaagaccaggccttctcatgccccacggcccatggcatcgtgcttccgggagagaagaaatgtgtgtcggtgttcttccaccccaagactctggacaccagaactgtggactactgctccatcatgccttctggctgtgcctccaagaccctgcttaaagtcgttggtttctgtagaggccctgctgtgtccctgcagcactactgtgtcaacttcagctgggtcaaccttggggagcgctccgagcagcccctgtggattgagaaccaatcggactgcacggcccacttccagtttgccatcgactgcttggagagtgtctttaccatcaggcctgcctttgggacgctggtgggcaaggcccgtatgaccctgcactgtgccttccagcccactcaccccatcatctgctttcggcgtgtggcctgtctcatccaccaccaggacccactgttcctggacctgatggggacctgccactcggacagcaccaagccagccatcctgaagcctcagcacctcacctggtaccgcacacacctggcccggggcctgacgctctacccccctgacatcctggatgccatgctgaaggagaagaagctggcacaggaccagaacggggctctcatgattcccatccaggatctggaggacatgccggccccgcagtacccttatatcccccccatgaccgagttcttcttcgacggcaccagcgacataaccatcttccccccgcccatcagtgtagagcctgtcgaggtagacttcggtgcctgcccagggcctgaggcccccaaccctgtacccctgtgcctgatgaaccacaccaagggcaagatcatggtggtctggacgcgaaggtctgactgccccttctgggtgactccagagagctgcgacgtgcccccactcaagtccatggccatgcgcctgcacttccagccgcctcaccccaactgcctttacacggtggagctcgaagccttcgccatctataaggtgtgtgcacgcaatgagagggaggaatgcggggtcctgcagagctacagtaatattgaggaggactgcaccatgtgcccatcctggtgcctgacggtgcgggcacgaggccacagctatttcgctggctttgagcaccacatcccccagtattccctagatgtccccaagagaggctcagacgtcatccttcggcccacttcggccttgtggacccggggccaccagatcatcctcatctgcacctaccctgagggcagctcctggaagcagcacactttctatctgcagtgcaatgcttccccccagtatctcaaggccttgcctgtcccccttatggggtctgaggccaagaaagagggtgcagagaacccagaggaaggatctgggggaggcaaaagacacctgcaggaggtgagcatgtacagccgggaggagccactgcagctgaagctggacacccacaaaagcctctacttcaagcccacctgggtgggctgctcctccaccagccccttcaccttccgcaacccctcgcgtctgcccctgcagttcgagtggagggtctctgagcagcatcgaaagctgctggctgtccagccctccagggggctaatccagcccaacgagagacttacgctgacgtggaccttcagccctttggaggagaccaagtacctgttccaagtggggatgtgggtctgggaagccggcctgtccccaaatgccaaccccgctgccaccacccactacatgctccggctggtgggcgttgggctcaccagcagcctctctgcaaaggaaaaggagctggcctttgggaatgtgctggtgaacagcaagcagtccaggttccttgtcctcctgaatgacggcaactgcaccctctattaccgcctctacctggagcagggcagccctgaggccgttgacaaccaccccctcgataacaaggctggggagaagcaggagctgtgctgcgtctccctggtggccgtgtaccccttgctttccatcctggatgtcagctccatgggcagtgctgagggtatcacccggaagcacctgtggcgcctcttctctctggacctgcttaacagttacttggagcgtgaccccaccccctgtgagctcacctacaaggtgcccacccggcacagcatgagccagatcccccccgtcctcacccctttaaggcttgacttcaatttcggggccgcaccattcaaggccccaccttccgtggtattcctggccctgaagaacagcggagtggtgtccctggactggtatggcttgaagggggccactggggggcctgggagacaagtgcctagaggctgaaggagaacaagagctgcactctcttgcccgtggtggcctggctgcttgctgtctgtgaagagtggacctcacattgacggctgtggaggccagggtggaactggggttgccagcaggactccgggcctgtcaccggctgagacacggtgataggctcagaagcggtgggactgccctgatggagcctgggcatagtggccttaataacttaacaaatgagacacattcactgggcatctgctgcatgccaggacctgcgctttacaagtcttttctcctccaatcctgtgggaaactcctctctagactctttcatggacagggaggctgagggtcagcaaggttaaggactcagcgaagaccattcagccatgaatggacagagccaggttcaaagctgaatttgtccagtccagagcccttgcctaccccagttagtcagcaagaagactgagttgcttctacatagtacgcactgcctcgttgctggagcccgcctgacggagccccagcttagtggaggctgggcctgaatgggggcaagttgagggtctctggtggggaaggacagggacctgctgccggggacagagctgcccccgagggtcctggctgaggggcttttctcccccagaggctcagaacttgtgcccagcaaacatcctgcttccatgcatggacttttcctccctccaccatgtgcctttgtttcctagtaaactccttttgatgacttccaactttgcttggctaaagagaggtggaaaaaaaagtgtccccatctgggtcagacttaggagagggatccaggggtctggccagggcatggcagtgagtgggggagaatgaaaatatgcaggtgggggctcctgtgatcaggaactcgctggcctgagcagagagagccttggggaatgtggagtgagaggggtggggtctgcatcatcagatgggcactagcagcccctcactctctgactgtcccctttctcctccatggtggaggaagatggggaaactggctctttagggggctcctgtctgagaagggccagaactgtgagtaactgagggcttctagctctgaatgactgggaaccttggcagagctgccagcctggtggggaaggccagggcctgccttgagctccagacctgccattcactgggctctttgagtgggcccggagccaggccctacagggctccagggagagggttgggggcagaaaaa

SEQ ID NO: 463563 - DNA, 2418 bp, Homo sapiens
tttatctttttaattctctgcttcattggcatagccttgactggcaaacagtagtgggctcctggtttcatattccataatgcaaacatctactgaggaccatgctagacagcggcaaaggccaaaaaaagcaccaggacttgacttcagctacgatccaagcaatcagatgtgcttttacatgtcaattgcatgcaaaccaccagtgcaacaccccacaagaccacctctatgcattatcttgttttatgccattagacatttgagaaacctgaaattcaaagacggcagccactcagacaaggtcagggagctggtagcagcagatccagggtccagccccgacagccgagctccagctctggcgtttgaccaccctgcgaatcctattataccacttgacctaaaattcatgtgcaaatatagaaattacttcacgctcaggacttggaggattattatcaaaggcccctgcgggtaggtgattgggagtcatggctgggaagagctgaactcctcatgttctcatggctgatccgagagccctgggtttggaagcagaacacccacctgtttagagctgtgattctgtcacttcctaggggtgtgatggtgggaattaaccaagtttcttcaccagtaatatttgcacaataacaccgtcctcattctgctgtctatagtatttaaaactcctatattaaataacccttccaatactgctgcaaattaaaaacctggaccaaggggaccccaactaactactgcagccacccctgctgggggcaagccagagcccactaaaacaggacatttggctacatttacagggcggtttaaatgatttgaagcaacagatgtgtatattgacttggaaggttttgcaggaaactgtgtttcagtacttaaatagcatactgtaagggctgaccttgatccaaggggtcacaaatgtcacctcgttgggaggtgtcttttccaggatctacgttataattatgatctccttggaagcaccaggggagaaattccagatggttttgcaaggataaagtgagagcaaatgaacatccaggttatgtatggatgttcatggaggattaagtgagagaatggtgtggaaagtaccaggtaaaccaggaggcctgaagcacacgtgtaatatgtttattatttgacttaaatgaaagcatggatatttttaaaggttaaagaaaaaggttcaccattttaaactcatgtaaaatcattatataaaattattattgcttttaactgagttcttgaatcatttcttcttaattcaaacaagtcattattctgtgaccagtaggagtttttgagatcagtctgtttgctactaaatttgtctgcacttgggacttcactcaagaggaatgccagctttcttgtgtggaaccagaggcagtcggggcctgagccagcagcactacctgatcgaggaacaggtgcactgagaaaacagagaagccactcaagactgttaactttttgtttgaaagctgcatcaaagtctgggtagccttcccagaaatactattcagtacatgagcacagcagcctgggacctgcagggctccgcaggtgaccctggctaactccactggaagggccccgcctccagcaacatcttcctcagtttccaccttctgtcctttgctgatttagtcccacaagaacttgagtctgaagacagctttgttttcactgctgtgataacaaaaacacaattatgaaataatgtaaacgctcatgcaaaaacacacagaaaagccaaacacaacagtggcccagccaagctctgcgagcttagtcctgtgtgctgtgaatgccctgggcccctctggatgccaagtgccatggactcaggccttaaaggaattttcaagcaacactttaaatatacgcatttcaaaaagtgacttatacacaaaattcaagtgcgatggtgtactttttgttatttttactaactagaatatagggctcgtgtacattttacaaatttgttttgctttagccttttgttatcccatcaaatcgctgtcagggtcaccaggccagtccttttcctcctgcctgctgtgggtgtgatatgcattctgtaaaacaggtgtctggcatggtttttgctctcattttgttgcttttatgttctttgatatggttaaacctatcttttatttacaaggtggctgacatggcttggttctgtgttcctgctcaaatctcgtgtcaaattgtaatccctagagttggaggagggtcctggtgggaagtgactgaaccatggggtgaatttccccctcgctgttctcgtgatagagctctcaggaaatgcggttgtttgaaagtacgcagcaccttccccgttgctctctccctctctccctcttc

SEQ ID NO: 463564 - DNA, 1052 bp, Homo sapiens
ccccatgaaggccttgcctgcttccccttcactgtccgccatgattgaaggttttcggaggcctctgcagtcatgcttcctgtacagcctgcggaactgtgccacgggtcggagacagcacggaaggagagacaagccttacagagacaacgtccagcgccggacaggacgtgggaggaaggagcgcagacgcggtgctggtgggagaaggagacggtactagcacggtggaaaacctgtggaagttacccagcgacgttgacatacgtgctctacgattccgcccaatcatggggagcacagcccacagaaaggcctgcacactccctgaaagatgctcacagggatgtcacggctctgctcttcctcacgacggaaaagggaaacggccgcaatacccgtctatggtaaaaaagatcgataacttggaaacggaacctgtggcatattccttggagtatctccaggttgagaattcatgatccgcttggaatgggtttagatctcggaatgagctgtcatcccggcccagccaggtagctcaggaagcccagccatttaaagatgatgctagacagaactccagatattcttggagcagcatcggcatcggcacgaaaagccccacggcccacagaactccttgggaggcagccacgcttttctccaatcctgtttagtgtctgcaagaccttcctccaaggaacctgctgccaactcgcctggcacagacatcctgacatgacaccactgctcattccccactggcacaggaccggccatctcctccaagcctgagctgcctgtacagcatcccaagctctgggcgcacctggggcagccgtggcaggaacgccgtgggatctgctgagtcctacgaggctgcagtgggaccgagtgggaaccatggcccatgcagaactgcttctcccttgaagaagaaacacaggctattggctcagctgtaaaaggcaaacacaggctattggctcagctgtaaaaggagatcacggcatccgcttggatggggagttggtgccagctttcctgct

SEQ ID NO: 463565 - DNA, 1607 bp, Homo sapiens
atttctcatgatggggcagtactggtgaccttccccagcagggagagggtggatggacagctgctgcctcagctccctggcatttctcatgatggagtagtactggtgaccttccccagcagggagagggtggatggacagccactgcctcagcttcccggcagggagagggcggatggatggccactgcctcagctccccggcatttctcatgatggggcagtactggtgaccttcccagacagggagagggtggatggacagccgctgccccaactccctctccccggcagggagagggcagatggatggtcgctgcctcagctcccgggcagggagagggcggatggatggctgctaccccctgggagaattgtccgcagccctgggagtgccaagtggttcccaaggagccatttctccacttgtgtggatgtcgctgcctccgaagggtggagccgaggggagcacaggaggtgctgtctcctccccaggagttgccaagggcggcggtcaagctgaggtccaggacataacgtacctggaagtgcttcctgtggatgatgttgagcccccacccacagccctccaagggtctgtaacagtgcgtgatgccaggtatgagtcagagcacgggtccccaaccccacgcataccggtcggtggccagttaggaacggggccctgtagtgggagctccaccttctgccggatcaacagcagcatcagattctcgtaggaaggcgaaccctattgtgaactgcgcaggaggctccaatgcctgatggtctgtccctgtctcccatcaccctcagatgggatcctctggttgaaggaaaacaagctcagggctgccactgattctacatgatgccaaccagcagccccgggcatgatggagacagagatggcagcctctaggcgctggtgacctcctccccctcccttcctgatgtagtgcgggaagatgggtccaggatgggatttccagccccggccacacacagagacactctcctgacttttggtgcaagctcctctgcgaactgttgaaccagtgctgcatcacggggtgggtaggactcaagagtgacgccctctgccttcacccaacacacaatgggaacctgtggcatattccttggagtatctccaggttgagaattcatgatccgcttggaatgggtttagatctcggaatgagctgtcatcccggcccagccaggtagctcaggaagctgcaagaccttcctccaaggaacctgctgccaactcgcctggcacagacatcctgacatgacaccactgctcattccccactggcacaggaccggccatctcctccaagcctgagctgcctgtacagcatcccaagctctgggcgcacctggggcagccgtggcaggaacgccgtgggatctgctgagtcctacgaggctgcagtgggaccgagtgggaaccatggcccatgcagaactgcttctcccttgaagaagaaacacaggctattggctcagctgtaaaaggcaaacacaggctattggctcagctgtaaaaggagatcacggcatccgcttggatggggagttggtgccagctttcctgct

SEQ ID NO: 463566 - DNA, 2003 bp, Homo sapiens
  misc_feature (4)..(4): n is a, c, g, or t
  misc_feature (9)..(11): n is a, c, g, or t
tttnaaagnnnaggaactgagacaggaatctgggtcgacctgtgggtgagaggagccgtcgagttgggtgaaatggttcccgctgccccccagctctgcctgatttggagttgtcttcctattggaccccagctcttgggttcaaagtcgacgatcatttgtacgaatgccatggtatatttaagtgagtggttacagctgtttcagtttcttcctcgccagtgtttggggatcgaagagggatatggaatgggagggccgggaagggatgggagcccaaagcccggcagtgaccacagaaggatgaattgcagtgaatcctttattttgctgacctctttgcacagatcatttgtgtgttggttctggtttaatattccaggtgactcatgcttgggcagattccctcatccctggtgccagcttcctctgaaatatgctgagcatcggcctcacagaagtcaggccaagttcattcacacccagactgaggcccttatcatctgggctttaagaactctgtttcttgttgccattattcatcctgggaggcatccggctgcacctcggctccttgcttcctccgcctccccatctcttttaagcaggttagaaacaaatcaaaagactcatccttcagaaatctagacacgagggaaacagtgcaaagctagtctaacctggccttaggatttgttctgctcagagcaccaccaggcctacttcatctgtctgctatgttcttcattctgtgcaatatcaaaacggagaaatatccatcacatgcagctaaacaagaactgccctcaagataagcaagattaaaacaattacaactcacccagctcacggacgctgagtaactgacccctgttgcaccagccgtaactacagctttgattggatgggagactgactccagtaactttctcctgataagagaccaccggccatggactggttctggctggtttgcagaaagtacattcatccgccttcatgtcctgaaaagaccttttgagcaggcagaaactgtgcgtgtgttccccgagcaattccggacaaggccatctgcaacttgcacagctcagcaccaggaggatgagcacatgaggcctgaaaaaatcttgggaagagtgatagcgatggtgtttcctctccagggatgacaccctaaagaccgggccctgtgcagggacgatacaaggtaagaaagcagaggctccagcagggagcttgcctggggccatgctgcattctcaggcaaggcagctcttccagggccgggagacccctgctagctacttgccagtcaactgttgtctccctttgggaacatcacctctgctgctgggctggacttcctcccagcaccagatggtgtcactgaccacctgaaacacagtcgatactgctacagacacatcatgcagtctttttcctttctgatgagaattgcacaaaatcgaattgaccacctggaacaaatgcagctgataccattaaaaacacaccatacagatcttttagtttttaatgggaattgcatgaaatcagattgactggaatgcttgtgtctgtggaacccaagcatgtggcatgctatatagatggtgaattcatctgtgcgtgaggccgcacgtttgacgcatctccaccaacatagggattgcttcccggcatgcatgactaatagtgagttgtaaaaaggaaacttcacttaactatcaataatgaaagggattttcaatcaaccatgctagaggaaagatggtattctcttctgttctctgtagaaaaggcaataaaaatcagtgccacataacaaggttatcagaggatgtagcatagaggtatcacatagttaattaatgaaaatgttctcttattttctgggtatcccaaggctttaaaaaatgtataacttgttacaagtttttgttgtaaatacacattcaatttcatgtgtgatttttgtataaggagttttgcattcattttgt

SEQ ID NO: 463567 - DNA, 1324 bp, Homo sapiens
  misc_feature (4)..(4): n is a, c, g, or t
  misc_feature (9)..(11): n is a, c, g, or t
tttnaaagnnnaggaactgagacaggaatctgggtcgacctgtgggtgagaggagccgtcgagttgggtgaaatggttcccgctgccccccagctctgcctgatttggagttgtcttcctattggaccccagctcttgggttcaaagtcgacgatcatttgtacgaatgccatggtatatttaagtgagtggttacagctgtttcagtttcttcctcgccagtgtttggggatcgaagagggatatggaatgggagggccgggaagggatgggagcccaaagcccggcagtgaccacagaaggatgaattgcagtgaatcctttattttgctgacctctttgcacagatcatttgtgtgttggttctggtttaatattccaggtgactcatgcttgggcagattccctcatccctggtgccagcttcctctgaaatatgctgagcatcggcctcacagaagtcaggccaagttcattcacacccagactgaggcccttatcatctgggctttaagaactctgtttcttgttgccattattcatcctgggaggcatccggctgcacctcggctccttgcttcctccgcctccccatctcttttaagcaggttagaaacaaatcaaaagactcatccttcagaaatctagacacgagggaaacagtgcaaagctagtctaacctggccttaggatttgttctgctcagagcaccaccaggcctacttcatctgtctgctatgttcttcattctgtgcaatatcaaaacggagaaatatccatcacatgcagctaaacaagaactgccctcaagataagcaagattaaaacaattacaactcacccagctcacggacgctgagtaactgacccctgttgcaccagccgtaactacagctttgattggatgggagactgactccagtaactttctcctgataagagaccaccggccatggactggttctggctggtttgcagaaagtacattcatccgccttcatgtcctgaaaagaccttttgagcaggcagaaactgtgcgtgtgttccccgagcaattccggacaaggccatctgcaacttgcacagctcagcaccaggaggatgagcacatgaggcctgaaaaaatcttgggaagagtgatagcgatggtgtttcctctccagggatgacaccctaaagaccgggccctgtgcagggacgatacaagagggacagactgacatcaccatggtttctcctggagtttctctattcaaataaatcaacccacatgaagaatgcacgttaagtttagctaaaaagtaactttctctatcgagcatgt

SEQ ID NO: 463568 - DNA, 1174 bp, Homo sapiens
ggaaaaaaccaacaattaaacgatgcaaaataacctctccaaacacgcccacactggggactggcagtggggggtggcagggtctattaacatttcaatgtcaacactcaagaacaacaaggaggaggggaaactcctacatctggggactgctccagaaaccctgcctgatcctgcccctctcactgacagtctcctcgctgctccctacatcttcctctccgccggagctgtccagaagggggattttggacccaaaggaatcgggatgaaaggggatcagagtgagaggcgctggcaatggactaggaagctcggctgccgctgctactgctcccccctgggctccggcgagagcctttccctgtcaagcaagaggggtgaggatcatatttttattttggaaactaaaaagtgctcccagggtcggtgattattaaggggaaatccctgaatatactctccagccaagaaggcagggctgccggggctgtacaagaagaggcagcagcctcctacagcaccactacaggcactgcgaggacataacaccagagagctgctcctctgccctccgaaacgacaactttcctaccatcttggaggcagagcaaaggggggccagggggaaaagtgcacccgctcccgataaagtacaaatttttacttctcatctctggaaaaaagtccacaccggccgtctacacccgcgcctgggggagaaagcagggaagaaacggggggtgcatgagaaacgttttcatttgctccagggggaaaaatgtttctgcatcttctgatggaaagaaatctttacaagacacaggttttccggtggttattgttttttattttctgtttttaatttttttcatgttagtgacagtgatattttaatatttttttaagccagtaataatttttctccattacagggctaagttctgtggctggtggtcagtttgtaaatttatacttaaagagacttaatagtaacttcatttatttgtctggttatgttattgtatatataaatatttatgttttcatatattgcatataaaaatttgtgttacatgttactctcagaacagattgctgtaagacaattgtaaaaaaacatgtctttcgtctgtttctcaaagcaatgtaaataaaacctatggactgtcca

SEQ ID NO: 463569 - DNA, 2156 bp, Homo sapiens
ggaaaaaaccaacaattaaacgatgcaaaataacctctccaaacacgcccacactggggactggcagtggggggtggcagggtctattaacatttcaatgtcaacactcaagaacaacaaggaggaggggaaactcctacatctggggactgctccagaaaccctgcctgatcctgcccctctcactgacagtctcctcgctgctccctacatcttcctctccgccggagctgtccagaagggggattttggacccaaaggaatcgggatgaaaggggatcagagtgagaggcgctggcaatggactaggaagctcggctgccgctgctactgctcccccctgggctccggcgagagcctttccctgtcaagcaagagggggctaagttctgtggctggtggtcagtttgtaaatttatacttaaagagacttaatagtaacttcatttatttgtctggttatgttattgtatatataaatatttatgttttcatatattgcatataaaaatttgtgttacatgttactctcagaacagattgctgtaagacaattgtaaaaaaacatgtctttcgtctgtttctcaaagcaatgtaaataaaacctatggactgtccagaaaggcatgatacagtgtgtcattttccacagtgcagataaaggcagctatcactggggatttaaaaacggcccctgtttctggaaattctgttatgctgcccatacagaaaggatacagtaaaactggaaagagattttaaagacagccttagatttttcttgaggtaaaatagcttattaagaattatatccgggcatttaatttttttatttatttagattctttaaactctagctagatctttggtgcattacacatgttgctatctgctttttgtgtcacagaattgagaaatgtggctatttttgttagttatgttagttcagaacttccaatgtgctgccagcctgtatgatagactttttgtatattgcagtggatgtcatgaatttacttttttaaatgagcaaagcttactagataaatgggatcagagttaaacaatgctgttagcacagaggtgagagggacaaagggtacccatttacatcgattccaatagaacgcttattggaggataaattgcagagacatttttctatttttgtgaagaaagagaaaaataatagaaaaagaaccgactatctttgtatgttctactggggatgatgatttaaatcttgtattaaaagttatttttctaacacatgttgactaacctggcaggaatgaatttgttatattagtgccctgaatcagtagaatatttaatttctttgtaaaatttattacacaacatttagaaataacttccaaatttagaaattgtcctgatttaaaagtgagttcatgtaatgcatatatcggatatttattagtttctagctgaaccttatctttatcatataactttgaatatagtacttacctaaatattctggattttctttttttttttttttttttttttgagacggagtcttgctctttcgcccaggctggagtgcagtggcccgatctcagctcactgcaagctccgcctcctgggttcacgccattctcctgcctcagcctcccgagtagctgggactacaggcgcccgccaccacgcccggctaattttttctatttttagtagagacggggtttcactgtgttagctaggatggtctggatctcctgacctcgtgatccgcccgcctcggcctcccaaagtgctgggattacaggtgtgagccaccgcgcccggcctattctggattttcttctgtggttttcttcctctttgtttggtggaaaaagttaagtaaaattaactgattctcatcatcttggaaacctcaattgtgaagctatgttctatttacaatattttttttaaacatttagacatcaaacacattagttatcacaaggaaaatcccttaactagacctctggcgaaattgaaaaacatgttttctaacaacttatttttctttatatatgacatgactttatagatatgttttgaatttttcaagaaattaaaatgtgatcagattccatggcttatgtctgtgatcccagcactttggaaggcctaggtgagag

SEQ ID NO: 463570 - DNA, 2711 bp, Homo sapiens
ggaaaaaaccaacaattaaacgatgcaaaataacctctccaaacacgcccacactggggactggcagtggggggtggcagggtctattaacatttcaatgtcaacactcaagaacaacaaggaggaggggaaactcctacatctggggactgctccagaaaccctgcctgatcctgcccctctcactgacagtctcctcgctgctccctacatcttcctctccgccggagctgtccagaagggggattttggacccaaaggaatcgggatgaaaggggatcagagtgagaggcgctggcaatggactaggaagctcggctgccgctgctactgctcccccctgggctccggcgagagcctttccctgtcaagcaagaggggtgaggatcatatttttattttggaaactaaaaagtgctcccagggtcggtgattattaaggggaaatccctgaatatactctccagccaagaaggcagggctgccggggctgtacaagaagaggcagcagcctcctacagcaccactacaggcactgcgaggacataacaccagagagctgctcctctgccctccgaaacgacaactttcctaccatcttggaggcagagcaaaggggggccagggggaaaagtgcacccgctcccgataaagtacaaatttttacttctcatctctggaaaaaagtccacaccggccgtctacacccgcgcctgggggagaaagcagggaagaaacggggggtgcatgagaaacgttttcatttgctccagggggaaaaatgtttctgcatcttctgatggaaagaaatctttacaagacacaggttttccggtggttattgttttttattttctgtttttaatttttttcatgttagtgacagtgatattttaatatttttttaagccagtaataatttttctccattacagggctaagttctgtggctggtggtcagtttgtaaatttatacttaaagagacttaatagtaacttcatttatttgtctggttatgttattgtatatataaatatttatgttttcatatattgcatataaaaatttgtgttacatgttactctcagaacagattgctgtaagacaattgtaaaaaaacatgtctttcgtctgtttctcaaagcaatgtaaataaaacctatggactgtccagaaaggcatgatacagtgtgtcattttccacagtgcagataaaggcagctatcactggggatttaaaaacggcccctgtttctggaaattctgttatgctgcccatacagaaaggatacagtaaaactggaaagagattttaaagacagccttagatttttcttgaggtaaaatagcttattaagaattatatccgggcatttaatttttttatttatttagattctttaaactctagctagatctttggtgcattacacatgttgctatctgctttttgtgtcacagaattgagaaatgtggctatttttgttagttatgttagttcagaacttccaatgtgctgccagcctgtatgatagactttttgtatattgcagtggatgtcatgaatttacttttttaaatgagcaaagcttactagataaatgggatcagagttaaacaatgctgttagcacagaggtgagagggacaaagggtacccatttacatcgattccaatagaacgcttattggaggataaattgcagagacatttttctatttttgtgaagaaagagaaaaataatagaaaaagaaccgactatctttgtatgttctactggggatgatgatttaaatcttgtattaaaagttatttttctaacacatgttgactaacctggcaggaatgaatttgttatattagtgccctgaatcagtagaatatttaatttctttgtaaaatttattacacaacatttagaaataacttccaaatttagaaattgtcctgatttaaaagtgagttcatgtaatgcatatatcggatatttattagtttctagctgaaccttatctttatcatataactttgaatatagtacttacctaaatattctggattttctttttttttttttttttttttttgagacggagtcttgctctttcgcccaggctggagtgcagtggcccgatctcagctcactgcaagctccgcctcctgggttcacgccattctcctgcctcagcctcccgagtagctgggactacaggcgcccgccaccacgcccggctaattttttctatttttagtagagacggggtttcactgtgttagctaggatggtctggatctcctgacctcgtgatccgcccgcctcggcctcccaaagtgctgggattacaggtgtgagccaccgcgcccggcctattctggattttcttctgtggttttcttcctctttgtttggtggaaaaagttaagtaaaattaactgattctcatcatcttggaaacctcaattgtgaagctatgttctatttacaatattttttttaaacatttagacatcaaacacattagttatcacaaggaaaatcccttaactagacctctggcgaaattgaaaaacatgttttctaacaacttatttttctttatatatgacatgactttatagatatgttttgaatttttcaagaaattaaaatgtgatcagattccatggcttatgtctgtgatcccagcactttggaaggcctaggtgagag

SEQ ID NO: 463571 - DNA, 1227 bp, Homo sapiens
aggccgctccgctcgccccactccggctccggctggacccctgcccgcccgccgtcgccgcccgcgggcgccccggaggccctcaggcccccggcctccaccacccgggcgccggccccactcaccctttcattctccgcccggggcctggcgtgggccggcgaatccccggcctcacgtaagcgcgctcgccgcccgcccagcctgcgcggcccagcccgccgccctacgggagcccggggatgtgggccgggcctggggccgcctctgcttacctttcagctgcttttttttttctccttcccccctgttccctcggctgggctgacagatcagagtgagaggcgctggcaatggactaggaagctcggctgccgctgctactgctcccccctgggctccggcgagagcctttccctgtcaagcaagaggggtgaggatcatatttttattttggaaactaaaaagtgctcccagggtcggtgattattaaggggaaatccctgaatatactctccagccaagaaggcagggctgccggggctgtacaagaagaggcagcagcctcctacagcaccactacaggcactgcgaggacataacaccagagagctgctcctctgccctccgaaacgacaactttcctaccatcttggaggcagagcaaaggggggccagggggaaaagtgcacccgctcccgataaagtacaaatttttacttctcatctctggaaaaaagtccacaccggccgtctacacccgcgcctgggggagaaagcagggaagaaacggggggtgcatgagaaacgttttcatttgctccagggggaaaaatgtttctgcatcttctgatggaaagaaatctttacaagacacaggttttccggtggttattgttttttattttctgtttttaatttttttcatgttagtgacagtgatattttaatatttttttaagccagtaataatttttctccattacagggctaagttctgtggctggtggtcagtttgtaaatttatacttaaagagacttaatagtaacttcatttatttgtctggttatgttattgtatatataaatatttatgttttcatatattgcatataaaaatttgtgttacatgttactctcagaacagattgctgtaagacaattgtaaaaaaacatgtctttcgtctgtttctcaaagcaatgtaaataaaacctatggactgtcca

SEQ ID NO: 463572 - DNA, 4592 bp, Homo sapiens
gacaactccccattgaagaatgttcctttcttctggagaaaggagggcacctttcacgtgggagtttttgtctcctgttttccgggaaagaaggaagatcagagtgccctcgttgcatctgctgttttcaagttgccttagcttgagcctgctcatcagaattagccacatgtccctgagccaactacaatggagcctggaatatgcaatcttccccagcatctgggagaggaaagtgaacatggagcattgtcttggctgtggtggccaacaaacattgggacagaacttgattgtaggggcaccagtgggaggcgagtgttatgatccgatggcttcacttgtgatctattcttcatgataatataggctaaacctgagccctgggctccaggacaggcagtgatcccaagctgctgaggtgcctttcggacccagctggtggcagccgttgcctgcaaggatctaggtggtggggagcccaggcttccacccgaggccaccaagggcggtcccagcctggccctgccccctaccctgtgcctccacccctgcccttcctatgctccaaggcaggcagggaggcgggaggccaggtagctcaggaacccaaacctgtcgggcaggttttgagagctgtggagagagggacagaggctggagaaggatgtatggcctgccctgggcttgtctgttccctcctgagcctgagccccttaccttcctgaccccatgaagcacacactggctctgctggctcccctgctgggcctgggcctggggctggccctgagtcagctggctgcaggggccacagactgcaagttccttggcccggcagagcacctgacattcaccccagcagccagggcccggtggctggcccctcgagttcgtgcgccaggactcctggactccctctatggcaccgtgcgccgcttcctctcggtggtgcagctcaatcctttcccttcagagttggtaaaggccctactgaatgagctggcctccgtgaaggtgaatgaggcagaagccagggctgggcagtgggggtcgggtcacccctcatgccctgctgcctgcccaggtggtgcggtacgaggcgggctacgtggtatgcgctgtgatcgcgggcctctacctgctgctggtgcccactgccgggctttgcttctgctgctgccgctgccaccggcgctgcgggggacgagtgaagacagagcacaaggcgctggcctgtgagcgcgcggccctcatggtcttcctgctgctgaccaccctcttgctgctgattggtgtggtctgtgcctttgtcaccaaccagcgcacgcatgaacagatgggccccagcatcgaggccatgcctgagaccctgctcagcctctggggcctggtctctgatgtcccccaagtgttggtgtgagcattgggagcgcgatccacactcagctcaggagctccgtgtaccccttgctggcggccgtgggcagtttgggccaggtcctgcaggtctccgtgcaccacctgcaaaccttgaatgctacagtggtagagctgcaggccgggcagcaggacctggagccagccatccgggaacaccgggaccgcctccttgagctgctgcaggaggccaggtgccctctgtggaccatgtcctgcaccagctaaaaggtgtccccgaggccaacttctccagcatggtccaggaggagaacagcaccttcaacgcccttccagccctggctgccatgcagacatccagcgtggtgcaagagctgaagaaggcagtggcccagcagccggaaggggtgaggacactggctgaagggttcccgggcttggaggcagcttcccgctgggcccaggcactgcaggaggtggaggagagcagccgcccctacctgcaggaggtgcagagatacgagacctacaggtggatcgtgggctgcgtgctgtgctccgtggtcctattcgtggtgctctgcaacctgctgggcctcaatctgggcatctggggcctgtctgccagggacgaccccagccacccagaagccaagggcgaggctggagcccgcttcctcatggccttccaggcggcccccaccaccaataggcagcagcaccagaggtggaatctgtttgccaaccccagactagacgtcctgcctctcgcctaccccagaggtgtgggcctcagcttcctctttgctgcacccctcatcctcctggtgttcgccaccttcctggtgggtggcaacgtgcagacgctggtgtgccagagctgggagaacggcgagctctttgagtttgcagacaccccagggaacctgcccccgtccatgaacctgtcgcaacttcttggcctgaggaagaacatcagcatccaccaagcctatcagcagtgcaaggaaggggcagcgctctggacagtcctgcagctcaacgactcctacgacctggaggagcacctggatatcaaccaggggagcatctctggggtcctggctcagcaactgggcatgactcccaccctgcgcctgctctcccagtataccaacaagctacggcaggagttgcagagcctgaaagtagacacacagagcctggacctgctgagctcagccgcccgccgggacctggaggccctgcagagcagtgggcttcagcgcatccactaccccgacttcctcgttcagatccagaggcccgtggtgaagaccagcatggagcagctggcccaggagctgcaaggactggcccaggcccaagacaattctgtgctggggcagcggctgcaggaggaggcccaaggactcagaaaccttcaccaggagaaggtcgtcccccagcagagccttgtggcaaagctcaacctcagcgtcagggccctggagtcctctgccccgaatctccagctggagacctcagatgtcctagccaatgtcacctacctgaaaggagagctgcctgcctgggcagccaggatcctgaggaatgtgagtgagtgtttcctggcccgggagatgggctacttctcccagtacgtggcctgggtgagagaggaggtgactcagcgcattgccacctgccagcccctctccggagccctggacaacagccgtgtgatcctgtgtgacatgatggctgacccctggaatgccttctggttctgcctggcatggtgcaccttcttcctgatccccagcatcatctttgccgtcaagacctccaaatacttccgtcctatccggaaacgcctcagctccaccagctctgaggagactcagctcttccacatcccccgggttacctccctgaagctgtagggccttgtgggtgagttttccccaactcgcttaattgctccctgccagggattaagggagtggggtggggaggggctggggtctggggtttccagggcctaggagggcaggaaggcttggggacatggtggagtctgggtattgggtgtggcccatccagcagtggggctgacagccctgttctcccctccctccccttcacccgtttccttcttaatccctgacagggtgaggtgaccctgaggctgcctgtcctcccctttgatttagcctgggccacaggacttcggtagctcttgccccagagcccaggctggcatccaggcctggactgtccccagttccggcttacctggccccaccttgcctgctcctttccacccctttctgctcacgacccccatcattcacgctcagaatcacatgggacttctgtgcagctgcagagccagcaagtccctccaggtgtcaccccttacccccatgctggtggcatcctcacaggaagagcctgttctccacctgctggagcctggaccctggggtgggacagaggcctcgtccaaccccactccccttcccgtgtgtcttccccctgccaagcctccccctgccaagcctccccctgcccctctctgagcccctcgccccccacaccgtcctcatctggcctcccccctggcccccacttccctcttatgcccttcctggccctttgcttcctcccttagtcccctcttcaccatatctccactgctaccttgctggccccagagaccaccctgcccaaccaaaccactcagaggttttttttttgcttgttactcatctgttgacctacctgggggaagtagcacccttgcatttcaaaaataaaattgatggcattacaaatggaatagaaaccatttttaaaatattttcagttctctttcaaaattacctattttatcttttatatatttgaacatattaagcatagttattttaaagttcagttagtcccttatatggagcctccatgagtctgtttctagtgcctgttgtttctcttgttttttgttagttttgtcctgtctcctcccatacttggcaatgttttaattgaatcttggccttgtaattcttcactgctttgtttcctgcccaatactctcaattagacttaaatatatatatatacgtacatatatttattaaatatatatatatacgtacatatatttattaaatatatatatatataactttaaaagctgttcaaaa

SEQ ID NO: 463573 - DNA, 3069 bp, Homo sapiens
tacacttgaggacattggggttcagaggcccctgcccccctcatccaccctcagggatccccttcaggcctctccatgaactttgtcataacccaccttcccccatttcaggtgccctctgtggaccatgtcctgcaccagctaaaaggtgtccccgaggccaacttctccagcatggtccaggaggagaacagcaccttcaacgcccttccagccctggctgccatgcagacatccagcgtggtgcaagagctgaagaaggcagtggcccagcagccggaaggggtgaggacactggctgaagggttcccgggcttggaggcagcttcccgctgggcccaggcactgcaggaggtggaggagagcagccgcccctacctgcaggaggtgcagagatacgagacctacaggtggatcgtgggctgcgtgctgtgctccgtggtcctattcgtggtgctctgcaacctgctgggcctcaatctgggcatctggggcctgtctgccagggacgaccccagccacccagaagccaagggcgaggctggagcccgcttcctcatggccttccaggcggcccccaccaccaataggcagcagcaccagaggtggaatctgtttgccaaccccagactagacgtcctgcctctcgcctaccccagaggtgtgggcctcagcttcctctttgctgcacccctcatcctcctggtgttcgccaccttcctggtgggtggcaacgtgcagacgctggtgtgccagagctgggagaacggcgagctctttgagtttgcagacaccccagggaacctgcccccgtccatgaacctgtcgcaacttcttggcctgaggaagaacatcagcatccaccaagcctatcagcagtgcaaggaaggggcagcgctctggacagtcctgcagctcaacgactcctacgacctggaggagcacctggatatcaaccaggggagcatctctggggtcctggctcagcaactgggcatgactcccaccctgcgcctgctctcccagtataccaacaagctacggcaggagttgcagagcctgaaagtagacacacagagcctggacctgctgagctcagccgcccgccgggacctggaggccctgcagagcagtgggcttcagcgcatccactaccccgacttcctcgttcagatccagaggcccgtggtgaagaccagcatggagcagctggcccaggagctgcaaggactggcccaggcccaagacaattctgtgctggggcagcggctgcaggaggaggcccaaggactcagaaaccttcaccaggagaaggtcgtcccccagcagagccttgtggcaaagctcaacctcagcgtcagggccctggagtcctctgccccgaatctccagctggagacctcagatgtcctagccaatgtcacctacctgaaaggagagctgcctgcctgggcagccaggatcctgaggaatgtgagtgagtgtttcctggcccgggagatgggctacttctcccagtacgtggcctgggtgagagaggaggtgactcagcgcattgccacctgccagcccctctccggagccctggacaacagccgtgtgatcctgtgtgacatgatggctgacccctggaatgccttctggttctgcctggcatggtgcaccttcttcctgatccccagcatcatctttgccgtcaagacctccaaatacttccgtcctatccggaaacgcctcagctccaccagctctgaggagactcagctcttccacatcccccgggttacctccctgaagctgtagggccttgtgggtgagttttccccaactcgcttaattgctccctgccagggattaagggagtggggtggggaggggctggggtctggggtttccagggcctaggagggcaggaaggcttggggacatggtggagtctgggtattgggtgtggcccatccagcagtggggctgacagccctgttctcccctccctccccttcacccgtttccttcttaatccctgacagggtgaggtgaccctgaggctgcctgtcctcccctttgatttagcctgggccacaggacttcggtagctcttgccccagagcccaggctggcatccaggcctggactgtccccagttccggcttacctggccccaccttgcctgctcctttccacccctttctgctcacgacccccatcattcacgctcagaatcacatgggacttctgtgcagctgcagagccagcaagtccctccaggtgtcaccccttacccccatgctggtggcatcctcacaggaagagcctgttctccacctgctggagcctggaccctggggtgggacagaggcctcgtccaaccccactccccttcccgtgtgtcttccccctgccaagcctccccctgccaagcctccccctgcccctctctgagcccctcgccccccacaccgtcctcatctggcctcccccctggcccccacttccctcttatgcccttcctggccctttgcttcctcccttagtcccctcttcaccatatctccactgctaccttgctggccccagagaccaccctgcccaaccaaaccactcagaggttttttttttgcttgttactcatctgttgacctacctgggggaagtagcacccttgcatttcaaaaataaaattgatggcattacaaatggaatagaaaccatttttaaaatattttcagttctctttcaaaattacctattttatcttttatatatttgaacatattaagcatagttattttaaagttcagttagtcccttatatggagcctccatgagtctgtttctagtgcctgttgtttctcttgttttttgttagttttgtcctgtctcctcccatacttggcaatgttttaattgaatcttggccttgtaattcttcactgctttgtttcctgcccaatactctcaattagacttaaatatatatatatacgtacatatatttattaaatatatatatatacgtacatatatttattaaatatatatatatataactttaaaagctgttcaaaa

SEQ ID NO: 463574 - DNA, 1711 bp, Homo sapiens
gacaactccccattgaagaatgttcctttcttctggagaaaggagggcacctttcacgtgggagtttttgtctcctgttttccgggaaagaaggaagatcagagtgccctcgttgcatctgctgttttcaagttgccttagcttgagcctgctcatcagaattagccacatgtccctgagccaactacaatggagcctggaatatgcaatcttccccagcatctgggagaggaaagtgaacatggagcattgtcttggctgtggtggccaacaaacattgggacagaacttgattgtaggggcaccagtgggaggcgagtgttatgatccgatggcttcacttgtgatctattcttcatgataatataggctaaacctgagccctgggctccaggacaggcagtgatcccaagctgctgaggtgcctttcggacccagctggtggcagccgttgcctgcaaggatctaggtggtggggagcccaggcttccacccgaggccaccaagggcggtcccagcctggccctgccccctaccctgtgcctccacccctgcccttcctatgctccaaggcaggcagggaggcgggaggccaggtagctcaggaacccaaacctgtcgggcaggttttgagagctgtggagagagggacagaggctggagaaggatgtatggcctgccctgggcttgtctgttccctcctgagcctgagccccttaccttcctgaccccatgaagcacacactggctctgctggctcccctgctgggcctgggcctggggctggccctgagtcagctggctgcaggggccacagactgcaagttccttggcccggcagagcacctgacattcaccccagcagccagggcccggtggctggcccctcgagttcgtgcgccaggactcctggactccctctatggcaccgtgcgccgcttcctctcggtggtgcagctcaatcctttcccttcagagttggtaaaggccctactgaatgagctggcctccgtgaaggtgaatgaggtggtgcggtacgaggcgggctacgtggtatgcgctgtgatcgcgggcctctacctgctgctggtgcccactgccgggctttgcttctgctgctgccgctgccaccggcgctgcgggggacgagtgaagacagagcacaaggcgctggcctgtgagcgcgcggccctcatggtcttcctgctgctgaccaccctcttgctgctgattggtgtggtctgtgcctttgtcaccaaccagcgcacgcatgaacagatgggccccagcatcgaggccatgcctgagaccctgctcagcctctggggcctggtctctgatgtcccccaagagctgcaggccgtggcacagcaattctccctgccccaggagcaagtctcagaggagctggatggtgttggtgtgagcattgggagcgcgatccacactcagctcaggagctccgtgtaccccttgctggcggccgtgggcagtttgggccaggtcctgcaggtctccgtgcaccacctgcaaaccttgaatgctacagtggtagagctgcaggccgggcagcaggacctggagccagccatccgggaacaccgggaccgcctccttgagctgctgcaggaggccaggtgccagggagattgtgcaggggccctgagctgggcccgcaccctggagctgggtgctgacttcagccaggtgc

SEQ ID NO: 463575 - DNA, 1262 bp, Homo sapiens
ccaggcctggtggcacatgcctgtagtcccagctacttgggaggctgaggcaggagaatcccttgaacccaagagcaggctctcttcctgcgggggcggggagcggttgaagaaggatgggaggattgtggtgagggggagccgtggagagacaggcactcacaagccagaacagggcactgacccatcagaatgggcactgactttaagcagcctctttgttcacaccagtgctgccgtccttggctccatcacaagagggagccccattgctagtccccatcctcaaagcctctgcgtgatgttgtctactgttactcttcactaccctgtgggagccaaagccctggacataagaacagaaggcaagcagtggtggctgagaggaagaactgacacctttgtgctatcagagcactttgcagaggagctgttagtggccctgtaggagtctgctggccatacatctgggtgtcaaatcaagagagcatgagaagttggacaggaaaggtccaaggcaaaatggttactaaaggccatccctgatcctgaccctaaaagaagaaaaggccctttgctcttggcatgcttttgcaggagtgtctcagtctgtttgggctgctataacattgactgggtgatctgcctgcctggcctcccaaagtgctggggttacaggtgtgagccgctgcaccaggccttgaggtcaggagttcgagaccagcctggccaacatggtgaaacctgtctttactaaaaatacagaaattagccaggcatggaggcgcatgcctgtaatcccagctactggggaggctgaggcaggagaatcgcttgaacccagaaggtggaggttgcggtgagcccagatagtgccattgcactctagcctggccaacaagagtgaaactctgtctcaaaaaataaataaacaaacaaacaaacaacaacgatgtgtttcttcatggttctggaggctgggaagtctttgatcaagacgccagcagatgtggtgtctatggagagcctgtgttctggttagtgagcaataccttctctccgtgttctcacgtggtagaaggggagaggcagccctctggggcctctttcatgagggcactaattccattcatgagggctcccctctcatgacctaatcacttcccaatgggcccacctgctaataccatccatcgccttgaggattaggtttttaatatatgaattctgggggacaaaaacattttgatcatagccagaag

SEQ ID NO: 463576 - DNA, 1582 bp, Homo sapiens
  misc_feature (1)..(1): n is a, c, g, or t
  misc_feature (10)..(10): n is a, c, g, or t
  misc_feature (12)..(12): n is a, c, g, or t
  misc_feature (15)..(15): n is a, c, g, or t
  misc_feature (18)..(18): n is a, c, g, or t
ntctagatgntngcnttnaggggtccactcgggggcatgcaagtgggttgtggctttgagtggcaggtgggcgggaagaaacaactaagaaagacacacgagaggtcctcaggcttgatctgtcacagctagaagaacagcttccttaacccatcaggcgccaatgggaggtgcctctgggctgcaagaggctggcagagggggacttccagacccagaaagtctgggcacagaagcctattactgccagacgctgaggagttgccgtgggaaccaagggcctttcgggccagatcagagcctttctcagacaattctttgggtaactggcaagctcctggccttcagtgtaactgtgcctctgcttggaatacccttccacactgatggctcctcaccaccaaagctcgagggttatctctcagacaccctaggggagcagtcgggctctggactacatttcccggaggattctgcaggccaataccacgtctcgcgagatttcggcttcctcttagccaggtggcagattctttcgctgtgcccaattagctgctgccgcgccttggagtccggagtaacttggccaggctggccccgagcggaactggagaaagctgagggggttgggcatgttccaggatctgtctatcgacttctctcaggaggaatgggagggcctggacactgctcagaaggacttatagagagatgtaatgatggagaactatagcagcctggtctcactaggtctctctatcccaaagcctgatgtgatttccttactggagcaagggaaagagtcctgcatggtttcaagggacgtaccaggaggatggtgcccagatttgtatcaggcactggagaacctcccacctggtccatgcccggctcccggtgagcaccgagacccaaccttgtgcacagccagtcttgtcatcaacaaacagggtagtaaattataaaaaataaaataaaggaaatgtagctgggcgtggtggcatgcgcctgtaatcccagctactccggaggctgatgcaggagaatcgcttgaacccaggaggtgaaggttgcagtgaggcgagatcgcgccactgcgctccagcgtggatggcaagagcgaaactccttctcgaaataataaataaaataaaggaaatagggccgggcatggtggctcacgcctgtaattccagcacttttggtggccgaggcgggcagatcacttgaggtcagaagttcgagaccagtctggccaacatggtgaaaccccttctctactaaaaataaacaattagccaggcatggtggcgggagcctgtaatcccagctatttgtgaggcggagacacaagaatcgcttgaatcccggagacagaggttgcagcctgtgcatccctcatctacaaaatgggaataataagaatatctgacaattagacgtgtagaaaatatatgtaaaggcctttgaaaagagcttgtgaaagctcaataattgtccccaataattgctctcaataattgtcagctatcattccataataagcgtaatcataaaaatgtttgactcaaagaaagattcc

SEQ ID NO: 463577 - DNA, 436 bp, Homo sapiens
agaagctgaaaatgctctcaaatggaaaattcgggtctgtgaaatggtgggggcttacaaatcggtgcagcttggactaacaggctccggcggccactttgttttctggacatgctttggactgtgagccgagcctctatgaatcatcacttcagcctctgattggtcctgggccaaactttcacttcagcccctgattggtcttgggccaaaatttcacttcagcctctgattggtcccaggctaaggtcccgggccaagcgaagtcgtgctatctccaagacagctcacagaccagtgagcacattcttcctcttcccagttcacaaaacccccagattcagcctcctagttggcaaccctctttcgggtcccctctctgctggggagagctttcttcttttgcttattaaacttctgttccaaactcattctt

SEQ ID NO: 463578 - DNA, 559 bp, Homo sapiens
caatagtgatgtaatacattgccactatttcacaatcactcctattgagcaataattcaattcaaagatgcattaatgagatgtcaggtaataccaaagagtagctgattaatcaagtaagtttcctattcagatcaatgaaatcagttactgagagtaaggcctgacaataggacatgtttgttatttcaataatgactgcaaactagaagaagagatattgtttgtaaaatctttagacgctgaccgtaccagagcatctatttggctgtgaggcagagggtaagtggatatagggaggcatgtgtgtgattggaactttgtgtgtccccttgagagaaaaaaacctttagggagttagagcgggtccttggtaaaactcctttaaacagagaaacagccagaaaaatcaggctgcaggcacagagaaggaaaactagcaaagggggttgtcctaaagacattcctcagctgcactgataagggaccgaggcccaacatagaaatgcctttgtcctttgtgtgaccagcgggcttccaggaaatagtcgcttttttg

SEQ ID NO: 463579 - DNA, 1121 bp, Homo sapiens
  misc_feature (1)..(1): n is a, c, g, or t
  misc_feature (10)..(10): n is a, c, g, or t
  misc_feature (12)..(12): n is a, c, g, or t
  misc_feature (15)..(15): n is a, c, g, or t
  misc_feature (18)..(18): n is a, c, g, or t
ntctagatgntngcnttnaggggtccactcgggggcatgcaagtgggttgtggctttgagtggcaggtgggcgggaagaaacaactaagaaagacacacgagaggtcctcaggcttgatctgtcacagctagaagaacagcttccttaacccatcaggcgccaatgggaggtgcctctgggctgcaagaggctggcagagggggacttccagacccagaaagtctgggcacagaagcctattactgccagacgctgaggagttgccgtgggaaccaagggcctttcgggccagatcagagcctttctcagacaattctttgggtaactggcaagctcctggccttcagtgtaactgtgcctctgcttggaatacccttccacactgatggctcctcaccaccaaagctcgagggttatctctcagacaccctaggggagcagtcgggctctggactacatttcccggaggattctgcaggccaataccacgtctcgcgagatttcggcttcctcttagccaggtggcagattctttcgctgtgcccaattagctgctgccgcgccttggagtccggagtaacttggccaggctggccccgagcggaactggagaaagctgaggctctaaccatggaatactgggaatgtccctttctgtgaaggaggttgtcagccacaacaggaatattcatgaacatgaaggggttgggcatgttccaggatctgtctatcgacttctctcaggaggaatgggagggcctggacactgctcagaaggacttatagagagatgtaatgatggagaactatagcagcctggtctcactaggtctctctatcccaaagcctgatgtgatttccttactggagcaagggaaagagtcctgcatggtttcaagggacgtaccaggaggatggtgcccagttttcctttaatgcagccatttcatgcatcaatggatattcattcagcactctttttttttttttggatacagagtctcactctgtagcccgggctggagtgcagtggtgtgatcttgtctcactggaagccaataagaaacgcttggggatgacctccctacaagcacaggaaaaccattcctgcgcatttctg

SEQ ID NO: 463580 - DNA, 983 bp, Homo sapiens
  misc_feature (1)..(1): n is a, c, g, or t
  misc_feature (10)..(10): n is a, c, g, or t
  misc_feature (12)..(12): n is a, c, g, or t
  misc_feature (15)..(15): n is a, c, g, or t
  misc_feature (18)..(18): n is a, c, g, or t
ntctagatgntngcnttnaggggtccactcgggggcatgcaagtgggttgtggctttgagtggcaggtgggcgggaagaaacaactaagaaagacacacgagaggtcctcaggcttgatctgtcacagctagaagaacagcttccttaacccatcaggcgccaatgggaggtgcctctgggctgcaagaggctggcagagggggacttccagacccagaaagtctgggcacagaagcctattactgccagacgctgaggagttgccgtgggaaccaagggcctttcgggccagatcagagcctttctcagacaattctttgggtaactggcaagctcctggccttcagtgtaactgtgcctctgcttggaatacccttccacactgatggctcctcaccaccaaagctcgagggttatctctcagacaccctaggggagcagtcgggctctggactacatttcccggaggattctgcaggccaataccacgtctcgcgagatttcggcttcctcttagccaggtggcagattctttcgctgtgcccaattagctgctgccgcgccttggagtccggagtaacttggccaggctggccccgagcggaactggagaaagctgagggtctctctatcccaaagcctgatgtgatttccttactggagcaagggaaagagtcctgcatggtttcaagggacgtaccaggaggatggtgcccagatatatatatatggaaaagagaaggtccaagaatatcaaagacattgaagaagaggaaagatttgtcctgccaaatatcagaacttttataaagctacagcaattaagacagtgtggtcctcactgataaactgactaatgaaacagaatagagagctcccaagcaaatctctacaaatttaatcttcgatacgtgatgtaggtgacatggcagatcagtaaggaaagaaaggacttttcaataaatagaatagaaaaataatg

SEQ ID NO: 463581 - DNA, 801 bp, Homo sapiens
gtggcagattctttcgctgtgcccaattagctgctgccgcgccttggagtccggagtaacttggccaggctggccccgagcggaactggagaaagctgagggtgaggaatccggctccggtccttttgtgtgtggagggctgaggagaggagtttgcgtgtgtgattgccatggttgccgtgggtcttcgtggtctgtgactgtggctgcgtggtgctgactctgggtgatcaagtgggcgcttgtgactgtgcgcgctcggagtggatgtgtgtgtcctggacgagccgcgttgtgtgtgcggatgtggacaaccggtgactgtgtggttggggctgcgtgtcccagggtggatgtgtgactttgcgtgtgtgtgcagtactgtgtgtgcgtgagttgcaggtctgtggctgtgcaggtgcaacttgtgtggccccgtggtctgtgtgagagaggagagtgtgactggctgtgaggcagagggtaagtggatatagggaggcatgtgtgtgattggaactttgtgtgtccccttgagagaaaaaaacctttagggagttagagcgggtccttggtaaaactcctttaaacagagaaacagccagaaaaatcaggctgcaggcacagagaaggaaaactagcaaagggggttgtcctaaagacattcctcagctgcactgataagggaccgaggcccaacatagaaatgcctttgtcctttgtgtgaccagcgggcttccaggaaatagtcgcttttttgtgggcatgtatacagtgggctctgttagattttgaagggaa

SEQ ID NO: 463582 - DNA, 1027 bp, Homo sapiens
  misc_feature (1)..(1): n is a, c, g, or t
  misc_feature (10)..(10): n is a, c, g, or t
  misc_feature (12)..(12): n is a, c, g, or t
  misc_feature (15)..(15): n is a, c, g, or t
  misc_feature (18)..(18): n is a, c, g, or t
ntctagatgntngcnttnaggggtccactcgggggcatgcaagtgggttgtggctttgagtggcaggtgggcgggaagaaacaactaagaaagacacacgagaggtcctcaggcttgatctgtcacagctagaagaacagcttccttaacccatcaggcgccaatgggaggtgcctctgggctgcaagaggctggcagagggggacttccagacccagaaagtctgggcacagaagcctattactgccagacgctgaggagttgccgtgggaaccaagggcctttcgggccagatcagagcctttctcagacaattctttgggtaactggcaagctcctggccttcagtgtaactgtgcctctgcttggaatacccttccacactgatggctcctcaccaccaaagctcgagggttatctctcagacaccctaggggagcagtcgggctctggactacatttcccggaggattctgcaggccaataccacgtctcgcgagatttcggcttcctcttagccaggtggcagattctttcgctgtgcccaattagctgctgccgcgccttggagtccggagtaacttggccaggctggccccgagcggaactggagaaagctgagggggtctgtgaaatggtgggggcttacaaatcggtgcagcttggactaacaggctccggcggccactttgttttctggacatgctttggactgtgagccgagcctctatgaatcatcacttcagcctctgattggtcctgggccaaactttcacttcagcccctgattggtcttgggccaaaatttcacttcagcctctgattggtcccaggctaaggtcccgggccaagcgaagtcgtgctatctccaagacagctcacagaccagtgagcacattcttcctcttcccagttcacaaaacccccagattcagcctcctagttggcaaccctctttcgggtcccctctctgctggggagagctttcttcttttgcttattaaacttctgttccaaactcattctt

SEQ ID NO: 463583 - DNA, 1239 bp, Homo sapiens
  misc_feature (1)..(1): n is a, c, g, or t
  misc_feature (10)..(10): n is a, c, g, or t
  misc_feature (12)..(12): n is a, c, g, or t
  misc_feature (15)..(15): n is a, c, g, or t
  misc_feature (18)..(18): n is a, c, g, or t
ntctagatgntngcnttnaggggtccactcgggggcatgcaagtgggttgtggctttgagtggcaggtgggcgggaagaaacaactaagaaagacacacgagaggtcctcaggcttgatctgtcacagctagaagaacagcttccttaacccatcaggcgccaatgggaggtgcctctgggctgcaagaggctggcagagggggacttccagacccagaaagtctgggcacagaagcctattactgccagacgctgaggagttgccgtgggaaccaagggcctttcgggccagatcagagcctttctcagacaattctttgggtaactggcaagctcctggccttcagtgtaactgtgcctctgcttggaatacccttccacactgatggctcctcaccaccaaagctcgagggttatctctcagacaccctaggggagcagtcgggctctggactacatttcccggaggattctgcaggccaataccacgtctcgcgagatttcggcttcctcttagccaggtggcagattctttcgctgtgcccaattagctgctgccgcgccttggagtccggagtaacttggccaggctggccccgagcggaactggagaaagctgaggtttcactcttgttgcccaggctggagtgcaatggcatgaactctgctcactgcaacttctgcctcccaggttcaagtgattctcctgcttcagcctcccaagtagctgggattagaggctctaaccatggaatactgggaatgtccctttctgtgaaggaggttgtcagccacaacaggaatattcatgaacatgaaggggttgggcatgttccaggatctgtctatcgacttctctcaggaggaatgggagggcctggacactgctcagaaggacttatagagagatgtaatgatggagaactatagcagcctggtctcactaggtctctctatcccaaagcctgatgtgatttccttactggagcaagggaaagagtcctgcatggtttcaagggacgtaccaggaggatggtgcccagttttcctttaatgcagccatttcatgcatcaatggatattcattcagcactctttttttttttttggatacagagtctcactctgtagcccgggctggagtgcagtggtgtgatcttgtctcactggaagccaataagaaacgcttggggatgacctccctacaagcacaggaaaaccattcctgcgcatttctg

SEQ ID NO: 463584 - DNA, 915 bp, Homo sapiens
tagtttcctgagctcgaactctactttttgcaacaagcagaatgtacacatgttaaacaagggcacacaagcaggtaacttggagattgtgaacggtgccgaaaaacacactcgagccaactccaagttccagcgaggctaaattggaagaggacagtgatgtgacttcttggtcagaagaaaaacatgaagagaaaatgctctttaccagttatcctgaggacagaaagttaaaaaagaacaagaagaattcccatgaaggagtttcctggtttgttcctgtggaaaatgtggagtctagataaaaagaaggaaaacatgctcaagactcatgaccctggcatctcccggttggaaccagtaaccaagaccaagccgtggagggagccactgtgggagcggaactggcaggggcagcacctggacagtcggggctacctggcaggcccaggcagagaggatggcagaaacccactgaagctgtttgaatcgcttcagtttcacagacctgacttcatctcccacattggggagcggataaagcgtctgaagttaatagtccaggagagaaagctgcagagcatgttaaagagcgagcgggatgcgctattcgacattgacagggaacggcagggccaccagaatcgcatgcgcccactacccaagagaggtacgccctgcccgttcactttccttcttcctggctgtccagaagaacaagcctatcagcaagaaggaaatgattcagaggtccaaacgcaatcccatttcttggaattgatcccatagggtgagaaagaacagtgttctccagaacatattaagttaaacttttttaaaaaattaaattttcgaagtatgtcaacactgtttccatttgtggtctttaaaagggtatataaatttcactagtat

SEQ ID NO: 463585 - DNA, 1134 bp, Homo sapiens
  misc_feature (2)..(4): n is a, c, g, or t
  misc_feature (6)..(6): n is a, c, g, or t
  misc_feature (8)..(8): n is a, c, g, or t
tnnntngnagaaacaggaggagtcatgtgattcctttggctaaacacctatgaatggaaataacttgtgttattgtgtcctttctaatcagagccaattaagtgtgaggtataaattatctctccctccccaccttaaaagctacatgttgcgatgtatcccaagaagtgcagctccttcaatctcaccatggcctctgccagaatgcagatcctgggagtcgtcctgacactgctgggctgggtgaatggcctggtctcctgcgtcctgcccatgtggaaagtgaccactttcatcggcaacagcatcgtggtggccagccagatgcagtgcaaggtgtacgactcactgctggcgctgccacaggacctgcaggctgcacgtgccgtctgtgtcatcaccctccttgtggccctgttcggcttgctggtctaccttgctggggccaagtgtaccacctgtgtggaggagaaggattccaaggcccgcctggtgctcacctctgggattgtctttgtcacctcaggggtcctgacactaatccccgtttgctggacggcgcatgccatcatctgggacttctataaccccctggtggctgaggcccaaaagtgggagctgggggcctccctctacttgggctgggcggcctcaggccttttgttgctgggtggcaggctgctgtgctgcacttgcccctccggggggtcacggggccccagccattacatggcccgctactggacatctgcccctgccatctctcgggggacctctgagtaccctaccaagaattacgtctgacatggaagtgaatgggggctccgctggcactagagccatccagaagtggcagtgcccaacagctttgggatgggttcatatcttttgtttctgcctccttctatttttcttttgactgagggtatttaaaattcatttaaaaactgaaccaagaagatgactcagactcccacttaggttctgctgtttctcacccttggatgatggagccaaagaggggatgctttgagattctggatcttgacatgcccattttagaagccagtcaagctgtggaactaatgtggaggctgcttgctgtgctggcctttgcaacaagacagactgtcc

SEQ ID NO: 463586 - DNA, 912 bp, Homo sapiens
tggaccttcaatgctgtgttagaaggaactaacattgtaagctcaatgaggacagaaacagatcttccttgttccttgttttgtcctcagcagctagcacaaagcttgcagaatgaagaaatacctgctgaaattgatggcttttgcaagagaaaggtggcagttattaagtgcaaggaaactacctttggtagaaagccaatcccctgggaacagcatcttcttaatggagaattctgcaaacattttcaattcacacattcatacaacaaatacttattaagtatggcccttatgatctcaggccactttcccaaaataaccgccaagaacatgttttccactttttcttctccatctagaaagatctattttaaaggacaggattatgaatttgagcactgcttttcacacacagtcacgaatccaggcatttggtccaggcaatgatgggaaaagaacgggtaatgattttaacagagcctgctgcaaacgcccactctttcttccataagcaactaatcttaggtctcagcaatgcaatattccagcatcattgctgatgttatgaaaatattggatcagtgaataccaaatctgtaaccctgatactcccatgtctcaaaagttctcattcttctccttcctgctgccacatgacaaaggatgtgtttgactcccctttcatcatgattgcaagtttcctgaggcttcccaagccatgctgaacttatgcctcagccatggaaatgggccactcctagttcaagcttcttgcagaatatgattgtcttggctatatggactcttttttggttccatatgaactttaaagtatttttttctagttgtgcgaagaaagccagtggtagcttgatggaaatagcattgaatctttaaattactttgggc

SEQ ID NO: 463587 - DNA, 1009 bp, Homo sapiens
  misc_feature (935)..(935): n is a, c, g, or t
  misc_feature (962)..(962): n is a, c, g, or t
  misc_feature (987)..(987): n is a, c, g, or t
tggaccttcaatgctgtgttagaaggaactaacattgtaagctcaatgaggacagaaacagatcttccttgttccttgttttgtcctcagcagctagcacaaagcttgcagaatgaagaaatacctgctgaaattgatggcttttgcaagagaaaggtggcagttattaagtgcaaggaaactacctttggtagaaagccaatcccctgggaacagcatcttcttaatggagaattctgcaaacattttcaattcacacattcatacaacaaatacttattaagtatggcccttatgatctcaggccactttcccaaaataaccgccaagaacatgttttccactttttcttctccatctagaaagatctattttaaaggacaggattatgaatttgagcactgcttttcacacacagtcacgaatccaggcatttggtccaggcaatgatgggaaaagaacgggtaatgattttaacagagcctgctgcaaacgcccactctttcttccataagcaactaatcttaggtctcagcaatgcaatattccagcatcattgctgatgttatgaaaatattggatcagtgaataccaaatctgtaaccctgatactcccatgtctcaaaagttctcattcttctccttcctgctgccacatgacaaaggatgtgtttgactcccctttcatcatgattgcaagtttcctgaggcttcccaagccatgctgaacttatgcctcagccatggaaatgggccactcctagttcaagcttcttgcagaatatatggagtctcacactgcactccagcctggcaacagagcaagcccccatctctaaaataaaataaattgctctgtaagttgacaccactaaaaacatcattagtagttgtaataattaaggataaaggaggaaaactgtgcagagcccagncacagtggcctggttccatgggattanttcctaatggacatttttggttttnccctcttctttggccccctttt

SEQ ID NO: 463588 - DNA, 1171 bp, Homo sapiens
ctcactacctgtgtgtgtattaacacgccggcctcctcgctacctatcaactatggcctgagtatgatagacttatccatggtttaaacagaatatattgttttcaactttgaaaataagaatatggaaatccagatgcagaaatgtgagaagaaaagagagtaaacagagtggaaggtcaggtgaccttgcctgtcatgaatatgaaggtcaaggtgtgtgaattgtgaaatttccaagagaacctcactgaagcaaagaatgaagaaagaattgcatttggccctgggagggtgcaggggtgaatggtgcaggagctaaatctttatcatacccagaaatcaacagccactatttgaaatcatctaaattcgtgctgctaaccttcagtgtacacacgaatcacctggggatcttactaaaagctagtttctgattcactaaatctgtgtgtggtggaagttgagggcagagaagctcccgagggtgtcaagctgactctgaacccgactttgagggttaaggtcccaaatggcatcgccagcaccagggacagacactaaaattgtagaaatcgtctcaagaaatgaacagcctctaagtcagatgttgaatgtgaaagaaatcagggtgtcaagtgaaccatgcaggagggactgtcacacctgcaacacctggtgcagtgctggacacgggggacacttcgcatctctctacttagtgacagcatctgacggaaggagggaggaagggaccctcacacattccaagcgcactgtgacccggcaccttggcttctttacatgtgcattccctgcccctttcatccataaaccagcctcaagggagtggccccacaccctacactccgtccagactccaggagcacacgacacacgggacacactacaccaaacaatgcaggtttcttgtggacagaatttctcccctctgtccctgagcacccgaggactcaagcaatggctatgggatgtgcgggcctcgtgtgaggactcagtgagaaagcgccatctgtgaggaaggtgggcctcgtgtgaggactcagtgagaaagcgccatctatgaggaaggcgggcctcgtgtgaggactcagtgagaaagcgccatctatgaggaaggggggccttgtgtgaggactcagtgagaaagc

SEQ ID NO: 463589 - DNA, 1627 bp, Homo sapiens
tataatccagtatgattaactatggtttgtctctcctggcgtcccgcgcctgccagttgcggccggtacagtccgagccaccgccaccgcccccgggcgccgcaagagggcagcctcctgacgggggacagttgggagcctcgcgacccgtgtgtggcgatccctgccccgctccccagcaggcctgcggccgccagagggcgacgccgcccagcttgcggccactcacgtctctgcactgctgggtgtccgcggccaggacgctggcgaccgtcttggtgacggcgactttggcaggcttggagcaggcgccgagagcccaacgacctcagccccgccccccgcgttccaggcttccaatggtagcggccccagaagggcggtggcctcctgaggggcggctcgcgccagcgcgtagagcgcccgcagagctgggaaaatcggtccgagaggcctgatctgagaggaccacagttgaaacttcatctttctctgaaaccatcacgccttagccaatcctaacgaaaacgtataagctttgttgagttggagggaatcattgctgtgagaagctgacagtggtggatgacaagcttgaatttccagaggaaatagcatgtctgtgaaactcacccatgccatctggaaaggaaaaagttaagttgcatttctgcaatacattctctcccttccctgagctgctcctggaatataaagaaagcaaggaaatatttactgggccttcagctttctgtactacttcggaacagcactagcatctatctcagggtttaaaatatggaagttcttgccttccttgaatcttttctcccagaaataacatattggctctcttccctgtgacatgcctcatctgacattggctggctttcatataaaacctttgttttagcctactatcaattcaacttttacattgacaaaacgtaatttttggttgtcaatgtaaaagttgacatttttacattcaactttaatttaaatgctgaatttaaatttaaatgctgaaaatttatttaaacacttaaaatgatattagaagaggtattttatgtttttaaacagagatatatttcatttttatatgcagtcaacagatcacatgtgtatgtctcttatgtgttcctgtgtgggaatagcttgaattactacataagttctctgagaatattaagttcatttaggggaacaggacatatctatatgaaaaacagaaataatactacaaacaaaagagagatcacgagataacatgtaattaattctcagtgaatgacatgtcatgaaatcatcagaagagatgaggatatgggaaaagctttatgaaagtagtcagaaccataaggaagattcggttttgttaaacagaaagacctttttccattgtggtattaagtttaatatgattttcattgtattaaaatactaatgcagtaagttgaaaatataattgcattcttttcatttaatctattgtaaaatatataatcaaaatgatatacttgtaaaataattacatatataataaaatcaatatacctgtaaaagaatcacaatttaagatttatttattatttaagtttaataatgtatattatttctaaaa

SEQ ID NO: 463590 - DNA, 986 bp, Homo sapiens
cccaaggagatgtgatgagtacatgtaatgaggaaaattaattccacactcataactccaccgtgtgacaaatcttgccggtttccatttccaggcttttggcctgacttggtcacatggatgcagatttttcagagttggatattttactgttcttgttcacctactactttccttactgcttgttttttaaataaaattataaaatgcaacaacagagttgtgttcccccgagaaattattttctattacacacagtgcaactgtgaacatctttctgcacccccttggccgagtgctgcacgcagctgtggggctgccgtggtccggagaaaggctgaggatggcgtgcaagggactgggactgggaccgcactggagcctgacggaatccctggccttgttttcacttaatcacctctttaaagaccctctctccaaacatagtcccatcccagggtgctggaggcctaagagaggggccttaggaggaaccaaccctggccacatcttgatctcagacttctggcctccagcacagtgaaaaattaaagttctgctgcttgagccacccagtctgtgacagttacggcagccggagcagatgatgacacctgtccagttggtgcacgtgccccagggcccctcagaacacaactttcccctggagggcgaagcgagcagatttctggagcttgaaatggcaatcgtcattagggtaacccgcttccccagagcatgtgcccggcttgtcctggaaatgacaagaatggagacgtggctgagcacagacaccaaggcctgaggacgctgagacttggggatctatatcatcctccacggatctctccaaagccagtttctgtcctatataatattcacctcattgggatatttccccatcatttcaatgggatgttatagtgagataaacatgccagacaaaattgaattctgtgggtttatttattgatttatttattttt

SEQ ID NO: 463591 - DNA, 1562 bp, Homo sapiens
gagaaaactaaacccaaacaacacccgagacaaggaacagacgtcattcttcctttgcctgctggttgacagcctgccaccgtttaaagatgcggtacaccgagggtccttcatggatgatgagacctgaggcagcagggagaggagaaacagaggccaaatgagaggaagtgggtcacggccaggagaccacagtctctctgaatctatgcaagggtctctctctgttgcccaggctggagtgcagtggtgcgatcatggctcactacagcctcgacctcctggttcaagtgattctcccgcctcagcctcccaagtagctgggacttcaggcacacaccaccatgcctggctaatttctgcattttttatagatacagggttttgccatgttgcagactgatctcaactcctgaactcaagcgatcctcttgcctcagcctcccaaaccgctgggattacaggcatgaaccactgagcccagctgcctttcacacttctactgtgcattagaatcacccaaagagcttgttaagacagattcccaggctgcaatcttggaggcctactggcttagtagctctgggctgaggcctgagaatatgcattcctaagaaacctcaggtgaggctgatgctgcctgtgtgtggactgctaggctaggacatggtttttattcctcatagaaggttctaaattttgatcacaaaacttattataagtaattttaaaaagtaatctacttccagatgtcatagacatggaaatgggaagaaacggaagaaataaatacttcctctcctagacccaaagacctttgtgccccacaactaagagttaacttaccacaaccagccacttggctgtggagattggtggccgtcacaggaggccccgggtgggtgggaaggagttaacacggaatctagaaaaccagataagctacatgcaagtaacagaacgtggatgggcatcatctcgccagtttctacagctgctgcttctcatgtcagttttgtggcccagcccaatattgctggggatgccccacggtcacaagtgtcagcctttgcaagccctggcatctcagtgtggaggtgacatcaaaatcctgggatgtcagacctggaaggaacctggagccagttggatggatacagctgtggatggggttgaagcagctccatgggcagcaagcaggcagtgtcctgcacagcatcctcctgggttcctggcagggcgtatctgcagagctgcagttggctttcgtgaagcttctccttggagtccctcctactttcatgagctgtccctcagcacaccgctccaaaaggaaagaggtaagcccgacttgccatcccagaggctgtggttcctgtcctacattgccctgagtgaatctaatgccaaatgtgctctctggaagtccccatgagtcagaatgtctagttgagcctaaaaataaagatatccctggcaggcattgcaggctctacccgattctccctccagagagcccttaaaaagcagatatttttgcaccaaattgtgcagtgtgatgc

SEQ ID NO: 463592 - DNA, 1402 bp, Homo sapiens
taaagttttgctcgagaggggaaactgagggggcagggggcggcccggaaagcgggtccagacgatccggctcgaaatcccctccccccacaacagcgtcgcccgccagagccgccgcccggtacctctcgatgactgaggccaccagctgcggcaactccttcatctcgaaggcggacccggggtcgtgtccgcccccgttgccggggtccccggcgccggagccgctgccgccgcctcttcgccgccgctcgtcgccatcttccgtcgtactactgcggctccctccgggggcttgccaccggcccagcgccgcctcccaggagggggcggaaactgcgcgccgccgtcatgggtcaaaaacgcgacgcgcggagcggcctttgctctcaccggggtcgagccgcggcgagggaacggatcggagacgctgcgcctgctcagaaggtagcgcagcggggaaaggcgggagagcgttaacttctgagcctgcgcggtgggagttgctcaagcaggtggtagcgacttggcttccgggcagcgggtaaaggtgagtctggggcatgggttcagtgggcaagtctagggcagcagagttgactacgcctcggcgtatagaatggccctggcctgggacagctaaggacgacaagaggaggccgaagcctaaaacgctttcacctgcttcttcccctgcctagatccccccaatagtaatactaaagagcgccatagtttacaaagatttctccctctcacaacaccttttaatcactgatccgtattcccttagcactcaaatctcttctgtttggattgccctcattaacaatctgaccagctcgtacaatgcatccctctttgcaatttgccacgtatgcttacgtgttccccttttttctactggcaaggaaagaatgtaagcttttattcacaggagatgtctgagacttttgccggtaaaatgatctggctacaaggtctaagagggaaaagcagtttgctcgaggaaaggtattcgtgcattaaggacagtcctgtgagtgagatattggtggacggcttcaagctctagcctgtggcctacagctggcctaaataagactgggaaggaactgtgaagacggtttcaaattcctaaagccctgaaattctccccctaagtttaggaagagcttttgttcttggtgtgtaacactgataaatgaattggtacctagtgattaatctgcacttttattaagatatgacctactttaccttttttgagacaggatcttgctctgtcgcccaatagcccaggctggagtgcagtggcagattgcagtgagctgagatcgcaccactgcactccagcctgggtgacagagcaagactctgtctcaaaaaaaaaaaaaaaaaa

SEQ ID NO: 463593 - DNA, 830 bp, Homo sapiens
taaagttttgctcgagaggggaaactgagggggcagggggcggcccggaaagcgggtccagacgatccggctcgaaatcccctccccccacaacagcgtcgcccgccagagccgccgcccggtacctctcgatgactgaggccaccagctgcggcaactccttcatctcgaaggcggacccggggtcgtgtccgcccccgttgccggggtccccggcgccggagccgctgccgccgcctcttcgccgccgctcgtcgccatcttccgtcgtactactgcggctccctccgggggcttgccaccggcccagcgccgcctcccaggagggggcggaaactgcgcgccgccgtcatgggtcaaaaacgcgacgcgcggagcggcctttgctctcaccggggtcgagccgcggcgagggaacggatcggagacgctgcgcctgctcagaaggtagcgcagcggggaaaggcgggagagcgttaacttctgagcctgcgcggtgggagttgctcaagcaggtggtagcgacttggcttccgggcagcgggtaaaggaaatgcctcaggccagaagaagcagtggcagcctctcacctgcagtgggatctgtctcaactcccattccgtctccagagccaaagtttggagggaacgtgagctcgggtcaggacacaccaggacagcctcatccaccacaccacaggctccagacaggtgctgcagccacggagttgaaaccctaacctacagaaaagtcatcgttaacaggaagctcgtgaaagatttttacatttccctctcagcccaacagcaatattgctgccagcatcccac

SEQ ID NO: 463594 - DNA, 852 bp, Homo sapiens
cctataactgtaataggttccttgcccgatgcatacaacaagtcaatacactaaaacactgagttgcagcacagaaagagattcaaagaaagggcaattattcagtctagaagatatcacagtcaactcttgctcatcagcacatgtaggaaagaagaccatccaaacatcattctcctgtgctttgagctacacattatgttctggtgacaaccaatcaatcaacagacatttggtgcctgcgcccagccttttccatgtctggggagaacactcacctcaaaggagcagccctttcctacagtggttacaatgtaaacattacacaacacataaccatggctactcaaaagcctggtacattctcccaggagccccacagtatgcccacctgagagcaacccagtatgggggctccgacagttcccattgaagatatggaatgaaacaccaccaaggtacaggactcgtattgctcatttcattgacaatgataatcaagtgggaaaatgttcccgagttcaaagctaccaccttctgctctgcagccctgatatgtaacaatcagagcctccttttcctcatctgtaaagtggggatcatcatggcattttcctcattgagctgctgcgaggatttaacaaggaatggaggaccccgccagtaatatagctgttattttaaaacaaactcagaagcctccttgctcctctctgaaggcatccttggaccagttgtgcagttgcatgtataatttctgcaccatgagcccacactccctgcctagctcagatctcacagctctcacctgcatcctgccatcgatcctctcctgtatggactccctgccaa

SEQ ID NO: 463595 - DNA, 1613 bp, Homo sapiens
accatctagttgcaggaaaacaagttcagggctcccactgattatgcattatggttcatgtataaggcctgcaaattaaactgacaaaagattcacaggagaaaaaaaattataaattttgctgatggaatctgaatttctgtgtttggaatttgatgaggtcaaagtcaaccaaattctgaagacgctgtcagaggtagaagaaagtatcagcacactgatcagccagcctaactgaagatgatgtatgaaggagttggagttgttgaaaccaagtatactctctacttattaaaaaaaaaaaaaagtcctttccacgctacctgcagaggggtccatacggcgttgttctggattcccgtcgtaacttaaagggaaactttcacaatgtccggagcccttgatgtcctgcaaatgaaggaggaggatgtccttaagttccttgcagcaggaacccacttaggtggcaccaatcttgacttccagatggaacagtacatctataaaaggaaaagtgatggcatctatatcataaatctcaagaggacctgggagaagcttctgctggcagctcgtgcaattgttgccattgaaaaccctgctgatgtcagtgttatatcctccaggaatactggccagagggctgtgctgaagtttgctgctgccactggagccactccaattgctggccgcttcactcctggaaccttcactaaccagatccaggcagccttccgggagccacggcttcttgtggttactgaccccagggctgaccaccagcctctcacggaggcatcttatgttaacctacctaccattgcgctgtgtaacacagattctcctctgcgctatgtggacattgccatcccatgcaacaacaagggagctcactcagtgggtttgatgtggtggatgctggctcgggaagttctgcgcatgcgtggcaccatttcccgtgaacacccatgggaggtcatgcctgatctgtacttctacagagatcctgaagagattgaaaaagaagagcaggctgctgctgagaaggcagtgaccaaggaggaatttcagggtgaatggactgctcccgctcctgagttcactgttactcagcctgaggttgcagactggtctgaaggtgtacaggtgccctctgtgctattcagctattccctactgaagactggagcgctcagcctgccacggaagactggtctgcagctcccactgctcaggccactgaatgggtaggagcaaccactgactggtcttaagctgttcttgcataggctcttaagcaacatggaaaaatggttgatggaaaataaacatcagtttctaaaaaaaaaaaaagttaactgtaaaacaacctcaggcaggtccttcaggagggattccagaagaaggcagtgttatcataggagatgacagctctatgcgcgtattgcccctggagaccgtccagtgggacaagatgtagaggtggaagacagtgatattgatgatcccgaccctgtgtacacctaggctaatgtgtatttgtgtcctggtttttgacaagaaaaaattaaaaagtaaataaatttttaaaaattttaataggaaaaaagctt

SEQ ID NO: 463596 - DNA, 1495 bp, Homo sapiens
tgctgtcttcgtttgcttgatgttacaacgacaaaatctcagaatctgaatttctgtgtttggaatttgatgaggtcaaagtcaaccaaattctgaagacgctgtcagaggtagaagaaagtatcagcacactgatcagccagcctaactgaagatgatgtatgaaggagttggagttgttgaaaccaagtcctttccacgctacctgcagaggggtccatacggcgttgttctggattcccgtcgtaacttaaagggaaactttcacaatgtccggagcccttgatgtcctgcaaatgaaggaggaggatgtccttaagttccttgcagcaggaacccacttaggtggcaccaatcttgacttccagatggaacagtacatctataaaaggaaaagtgatggcatctatatcataaatctcaagaggacctgggagaagcttctgctggcagctcgtgcaattgttgccattgaaaaccctgctgatgtcagtgttatatcctccaggaatactggccagagggctgtgctgaagtttgctgctgccactggagccactccaattgctggccgcttcactcctggaaccttcactaaccagatccaggcagccttccgggagccacggcttcttgtggttactgaccccagggctgaccaccagcctctcacggaggcatcttatgttaacctacctaccattgcgctgtgtaacacagattctcctctgcgctatgtggacattgccatcccatgcaacaacaagggagctcactcagtgggtttgatgtggtggatgctggctcgggaagttctgcgcatgcgtggcaccatttcccgtgaacacccatgggaggtcatgcctgatctgtacttctacagagatcctgaagagattgaaaaagaagagcaggctgctgctgagaaggcagtgaccaaggaggaatttcagggtgaatggactgctcccgctcctgagttcactgttactcagcctgaggttgcagactggtctgaaggtgtacaggtgccctctgtgctattcagctattccctactgaagactggagcgctcagcctgccacggaagactggtctgcagctcccactgctcaggccactgaatgggtaggagcaaccactgactggtcttaagctgttcttgcataggctcttaagcaacatggaaaaatggttgatggaaaataaacatcagtttctaaaaaaaaaaaaagttaactgtaaaacaacctcaggcaggtccttcaggagggattccagaagaaggcagtgttatcataggagatgacagctctatgcgcgtattgcccctggagaccgtccagtgggacaagatgtagaggtggaagacagtgatattgatgatcccgaccctgtgtacacctaggctaatgtgtatttgtgtcctggtttttgacaagaaaaaattaaaaagtaaataaatttttaaaaattttaataggaaaaaagctt

SEQ ID NO: 463597 - DNA, 726 bp, Homo sapiens
cttcgcagagcatggcggcgggcgagcttgagggtggcaaacccctgagcgggctgctgaatgcgctggcccaggacactttccacgggtaccccggcatcacagaggagctgctacggagccagctatatccagaggtgccacccgaggagttccgcccctttctggcaaagatgagggggattcttaagtctattgcgtctgcagacatggatttcaaccagctggaggcattcttgactgctcaaaccaaaaagcaaggtgggatcacatctgaccaagctgctgtcatttccaaattctggaagagccacaagacaaaaatccgtgagagcctcatgaaccagagccgctggaatagcgggcttcggggcctgagctggagagttgatggcaagtctcagtcaaggcactcagctcaaatacacacacctgttgccattatagagctggaattaggcaaatatggacaggaatctgaatttctgtgtttggaatttgatgaggtcaaagtcaaccaaattctgaagacgctgtcagaggtagaagaaagtatcagcacactgatcagccagcctaactgaagatgatgtatgaaggagttggagttgttgaaaccaaggtgtccatgatccctccccactgaccttttctaagaaaattcttgtgcccgcattggtattaaatcctcgcattcagtcaaaccatctatagggatcctctcac

SEQ ID NO: 463598 - DNA, 265 bp, Homo sapiens
ttttcttttagtgatagggtatataaaaatacttaaggaatctgaatttctgtgtttggaatttgatgaggtcaaagtcaaccaaattctgaagacgctgtcagaggtagaagaaagtatcagcacactgatcagccagcctaactgaagatgatgtatgaaggagttggagttgttgaaaccaaggtgtccatgatccctccccactgaccttttctaagaaaattcttgtgcccgcattggtattaaatcctcgcattcagtc

SEQ ID NO: 463599 - DNA, 265 bp, Homo sapiens
tctgccattatgaaacccccaccaaaacaccttgaaggaatctgaatttctgtgtttggaatttgatgaggtcaaagtcaaccaaattctgaagacgctgtcagaggtagaagaaagtatcagcacactgatcagccagcctaactgaagatgatgtatgaaggagttggagttgttgaaaccaaggtgtccatgatccctccccactgaccttttctaagaaaattcttgtgcccgcattggtattaaatcctcgcattcagtc

SEQ ID NO: 463600 - DNA, 261 bp, Homo sapiens
agccggatctgttgtgaagactaaccactttaggaatctgaatttctgtgtttggaatttgatgaggtcaaagtcaaccaaattctgaagacgctgtcagaggtagaagaaagtatcagcacactgatcagccagcctaactgaagatgatgtatgaaggagttggagttgttgaaaccaaggtgtccatgatccctccccactgaccttttctaagaaaattcttgtgcccgcattggtattaaatcctcgcattcagtc

SEQ ID NO: 463601 - DNA, 477 bp, Homo sapiens
  misc_feature (11)..(11): n is a, c, g, or t
  misc_feature (33)..(33): n is a, c, g, or t
atgaaaagatntgatgtgtagcaaatacttacngatttgaatagcaggaatggtgtctcactatattgcccaggctggtcatctacttctaggctcaagcgatcttcctgcctcagcctccaaagtgttgggattacaggcatgagccaccacacccagctgaagggcagacactattatttaaagctgaatccccattgtctacaactatgcctggcaggaatctgaatttctgtgtttggaatttgatgaggtcaaagtcaaccaaattctgaagacgctgtcagaggtagaagaaagtatcagcacactgatcagccagcctaactgaagatgatgtatgaaggagttggagttgttgaaaccaaggtgtccatgatccctccccactgaccttttctaagaaaattcttgtgcccgcattggtattaaatcctcgcattcagtcaaaaaaaaaaatcggtctcattggcctca

SEQ ID NO: 463602 - DNA, 236 bp, Homo sapiens
  misc_feature (23)..(24): n is a, c, g, or t
gtcctgtgggtaacaacccctgnngcctggaatgggaaaacgtcaaagtcaaccaaattctgaagacgctgtcagaggtagaagaaagtatcagcacactgatcagccagcctaactgaagatgatgtatgaaggagttggagttgttgaaaccaaggtgtccatgatccctccccactgaccttttctaagaaaattcttgtgcccgcattggtattaaatcctcgcattcagtc

SEQ ID NO: 463603 - DNA, 2187 bp, Homo sapiens
gggcacatgttctcaggacctcctgaggctgcagcatgggccacggtccttaaccttggcaaagtaaacgtcttaatcaattgagacctgtctcagatgctttttggtttacactatcaatgagtgggtttttaggttgtcttcaattttccattgcaaataatgctgctgtgaacatccttgaacatgcatccctgtttacatgtacaaatatatcttagaaaacaggaatactgtatcatgggttatgtgctttttctttctttctttcttttttttattgtagacactgtcaaatagactttagagtactaataaatgtttaacaaccagtcttccaaaaagaggaagtggggctgatttgtagcatttgccaatttccatggtgtgaattcttccaccatggccgatttcaaactactaatgagacatgaatgcacaatcagctctgttagctggtatgaagtggctccagcatagttctcagaatctctcaaactcagaatgcatataaatattggcaaatagccctctaaagtagcccaaccaatgtatactttcacaagcagtgtatgagaatatctacagtcatgctccgcgtaacgatgtttcagtcaatgacagatgacatgtgtgacaatggtcccataagattataatggagctgaaaaattcccatcactagtgtcatagcacattatttatgtgtttgtggtgatgctggtataaataaactactgcactgccagtcatataaaaatataacacaattatgtgcaatacataatacttgataataagtgtgttactggtttatgtacttactatactgtgctttttatcttttaagtatactctctacttattaaaaaaaaaaaaaagtcctttccacgctacctgcagaggggtccatacggcgttgttctggattcccgtcgtaacttaaagggaaactttcacaatgtccggagcccttgatgtcctgcaaatgaaggaggaggatgtccttaagttccttgcagcaggaacccacttaggtggcaccaatcttgacttccagatggaacagtacatctataaaaggaaaagtgatggcatctatatcataaatctcaagaggacctgggagaagcttctgctggcagctcgtgcaattgttgccattgaaaaccctgctgatgtcagtgttatatcctccaggaatactggccagagggctgtgctgaagtttgctgctgccactggagccactccaattgctggccgcttcactcctggaaccttcactaaccagatccaggcagccttccgggagccacggcttcttgtggttactgaccccagggctgaccaccagcctctcacggaggcatcttatgttaacctacctaccattgcgctgtgtaacacagattctcctctgcgctatgtggacattgccatcccatgcaacaacaagggagctcactcagtgggtttgatgtggtggatgctggctcgggaagttctgcgcatgcgtggcaccatttcccgtgaacacccatgggaggtcatgcctgatctgtacttctacagagatcctgaagagattgaaaaagaagagcaggctgctgctgagaaggcagtgaccaaggaggaatttcagggtgaatggactgctcccgctcctgagttcactgttactcagcctgaggttgcagactggtctgaaggtgtacaggtgccctctgtgctattcagctattccctactgaagactggagcgctcagcctgccacggaagactggtctgcagctcccactgctcaggccactgaatgggtaggagcaaccactgactggtcttaagctgttcttgcataggctcttaagcaacatggaaaaatggttgatggaaaataaacatcagtttctaaaaaaaaaaaaagttaactgtaaaacaacctcaggcaggtccttcaggagggattccagaagaaggcagtgttatcataggagatgacagctctatgcgcgtattgcccctggagaccgtccagtgggacaagatgtagaggtggaagacagtgatattgatgatcccgaccctgtgtacacctaggctaatgtgtatttgtgtcctggtttttgacaagaaaaaattaaaaagtaaataaatttttaaaaattttaataggaaaaaagctt

SEQ ID NO: 463604 - DNA, 647 bp, Homo sapiens
cttcgcagagcatggcggcgggcgagcttgagggtggcaaacccctgagcgggctgctgaatgcgctggcccaggacactttccacgggtaccccggcatcacagaggagctgctacggagccagctatatccagaggtgccacccgaggagttccgcccctttctggcaaagatgagggggattcttaagtctattgcgtctgcagacatggatttcaaccagctggaggcattcttgactgctcaaaccaaaaagcaaggtgggatcacatctgaccaagctgctgtcatttccaaattctggaagagccacaagacactgagctggagagttgatggcaagtctcagtcaaggcactcagctcaaatacacacacctgttgccattatagagctggaattaggcaaatatggacaggaatctgaatttctgtgtttggaatttgatgaggtcaaagtcaaccaaattctgaagacgctgtcagaggtagaagaaagtatcagcacactgatcagccagcctaactgaagatgatgtatgaaggagttggagttgttgaaaccaaggtgtccatgatccctccccactgaccttttctaagaaaattcttgtgcccgcattggtattaaatcctcgcattcagtc

SEQ ID NO: 463605 - DNA, 448 bp, Homo sapiens
  misc_feature (11)..(11): n is a, c, g, or t
  misc_feature (33)..(33): n is a, c, g, or t
atgaaaagatntgatgtgtagcaaatacttacngatttgaatagcaggaatggtgtctcactatattgcccaggctggtcatctacttctaggctcaagcgatcttcctgcctcagcctccaaagtgttgggattacaggcatgagccaccacacccagctgaagggcagacactattatttaaagctgaatccccattgtctacaactatgcctggcaggaatctgaatttctgtgtttggaatttgatgaggtcaaagtcaaccaaattctgaagacgctgtcagaggtagaagaaagtatcagcacactgatcagccagcctaactgaagatgatgtatgaaggagttggagttgttgaaaccaaggtgtccatgatccctccccactgaccttttctaagaaaattcttgtgcccgcattggtattaaatcctcgcattcagtc

SEQ ID NO: 463606 - DNA, 730 bp, Homo sapiens
cttcgcagagcatggcggcgggcgagcttgagggtggcaaacccctgagcgggctgctgaatgcgctggcccaggacactttccacgggtaccccggcatcacagaggagctgctacggagccagctatatccagaggtgccacccgaggagttccgcccctttctggcaaagatgagggggattcttaagtctattgcgtctgcagacatggatttcaaccagctggaggcattcttgactgctcaaaccaaaaagcaaggtgggatcacatctgaccaagctgctgtcatttccaaattctggaagagccacaagacaaaaatccgtgagagcctcatgaaccagagccgctggaatagcgggcttcggggcctgagctggagagttgatggcaagtctcagtcaaggcactcagctcaaatacacacacctgttgccattatagagctggaattaggcaaatatggacaggaatctgaatttctgtgtttggaatttgatgaggtcaaagtcaaccaaattctgaagacgctgtcagaggtagaagaaagtatcagcacactgatcagccagcctaactgaagatgatgtatgaaggagttggagttgttgaaaccaaggtgtccatgatccctccccactgaccttttctaagaaaattcttgtgcccgcattggtattaaatcctcgcattcagtcaaaaaaaaaaatcggtctcattggcctca

SEQ ID NO: 463607 - DNA, 216 bp, Homo sapiens
actatattgcccaggctggtcatctacttctaggctcaagcgatcttcctgcctcagcctccaaagtgttgggattacaggcatgagccaccacacccagctgaagggcagacactattatttaaagctgaatccccattgtctacaactatgcctggcaggtataagacactgaattagttttttatgcctaattcactgacttacagttctgtg

SEQ ID NO: 463608 - DNA, 701 bp, Homo sapiens
cttcgcagagcatggcggcgggcgagcttgagggtggcaaacccctgagcgggctgctgaatgcgctggcccaggacactttccacgggtaccccggcatcacagaggagctgctacggagccagctatatccagaggtgccacccgaggagttccgcccctttctggcaaagatgagggggattcttaagtctattgcgtctgcagacatggatttcaaccagctggaggcattcttgactgctcaaaccaaaaagcaaggtgggatcacatctgaccaagctgctgtcatttccaaattctggaagagccacaagacaaaaatccgtgagagcctcatgaaccagagccgctggaatagcgggcttcggggcctgagctggagagttgatggcaagtctcagtcaaggcactcagctcaaatacacacacctgttgccattatagagctggaattaggcaaatatggacaggaatctgaatttctgtgtttggaatttgatgaggtcaaagtcaaccaaattctgaagacgctgtcagaggtagaagaaagtatcagcacactgatcagccagcctaactgaagatgatgtatgaaggagttggagttgttgaaaccaaggtgtccatgatccctccccactgaccttttctaagaaaattcttgtgcccgcattggtattaaatcctcgcattcagtc

SEQ ID NO: 463609 - DNA, 735 bp, Homo sapiens
cttcgcagagcatggcggcgggcgagcttgagggtggcaaacccctgagcgggctgctgaatgcgctggcccaggacactttccacgggtaccccggcatcacagaggagctgctacggagccagctatatccagaggtgccacccgaggagttccgcccctttctggcaaagatgagggggattcttaagtctattgcgtctgcagacatggatttcaaccagctggaggcattcttgactgctcaaaccaaaaagcaaggtgggatcacatctgaccaagctgctgtcatttccaaattctggaagagccacaagacaaaaatccgtgagagcctcatgaaccagagccgctggaatagcgggcttcggggcctgagctggagagttgatggcaagtctcagtcaaggcactcagctcaaatacacacacctgttgccattatagagctggaattaggcaaatatggacaggaatctgaatttctgtgtttggaatttgatgaggtcaaagtcaaccaaattctgaagacgctgtcagaggtagaagaaagtatcagcacactgatcagccagcctaactgaagatgatgtatgaaggagttggagttgttgaaaccaaggtgtccatgatccctccccactgaccttttctaagaaaattcttgtgcccgcattggtattaaatcctcgcattcagtcaaaaaaaaggggggggatggcctcgttggcctca

SEQ ID NO: 463610 - DNA, 1906 bp, Homo sapiens
cttcgcagagcatggcggcgggcgagcttgagggtggcaaacccctgagcgggctgctgaatgcgctggcccaggacactttccacgggtaccccggcatcacagaggagctgctacggagccagctatatccagaggtgccacccgaggagttccgcccctttctggcaaagatgagggggattcttaagtctattgcgtctgcagacatggatttcaaccagctggaggcattcttgactgctcaaaccaaaaagcaaggtgggatcacatctgaccaagctgctgtcatttccaaattctggaagagccacaagacaaaaatccgtgagagcctcatgaaccagagccgctggaatagcgggcttcggggcctgagctggagagttgatggcaagtctcagtcaaggcactcagctcaaatacacacacctgttgccattatagagctggaattaggcaaatatggacaggaatctgaatttctgtgtttggaatttgatgaggtcaaagtcaaccaaattctgaagacgctgtcagaggtagaagaaagtatcagcacactgatcagccagcctaactgaagatgatgtatgaaggagttggagttgttgaaaccaagaggggtccatacggcgttgttctggattcccgtcgtaacttaaagggaaactttcacaatgtccggagcccttgatgtcctgcaaatgaaggaggaggatgtccttaagttccttgcagcaggaacccacttaggtggcaccaatcttgacttccagatggaacagtacatctataaaaggaaaagtgatggcatctatatcataaatctcaagaggacctgggagaagcttctgctggcagctcgtgcaattgttgccattgaaaaccctgctgatgtcagtgttatatcctccaggaatactggccagagggctgtgctgaagtttgctgctgccactggagccactccaattgctggccgcttcactcctggaaccttcactaaccagatccaggcagccttccgggagccacggcttcttgtggttactgaccccagggctgaccaccagcctctcacggaggcatcttatgttaacctacctaccattgcgctgtgtaacacagattctcctctgcgctatgtggacattgccatcccatgcaacaacaagggagctcactcagtgggtttgatgtggtggatgctggctcgggaagttctgcgcatgcgtggcaccatttcccgtgaacacccatgggaggtcatgcctgatctgtacttctacagagatcctgaagagattgaaaaagaagagcaggctgctgctgagaaggcagtgaccaaggaggaatttcagggtgaatggactgctcccgctcctgagttcactgttactcagcctgaggttgcagactggtctgaaggtgtacaggtgccctctgtgctattcagctattccctactgaagactggagcgctcagcctgccacggaagactggtctgcagctcccactgctcaggccactgaatgggtaggagcaaccactgactggtcttaagctgttcttgcataggctcttaagcaacatggaaaaatggttgatggaaaataaacatcagtttctaaaaaaaaaaaaagttaactgtaaaacaacctcaggcaggtccttcaggagggattccagaagaaggcagtgttatcataggagatgacagctctatgcgcgtattgcccctggagaccgtccagtgggacaagatgtagaggtggaagacagtgatattgatgatcccgaccctgtgtacacctaggctaatgtgtatttgtgtcctggtttttgacaagaaaaaattaaaaagtaaataaatttttaaaaattttaataggaaaaaagctt

SEQ ID NO: 463611 - DNA, 1043 bp, Homo sapiens
cttcgcagagcatggcggcgggcgagcttgagggtggcaaacccctgagcgggctgctgaatgcgctggcccaggacactttccacgggtaccccggcatcacagaggagctgctacggagccagctatatccagaggtgccacccgaggagttccgcccctttctggcaaagatgagggggattcttaagtctattgcgtctgcagacatggatttcaaccagctggaggcattcttgactgctcaaaccaaaaagcaaggtgggatcacatctgaccaagctgctgtcatttccaaattctggaagagccacaagacaaaaatccgtgagagcctcatgaaccagagccgctggaatagcgggcttcggggcctgagctggagagttgatggcaagtctcagtcaaggcactcagctcaaatacacacacctgttgccattatagagctggaattaggcaaatatggacaggaatctgaatttctgtgtttggaatttgatgaggtcaaagtcaaccaaattctgaagacgctgtcagaggtagaagaaagtatcagcacactgatcagccagcctaactgaagatgatgtatgaaggagttggagttgttgaaaccaaggtgtccatgatccctccccactgaccttttctaagaaaattcttgtgcccgcattggtattaaatcctcgcattcagtcttcctgcctctacttgctcagatttctttttttctagctttcatttagtcttacatttgttccagtgcagaggttctcacccttcagtgtgcataaatgttataaggggtacttgtaaaagcattcacttttttgttgttattattaaattcggagtgttgctctgttgcccaggctggagtgcagtggtgcagtcatggctcactgcagcctcaagctcctggactcaagcgagcctcccacctcagctactcaggaggctgagatgggaggattacttgagcccaggagttcaagaccatcctgggcatgatggtgagacctcatctcaatttaaagaaa

SEQ ID NO: 463612 - DNA, 1609 bp, Homo sapiens
cttcgcagagcatggcggcgggcgagcttgagggtggcaaacccctgagcgggctgctgaatgcgctggcccaggacactttccacgggtaccccggcatcacagaggagctgctacggagccagctatatccagaggtgccacccgaggagttccgcccctttctggcaaagatgagggggattcttaagtctattgcgtctgcagacatggatttcaaccagctggaggcattcttgactgctcaaaccaaaaagcaaggtgggatcacatctgaccaagctgctgtcatttccaaattctggaagagccacaagacaaaaatccgtgagagcctcatgaaccagagccgctggaatagcgggcttcggggcctgagctggagagttgatggcaagtctcagtcaaggcactcagctcaaatacacacacctgttgccattatagagctggaattaggcaaatatggacaggaatctgaatttctgtgtttggaatttgatgaggtcaaagtcaaccaaattctgaagacgctgtcagaggtagaagaaagtatcagcacactgatcagccagcctaactgaagatgatgtatgaaggagttggagttgttgaaaccaaggaatactggccagagggctgtgctgaagtttgctgctgccactggagccactccaattgctggccgcttcactcctggaaccttcactaaccagatccaggcagccttccgggagccacggcttcttgtggttactgaccccagggctgaccaccagcctctcacggaggcatcttatgttaacctacctaccattgcgctgtgtaacacagattctcctctgcgctatgtggacattgccatcccatgcaacaacaagggagctcactcagtgggtttgatgtggtggatgctggctcgggaagttctgcgcatgcgtggcaccatttcccgtgaacacccatgggaggtcatgcctgatctgtacttctacagagatcctgaagagattgaaaaagaagagcaggctgctgctgagaaggcagtgaccaaggaggaatttcagggtgaatggactgctcccgctcctgagttcactgttactcagcctgaggttgcagactggtctgaaggtgtacaggtgccctctgtgctattcagctattccctactgaagactggagcgctcagcctgccacggaagactggtctgcagctcccactgctcaggccactgaatgggtaggagcaaccactgactggtcttaagctgttcttgcataggctcttaagcaacatggaaaaatggttgatggaaaataaacatcagtttctaaaaaaaaaaaaagttaactgtaaaacaacctcaggcaggtccttcaggagggattccagaagaaggcagtgttatcataggagatgacagctctatgcgcgtattgcccctggagaccgtccagtgggacaagatgtagaggtggaagacagtgatattgatgatcccgaccctgtgtacacctaggctaatgtgtatttgtgtcctggtttttgacaagaaaaaattaaaaagtaaataaatttttaaaaattttaataggaaaaaagctt

SEQ ID NO: 463613 - DNA, 1435 bp, Homo sapiens
  misc_feature (1)..(2): n is a, c, g, or t
  misc_feature (5)..(5): n is a, c, g, or t
  misc_feature (8)..(8): n is a, c, g, or t
  misc_feature (10)..(12): n is a, c, g, or t
  misc_feature (14)..(15): n is a, c, g, or t
  misc_feature (17)..(17): n is a, c, g, or t
nntcntcnannntnntntgcaatatgaagaaaaggcatacgctgagagtgaagattggcgggggaggtcctggatgtctgaggactggtataaaatagtcatccaggagagacaccaggcagtaatttcttcactctacagacctgtgggaggtcaatgtatcctggtatcaggatcaagaaaaatgacctatcatgaagaccttctttccaacaaagattgtggaggagagatgaatggagaaggagctgggaagggcctggtcatcaaaggtcctcctctcctcccccagcatctgggaaggagtgagatgtggctgcaggattggggaatagctaagtcagaaatgagcagcagtgcaactgtggcaatcttggaggggggtctcagccatgaaagagaaccagggggtgccttgccagctggaggctgcagaatcttagcttgggtgttttgccttctccgtggaactgacagatgacaggaatgacgtggagtattctcatcaagcctcctttctccattcatacttcctgtctcttcattgaggaataaaacatcctggtttaagctcagaacataggaatgaaaatagggaagaaaatatgtgaacaatgcacagtgttctctccaaaatggcaagaacgtcatctcctagaaaagcactcagaagtccttggcctttgggaaaaaagagcttgcggaagatgacattggttcattgtccttaaaaggcagaacaggcctcccactattgaaaacagctcattcccttccacacctggtcctcagatcatgcttgggtgcccaggctcctgtgcttaatctttcttaactggatcatcagtgcttgggaaatgggcaggataacaatttaaagagataattgactgcacaaatcagctcatcccttcaagggataaattttctcacactttctggttctgtaataggtcagggctgttggagacagagctggctttttccctgatgtccagggtcctgaaatgaagtatggctgggccacttgactgggagtgcagttacagaagccaatgctggtgctgcagagagcgcaatgcccaaagtgggtgcatctctgatggtgtaaaggatgaagaacaagctctgaggaaggttagcaggaagctcgattcaagtcaccagcagaaaacagagttgccttcatgtctttactctcaaggttctgcagcttgccatagcggaaacctgaatcttgttaaatggagatgggcaatacaggcaatggatccttcaggtctccttcttccaagcaaatgtagccctgggaacactttcattgaaaagaaagaagagacaaagtgactggtgactggtgatacaaaatcagaatagggatattggtattttatcttccaatatgtcttctggacttcttggtgatactactaat

SEQ ID NO: 463614 - DNA, 686 bp, Homo sapiens
aaaacagctcattcccttccacacctggtcctcagatcatgcttgggtgcccaggctcctgtgcttaatctttcttaactggatcatcagtgcttgggaaatgggcaggataacaatttaaagagataattgactgcacaaatcagctcatcccttcaagggataaattttctcacactttctggttctgtaataggtcagggctgttggagacagagctggctttttccctgatgtccagggtcctgaaatgaagtatggctgggccacttgactgggagtgcagttacagaagccaatgctggtgctgcagagagcgcaatgcccaaagtgggtgcatctctgatggtgtaaaggatgaagaacaagctctgaggaaggttaggtaagttcctggctttcagtctgtcccctccacctgccaagtgagcaagtctgttcctcttgccaagtgagctgctgtttttctcgttggttaaatgggatgttggataaatcatctctactagtctgacagttttttatatttaaagattttataaattatacaaaggttctgtagatgaaaagcaacaccagattccaggaattgcttaaaggtgaggtaggccaaagcgatagaagcaggagttctttgtaaaggaagggagcagcacacttcatgggcaggtcaagaggtcacctgg

SEQ ID NO: 463615 - DNA, 1410 bp, Homo sapiens
  misc_feature (1)..(2): n is a, c, g, or t
  misc_feature (5)..(5): n is a, c, g, or t
  misc_feature (8)..(8): n is a, c, g, or t
  misc_feature (10)..(12): n is a, c, g, or t
  misc_feature (14)..(15): n is a, c, g, or t
  misc_feature (17)..(17): n is a, c, g, or t
nntcntcnannntnntntgcaatatgaagaaaaggcatacgctgagagtgaagattggcgggggaggtcctggatgtctgaggactggtataaaatagtcatccaggagagacaccaggcagtaatttcttcactctacagacctgtgggaggtcaatgtatcctggtatcaggatcaagaaaaatgacctatcatgaagaccttctttccaacaaagattgtggaggagagatgaatggagaaggagctgggaagggcctggtcatcaaaggtcctcctctcctcccccagcatctgggaaggagtgagatgtggctgcaggattggggaatagctaagtcagaaatgagcagcagtgcaactgtggcaatcttggaggggggtctcagccatgaaagagaaccagggggtgccttgccagctggaggctgcagaatcttagcttgggtgttttgccttctccgtggaactgacagatgacaggaatgacgtggagtattctcatcaagcctcctttctccattcatacttcctgtctcttcattgaggaataaaacatcctggtttaagctcagaacataggaatgaaaatagggaagaaaatatgtgaacaatgcacagtgttctctccaaaatggcaagaacgtcatctcctagaaaagcactcagaagtccttggcctttgggaaaaaagagcttgcggaagatgacattggttcattgtccttaaaaggcagaacaggcctcccactattgaaaacagctcattcccttccacacctggtcctcagatcatgcttgggtgcccaggctcctgtgcttaatctttcttaactggatcatcagtgcttgggaaatgggcaggataacaatttaaagagataattgactgcacaaatcagctcatcccttcaagggataaattttctcacactttctggttctgtaataggtcagggctgttggagacagagctggctttttccctgatgtccagggtcctgaaatgaagtatggctgggccacttgactgggagtgcagttacagaagccaatgctggtgctgcagagagcgcaatgcccaaagtgggtgcatctctgatggtgtaaaggatgaagaacaagctctgaggaaggttagcaggaagctcgattcaagtcaccagcagaaaacagagttgccttcatgtctttactctcaaggttctgcagcttgccatagcggaaacctgaatcttgttaaatggagatgggcaatacaggcaatggatccttcaggtctccttcttccaagcaaatgtagccctgggaacactttcattgaaaagaaagaagagacaaagtgactggtgactggtgatacaaaatcagaataggatacacgtcgcgagggatcctcaggcgccgcc

SEQ ID NO: 463616 - DNA, 593 bp, Homo sapiens
aatctctctatactcttctatataatggggctagcctggaagagatacttgcacaaccatgttcagagcagcatcatccacaataaccaaaaggtggaagcaacccaagtgtccgtggatggatggacggatcaacaaaatgctgtctatgcatacagtggaataagtgcagtgaatagaagacacttctctgcaccccaaaagctccatgctgattgtgagaaggaaatgctggatggaggggttcctggaactactgtgagggtttcttttgatttctcctgcttagaaatggtgagagaactttggatgtggaacgtggaggaggaggaacacgaagtggggatctccacttggggtggtcagcactgcgggtgcccagcaaagtcactgcctggtccacatcccggaggggtctctgcgcctcagtcggcatcgcagctgatggtgaaacttttggtgtggcagaagagtgtccacaaacttcggaagatcgctgctcagagtgaggaatggagttgtgttttgaataaaatatccacgcatccttttgtgagcaaggagcatgatggtacttagacctaccatttctc

SEQ ID NO: 463617 - DNA, 696 bp, Homo sapiens
aggtgatagaatccaccctgcctctgacagcatccaatctggagcaaaggcttatttcaaccctcccccaagctcccaatacaagcccaaattctggaacaggtcctttccaacacctccttcagagaagctccctggctccaggcagtgcttgctcccctcactgcagcaggaagcctaacttgcgaactgcaggtgtgttccaggtggtcactggatgcaaggcattgacagatggatcccatcgatacccccactgcaaaaccatagtgcagtgaatagaagacacttctctgcaccccaaaagctccatgctgattgtgagaaggaaatgctggatggaggggttcctggaactactgtgagggtttcttttgatttctcctgcttagaaatggtgagagaactttggatgtggaacgtggaggaggaggaacacgaagtggggatctccacttggggtggtcagcactgcgggtgcccagcaaagtcactgcctggtccacatcccggaggggtctctgcgcctcagtcggcatcgcagctgatggtgaaacttttggtgtggcagaagagtgtccacaaacttcggaagatcgctgctcagagtgaggaatggagttgtgttttgaataaaatatccacgcatccttttgtgagcaaggagcatgatggtacttagacctaccatttctc

SEQ ID NO: 463618 - DNA, 476 bp, Homo sapiens
aggtgatagaatccaccctgcctctgacagcatccaatctggagcaaaggcttatttcaaccctcccccaagctcccaatacaagcccaaattctggaacaggtcctttccaacacctccttcagagaagctccctggctccaggcagtgcttgctcccctcactgcagcaggaagcctaacttgcgaactgcaggtgtgttccaggtggtcactggatgcaaggcattgacagatggatcccatcgatacccccactgcaaaaccatagtgcagtgaatagaagacacttctctgcaccccaaaagctccatgctgattgtgagaaggaaatgctggatggaggggttcctggaactactgtgagggatgatactccaaattgatacttaatatacagaaatgactatcatggacataacccacaacatgtgaaatgtatggctcattctactgacattatacaggaaagttaat

SEQ ID NO: 463619 - DNA, 875 bp, Homo sapiens
ccagtggtttgcaaccttggctacatattagaacaacctgggaagctttcaaaactcccgatgccacagtggggcacccctggccagggctacagacagaaggcctacttggctggactggtcctggtgatccaaaatagcctggagaggtctggttcctttagttctaatggaccatgtccagccaaggaggtgtctaacaaggaagaaacacatcaaggcttcagggtctatggggagaaagcccagcacgtagaaaaattacagaacatcagcagcaggactctggaagcactggtaacagtttgtcacttgatctggatgaacaccagcgtgttccgttttggaaatcctttcagctgtacttaccctaagttttcaaaagcctcttggtttccagctttggtcaacagcgctcagaatgaaaggaaggtggtggtgctggctttcaagtctcctccaaatgcaactgacccaggtctgcctgtcctccattagcttttgctcgttggagagggataacacaccgctaagaaaaagacttgttctgagagtgaggactgcccccggattttgtaaccagttgcaaccacctgaaagcagctctggggaagaggtcattgaagagtctttccaggtggaaagcgaagtaaatgaactctggggtggtgtctcccaactctcacttccagctctcctgtgtttgtagactctgtgttcctaaacaagggaaaatacagccacaacctccaaaggacaagtgcttattcattcctttaatttatctttattgaggatgttccatgtacagtggaagaaaaattgaaagtgaataaaggaagctgaagatgtttaaagatatagttgagaaatct

SEQ ID NO: 463620 - DNA, 2432 bp, Homo sapiens
gtcacccaagcgactgggagccgcgtcctgctctgggactgagccgttggagctgccccgctgaccgcactaggctgaccgcaaccggctgaccacacacagtcctcactcccctggccctggtgggcggcaggcaccatggcgcagacagtgccgccctgcgagctgccctgcaaagagtacgacgtggcccgtaacacgggcgcctacacgtcctccggcctggccaccgccagcttccgcacctccaagtacctgctggaggagtggttccagaactgctatgctcgctaccaccaggccttcgccgaccgcgaccagtcggagcggcagcggcacgagagccagcagctggccacagagacccaggcgctggcgcagcgcacgcagcaagactccacgcgcacagtgggcgagcgactgcaggacacgcacagctggaagtcggagctgcagcgtgagatggaggcgctggctgcggagaccaacttggctccttgggccccaggaagccaacgggcttgggagccgcggccccttggaacgccacagaaggtgcccttctccatcaccactgacaaccgcatgccgtgagcgccggagcaccaactctggcgacatgtgaactgctgaaggaagccgagctcatccggaacattcaggagctgctgaagagaaccatcatgcaagcagtgagccagatccgactgaaccgggagcacaaggagacctgcgagatggactggtcagacaagatggaggcctacaacatcgacgagacctgcgggcgccaccacagccagagcaccgaggtgcaggctcatccgtactccaccaccttccaagagaggccagcagagggagcctgaccaccgcccactagagggcggcaaactcctgggagcaaaaagagggcgcgggcgctgggtactagggaaggggggctgcgggggccggaggtgctgcagagggggcctccggggcagcggtgctgggaacggggtcgcgggggcacgaggggactaagtgcccggggtgggtagggtgtggggggactcagagaagttgtggccagggggcactcgggggcagggagcctgagggactgggctttgtggggcagcatggggtgcatcggagtccatgcacgtcctccaggagcatggggcgcggacagggcatgggggcgcagcagggctcccagccttcggcagagcctccccgaccctctcctggctgtcccccgccccgcagcgcctccaccccggagacccgggccaagttcacgcaggacaatctgtgccgtgcccagcgcgagcgcctggcctcggccaacctgcgggtgctggtggactgcatccttcgcgacacctccgaggacctgcggctccagtgcgacgccgtgaacctggccttcgggcgccgctgtgaggagctggaggacgcgcggtacaagctgcatcaccacctgcacaaggctgttgagtgaggtggaggagctgaacatgtccctcacagcactgcgagagaagcttctagaagcggagcagtccctgcgcaacctcgaggacatccacatgagcctggagaaggacattgccgccatgaccaacagtctcttcatcgaccgccagaagtgcatggcccatcgtactcgctaccccaccatcctgcagctggctggctaccagtgagcagcggcacggtgcttccccccagtcccccaaataaacagcgcgttagctttcaaaaaaaaacaaaaacaacaaaaacaacacaaacaaataaaaaaaagacaaaacaaaaaaagaaaaaaaaggcgggcggcgcgcgcgcccaaaaagaataaccccctcgcagaggggggccacgacaagcgttctaagcgcgggctgccgccccgacggcttttcatcgtagcagcagaagcgggcggcgccccatgtaggcagaggagcgcgtcgtatatccatataggcccacagcgagcgccaccggccgcgcgcggcgcgcgcttatcagaaaacgaccccgctcggacagacgagagcgtgggagaacacaccgcgcgcccgaccaccgacgaggggagagaccacctctggcggggagagacggggcgacccccacctctctactctctgcggggggggggcggggcgacacccatactcagtgggggggagcccaccacaccaccccccacacaccgcaacacacatacttatacaagacgcggccccccgacaagcgggcggccaacaaatctattacacacacctctctcccaacgcagcgggtgcataaatacgcggggtggcgtgcacacacacccacgaccgcgccgcgcagaaacaaagccagtcccgcgtcgcccgcccgcccgccacagaagaaacaacttcctgcgccgcccaaacacccaggcaatc

SEQ ID NO: 463621 - DNA, 413 bp, Homo sapiens
ccctgagactcagagccagcaggggctgccccaggtcacagtggagcgcaggactgggtgggggaggttccggcgcagcctgaggttgagtggccagagcccagtgccacatctgatctgcagcctcccagcctgggccgcagctcctggtcactgctgagcacgagggctgcccgggacaggcccacccagaactccctcctgaggcaggcattggggcccagcctgcagcacagagggtccccagcagggccctccctgggcacacatcaaggccctgccccaccccgccccagactgaaccgggagcacaaggagacctgcgagatggactggtcagacaagatggaggcctacaacatcgacgagacctgcgggcgccaccacagccagagcaccgaggtgcaggctca

SEQ ID NO: 463622 - DNA, 2587 bp, Homo sapiens
gtcacccaagcgactgggagccgcgtcctgctctgggactgagccgttggagctgccccgctgaccgcactaggctgaccgcaaccggctgaccacacacagtcctcactcccctggccctggtgggcggcaggcaccatggcgcagacagtgccgccctgcgagctgccctgcaaagagtacgacgtggcccgtaacacgggcgcctacacgtcctccggcctggccaccgccagcttccgcacctccaagtacctgctggaggagtggttccagaactgctatgctcgctaccaccaggccttcgccgaccgcgaccagtcggagcggcagcggcacgagagccagcagctggccacagagacccaggcgctggcgcagcgcacgcagcaagactccacgcgcacagtgggcgagcgactgcaggacacgcacagctggaagtcggagctgcagcgtgagatggaggcgctggctgcggagaccaacttggctccttgggccccaggaagccaacgggcttgggagccgcggccccttggaacgccacagaaggtgcccttctccatcaccactgacaaccgcatgccgtgagcgccggagcaccaactctggcgacatgtgaactgctgaaggaagccgagctcatccggaacattcaggagctgctgaagagaaccatcatgcaagcagtgagccagatccgactgaaccgggagcacaaggagacctgcgagatggactggtcagacaagatggaggcctacaacatcgacgagacctgcgggcgccaccacagccagagcaccgaggtgcaggctcatccgtactccaccaccttccaagagaggccagcagagggagcctgaccaccgcccactagagggcggcaaactcctgggagcaaaaagagggcgcgggcgctgggtactagggaaggggggctgcgggggccggaggtgctgcagagggggcctccggggcagcggtgctgggaacggggtcgcgggggcacgaggggactaagtgcccggggtgggtagggtgtggggggactcagagaagttgtggccagggggcactcgggggcagggagcctgagggactgggctttgtggggcagcatggggtgcatcggagtccatgcacgtcctccaggagcatggggcgcggacagggcatgggggcgcagcagggctcccagccttcggcagagcctccccgaccctctcctggctgtcccccgccccgcagcgcctccaccccggagacccgggccaagttcacgcaggacaatctgtgccgtgcccagcgcgagcgcctggcctcggccaacctgcgggtgctggtggactgcatccttcgcgacacctccgaggacctgcggctccagtgcgacgccgtgaacctggccttcgggcgccgctgtgaggagctggaggacgcgcggtacaagctgcatcaccacctgcacaagacactgcgggaaatcacagatcaggaacacaacgtggcggcactgaagcaggccatcaaggacaaagaggcacctctgcacgtagcccagacccggctgtacctgcgctcgcaccggcccaacatggagctgtgccgtgacgcagcccagttcaggctgttgagtgaggtggaggagctgaacatgtccctcacagcactgcgagagaagcttctagaagcggagcagtccctgcgcaacctcgaggacatccacatgagcctggagaaggacattgccgccatgaccaacagtctcttcatcgaccgccagaagtgcatggcccatcgtactcgctaccccaccatcctgcagctggctggctaccagtgagcagcggcacggtgcttccccccagtcccccaaataaacagcgcgttagctttcaaaaaaaaacaaaaacaacaaaaacaacacaaacaaataaaaaaaagacaaaacaaaaaaagaaaaaaaaggcgggcggcgcgcgcgcccaaaaagaataaccccctcgcagaggggggccacgacaagcgttctaagcgcgggctgccgccccgacggcttttcatcgtagcagcagaagcgggcggcgccccatgtaggcagaggagcgcgtcgtatatccatataggcccacagcgagcgccaccggccgcgcgcggcgcgcgcttatcagaaaacgaccccgctcggacagacgagagcgtgggagaacacaccgcgcgcccgaccaccgacgaggggagagaccacctctggcggggagagacggggcgacccccacctctctactctctgcggggggggggcggggcgacacccatactcagtgggggggagcccaccacaccaccccccacacaccgcaacacacatacttatacaagacgcggccccccgacaagcgggcggccaacaaatctattacacacacctctctcccaacgcagcgggtgcataaatacgcggggtggcgtgcacacacacccacgaccgcgccgcgcagaaacaaagccagtcccgcgtcgcccgcccgcccgccacagaagaaacaacttcctgcgccgcccaaacacccaggcaatc

SEQ ID NO: 463623 - DNA, 414 bp, Homo sapiens
ctgctttcctgatggggttctttcatggagtcttcccaggacctcctgccagctcccattgggagttttgggtcccctacaccccggtaggtgcatacttctgccctccctagccccggctcacacccccccaacacccccaggctgttgagtgaggtggaggagctgaacatgtccctcacagcactgcgagagaagcttctagaagcggagcagtccctgcgcaacctcgaggacatccacatgagcctggagaaggacattgccgccatgaccaacagtctcttcatcgaccgccagaagtgcatggcccatcgtactcgctaccccaccatcctgcagctggctggctaccagtgagcagcggcacggtgcttccccccagtcccccaaataaacagcgcgttagctttc

SEQ ID NO: 463624 - DNA, 1123 bp, Homo sapiens
cccgcagcggacgctccccacgaggtagagccccgtttccacacctggagcagctgcacctggaggtggggctcatctccagacctggagcagctgcctgccccagggcagaagccactgcccgcagctagggagcattgaggaggtctccccaggtccgcgcgggttttctccaggtcctccagtttcctcccacatcccaagtatacacctcagcctcacggcatgtctacatgggcctagtccgagtgagtgtgggtgtcccatggaggcctgtcctatccagggcgggtgcccaccttggcactgagcctccaggatgggccctggtcacctgccactctgaactggagaaagcaagttggaaaatgaatgaatacatgaatataaattatcaaataaaaattataaagcctacggtaatcacacaaacgcatgacaacaaacgccgcgtgtgagggtgctcaaggagccgccatactcacggtcgcttgtctttcagctgtctccccaaagtgtctaaaaccaagctgtgctccgaccaccttgggcacatgttgtcaggacctcctgaggccatgtcacggcatttgtgactgtgtgaatggcagccttgtgagtgaacttagtcaggaagccctgctttctgttaatggcaggattcccccttccccccaaaaaatcatttatattcactcttattggagtgtaaaactcccttcacaaatcgtggaaagtaaatgtcagaaacattgcttttcaaaagactttcaggaaaggaatgtgtggagcagctgtgcagaaataacaaaatgttcgtttttcttccagaccagcttatctgcagtgaattcctggcactgatacaaaggattattaaaccatgcagaaaacatggctcgagttcccagtatatgttcccttgcatactagcatacaccgttcacaccagtggctttttccaaccacaactagctttggccagcatcatctcgtgcctttcctcctggacgcctgttgtgactctccgcaaccatcctgcctgtctagaaaggagcacaggtgaagctgcctgactcatcagctacacaaacttgttctgacttaggttttgttgtttttt

SEQ ID NO: 463625 - DNA, 7809 bp, Homo sapiens
ccaggattgttacaacattgaagatatggtttacaggcttctagggcatgtcttcccttcaactcacactgaaaatgaactaaaagagaaaaagtttccaccggatgatgaatttgtggaggcagcttcaaaattgactgatgaaattataaaagaaatttctgaacatgagattcgactttccatggcagaggataatgcagaaagtatgcagttagaacctattgaaaatttggtcgactccatatgtaataatattttgaaaacatctgaattccaagctgaagtacaaaaagatgcagacaaaaaaggatgctcattcctcagtaaattagctggttttattatgaaagaaatcatgtatcatcatttacagccatttttacatggtgaagaatcatctttcagtgacttatctgattatgaccatgtctctgaacttgctaaatctggtaaagaaaagacacagccttctctctattcagctacatttttggaagacataatcattgaccttgttcacaaattttgttctctcctcattattactgaagattctaagaaaaatgaaatggcagagctagatattatgggcttggctctaaaacttgcaaattctctgataagggaatttaagaaaagtgatattaaagttttaccaaatgctgaaaaaatgttttcttttccaccaattgataaagagacagttgataaaatatccaattttgtatatgaacagttcatagaaaaatgcacatctcatgatattcaaaaaggtgatgaaagtaacattgctatagggatgattgctgctctaacccagaaggcaatatctgcattcaggattcaaccacttttttcaggagactggtcttccaccttcttttcatttctaaatccagataatatcacccaaagggttcaacacctaccacaaaacacctttacacaaataagcagatgtgcaaaagagaaccaactttctttaccagatcaatcatataaagatacttcttccaccccagattgcaaaaacatgatgagcactttggaaataaatagaggtacaatgaatagaaagaaaagttttaaaaccaaggacacatcagtgaaaaaaggtgacatccaaaatccagtacttagctctataaatgcaattatgaaaagcggcatgattaacctaacatcagggttggctacaggtgtgacaaataaaaaggaagtggatgaaaataaagtgggaatttgtactcaaaaacatagtgagaatgtatcaaaagttacttcaactaccactgtgaaaagtaaagatactcaggagccaaatttgagtgaaacatttaataataatgaaattgagaagaaaagaaatttaattccaacagataaaaaagggaaagatgatgagatatacacacatttttcattaataattgatgatacagaatatgagaaggaagtacttggatcagattctgaaataggctataaaaagaagattgacaatgcaagggaaagctcatttaaaaaagatgacaagctctttcagttatcctccttgaagtccaagagaaatctagggactacaacagatactttggaaataagaattcgaacatcaagcaatgaggggagaagagactctccaacacaaacgtgtagggatgaggaacaccactcagattatgaacatgttcaaaatgtcattgaaaatatttttgaagatgttttagaactatcttcttctccagaaccagcatattattcgaaactcagttatgaccaaagccccccaggtgataatgtattaaatgtaattcaagagattagcagggattcggcacagtctgttacaacaaaaaaagtatcctcctcaactaacaaaaatatctctgccaaagaaaaagaagaggaagagagagaaaaagagaaagtaagagaggagattaaaagtgaacccagtaaaccagatgatcctcaaaaccaacgagaaagtaaacctggaatttttcccgctaagtttttagaagatgttattactgagatggttaaacaattgatcttttcttctataccagaaacacaaatacaagatagatgtcaaaatgttagtgataagcaaaatcaagccaaactctatgacactgctatgaaactcatcaattcactgttaaaggagttctcagatgctcaaattaaggttttcaggccagataagggaaatcagttccctgggggtaaagtgtcttcagttcctaaagtacctccaaggtataaagagccaactacagatgaagcaccatccagcattaagataaaatctgcagataaaatgccacctatgcataaaatgatgagaaaaccttcttcagataagataccatcaattgacaaaacattggtcaataaagttgttcactcctctgtttgtaatattttaaatgactatggatctcaagactctatttggaagaatataaacagtaatggagaaaatttagcaagaagactaactagtgcagtgataaatgaaattttccaacgtcaggttaacttgatattttgtgatgaggtttcagtttcagcatgtttgcctctggaatctaaggatgttgttaaaaaggtccaaaagttggcccaaacagccagcaaagaatgtcaaacttcatcaccatatacaataatattacctcataaatttttggagaatgtgatttctgctcttttctccaaaattttctcaacaatatccagcacaaaaacaaaagaacctgaggacaatttgtccacagaactgaatttccttcaaatgaagttagtaagtgcagttgcaacagagatctcccaagataaatatatgactatacagtatgtagaaaccttacaatctgatgatgatgaaattattcaattagtggttcagtctgtttataataatctcttgccacagtttggatcacaagagattatacaaaattgtgtaaccagtggatgcaaaatcctttcagaaaacatagttgacttggttctacgagaagtggctagcaatcagctgcagagctatttttgtggagagctaactccacatcagtgtgtggaagttgaaaacatcgttgaaaagatccttaaagatgttttccaaactactgatgtgcccctacctaaaccttcacatgctgataagctgtcttataacataatagaagaaattgctgtgaaatttttatcaaagcttttatctatatttccaaaagtacataaagaaagaacaaaatctctagagactgatatgcaaaaaataacttcaaaagtactaaattcagtccaagaatttatctccaaaagctttttaatggtgaatgcaatttcgaattctgaatttcaacctcaagtagaggaagaagtatcaaattcagaattagttctggaagctgtcaaaattatggaaaaagtgatcaaaattattgatgaacttaagtctaaggaaaagtcttcatccagaaaaggtttgacattagatgccaaacttttagaagaggtgttggccttgttcttggctaaactaataaggttgccaagttcctcaagcaaagatgaaaaaaacttatcaaagactgagttaaataaaattgcatctcaactgtcaaaattggtaacagctgaaatttccagaagtagcattagtctaatagcttctgatcctgaagagcactgtttaaatccagaaaatacagaaaggatttatcaggttgtcgattccgtttatagtaacatactgcaacaatcaggaaccaacaaagaattttattatgatataaaagatacaaatacagcctttcctaaaaaagtggctagtttaattattgatggagtttcaagttttccattagatacaattaactcaacaatttcaaatgctgatctctctggagagctagacgttaatagaattgttcaaaaggcccaagaacatgcttttaatgtgattcctgaattagagcaagaaaagttagatcaaaatttatctgaagaggaatctccaattaaaatagttccacatgttggaaaaaaaccagtcaaaatagatccaaaaattatttcagaacacttagcagttatttctataaaaactcaacctcttgagaaacttaagcaggagtgtttgaaaagaactggacatagcatagcagaactgagaagagcatcaataagtgggagaaattactccttaggatcacctgatttagaaaagagaaagacagaaagacgtacctcattggataagactggaagactggatgtaaaacccctagagaatataagaaagcctgatattacaaaggtggagctcttaaaagatgttcaaagtaaaaatgatcttattgttcgattagtagctcatgatattgatcaagtgtatttggaaaattacataaaagaggaacgagattctgatgaagatgaagttgttttaacacagacttttgcaaaagaagaaggcatcaaagtatttgaagatcaagtgaaagaagtcaagaagccaatacaaagcaaactttctcctaagtcaacactaagcacgagcagcctgaaaaaatttttgtcactaagtaaatgttgtcagaccacagccagtgcaaatattgaaagtactgaagcaatctcaaatcaggtaatagaatccaaggagacacatgttaaaagagctgttgctgagcttgacatggccacaccaaagacgatgcctgaaacagcctcttcatcttgggaggaaaagccccagtgtaagaaagaagaaaagaatcttgttactgaaccaacacattacttcatacacagaattatgagttcatcttcatacaaccaagaagatctcatttcatctactggtgaggctgaagattgtcactcagacccaagtgctaaaatattagaagaaagttctcaggaacaaaagccagagcatggaaacagtgttaagtttatcaccatctttgaaagatccaaggatgttcttggcagtgcaaatccctcaaaggaagtcatttcagaaactcccaagcccgatgtctccaaacaaggatctaaaatgctgacaaaaatgtcttcagctttgtcaaaggtgttttctcaatgtaacaccaatatttccagatcttcctcaccagctcaccaggatgaacactgaagcttttgtacctgatataagtatgcttacttcttttagaaaataaaatggtttttaaagcatagtatagcgtcttataagatgattcctatactactgaaaataaaagcaaaaggaagtgtagaagggaccaggcaaagaagggtttaacaaatgctttgaataagcattttgatgtaagaaatgttaataattagtattacctgtgtgccatgagagtaagtgactaaacacataattattaaactagacaactcacagtacccaccagaaaatgcacattgattgctcctgctaaattttagaggatgttgttaccaggacagttattaaattgagatgaaaaccaagctgaaaatgaaactatgtcacggataagtttattgttaaaggcatatttagatactcgaataaaaggatttataacagataaatttttcccacctgaaagtaaagttaatttagtttatgtctcccaggcaaaatgatccaactgtagacaaagcaccatttgaaagtaaatgataactatatataattccatatatgcataaaatggcccctgtgataaaaaaaatccttgcaagtaacgtacctcttatggataaaatatcaatcaagaaatcattggtcaataaagttattaaataattttcagaaatattatacacgaatatagagatcaagatccatttgtaaaaacaaaagtaatgggaaaaatttaataatatggctagctagtgcagtgataaaagaaatttttcaaaattagctgaacttgctactttgtgataaagttccaatgtcagcatgtttgcctctggaatccaaggatgttttataaagagattcaacagatggaccaagaagctgggaaggaatgtcaaatatcatcacccaaaaagggtgactcatgaatttttagagaatgtgtattctgttttatctaaaattttcttgacaattgccactaataaagcagaaacttctgaaaaagttttgttttaaaacaacaaacttcctttaatgaagttgatctgtgcagtaatgacagggaagaaaaaagtgattacctagtcaaatttttacatataaataataaaattatttaactggcaatttagtctacttataataatctcttaaaaacagattaatcccaaagatcatacaaaattgccgaacttgtggatgcagaccttttaaaaaatgatggttggtgagaaatagctggaaattcatctctgaattattttcaaaagagctgactctacatcagtttgcattagttgacagtgttgttgaaagcattcttacagatgtcatccaaaccaatgatgtttcccaaacttagatattacgtgcttataagctgtctttcaacgtaacatttcactgtaaaaatttaaagcactgtgattcacatacttatcaactgaaaaatgtaatatataaacataagatactctgaattaagagggtttttaatggtgaaggaaatttcctgttttctctgactcaagtagaggaagcaacatcaagttcagaattagtccttgaagttgacaacattttagtaaggaatggttaatgttattgagaaatttaagtcctaggaaaaaccatccagaaatacttctgtgttagacatcatgtatgtgaaacatcatctttattttcaacaaaactagtagggtaaatgtgctaaaagtatcaaacactgaattgaaaaaatgtgtattattacctgataaaacctgtagtggctaaaatctctaaaagtaacattagtcttctagctaatgactaatgctaaagcagaagaaagtttttaagattcataaaatttaaattattccttaggttgttgattctttctatgttttactaaaatggactggaaaacattttgtgtgaaaggctagaaagtagacattttaggtttgtagattctctgtcaaatctactccattatgctattgtagcacaaaaccaaccatatacaacacataaacaaataaatagatgtggatgtgattcaataaaaatttctttataaacactgaaatttgaatttcatttaatgttacatgtcataacatagaatttttcttttgatttttttcaataatttgaaaatataaaaattattcttaggtttattaaagacaagtgacaggacagatttagcccatgctgatttctgtactataataatttggaactcatgaataagcttatttttatatgaaggtactgattattgacttaaaataatactagtaaaggttcaaattctgttgcgggaagtcagggaccctgaatggagggacaagctggagctgcggcagaggaacataaattgtgaagatttcattttaatatggacatttatcaattcccaaataatacttttataatttcttacacctgtctttaatctcttaatcctgttatcttcataagctgaggatgtatgtcacctcaggaccactgtgataattgtgttaactgtacaaattgattgtaaaatgtgtgtgtttgaacaatatgaagtcagtgcacctagaaaaagaactaaataacagtgatttttagggaacaagggaagacaaccataa

SEQ ID NO: 463626 - DNA, 7134 bp, Homo sapiens
ccaggattgttacaacattgaagatatggtttacaggcttctagggcatgtcttcccttcaactcacactgaaaatgaactaaaagagaaaaagtttccaccggatgatgaatttgtggaggcagcttcaaaattgactgatgaaattataaaagaaatttctgaacatgagattcgactttccatggcagaggataatgcagaaagtatgcagttagaacctattgaaaatttggtcgactccatatgtaataatattttgaaaacatctgaattccaagctgaagtacaaaaagatgcagacaaaaaaggatgctcattcctcagtaaattagctggttttattatgaaagaaatcatgtatcatcatttacagccatttttacatggtgaagaatcatctttcagtgacttatctgattatgaccatgtctctgaacttgctaaatctggtaaagaaaagacacagccttctctctattcagctacatttttggaagacataatcattgaccttgttcacaaattttgttctctcctcattattactgaagattctaagaaaaatgaaatggcagagctagatattatgggcttggctctaaaacttgcaaattctctgataagggaatttaagaaaagtgatattaaagttttaccaaatgctgaaaaaatgttttcttttccaccaattgataaagagacagttgataaaatatccaattttgtatatgaacagttcatagaaaaatgcacatctcatgatattcaaaaaggtgatgaaagtaacattgctatagggatgattgctgctctaacccagaaggcaatatctgcattcaggattcaaccacttttttcaggagactggtcttccaccttcttttcatttctaaatccagataatatcacccaaagggttcaacacctaccacaaaacacctttacacaaataagcagatgtgcaaaagagaaccaactttctttaccagatcaatcatataaagatacttcttccaccccagattgcaaaaacatgatgagcactttggaaataaatagaggtacaatgaatagaaagaaaagttttaaaaccaaggacacatcagtgaaaaaaggtgacatccaaaatccagtacttagctctataaatgcaattatgaaaagcggcatgattaacctaacatcagggttggctacaggtgtgacaaataaaaaggaagtggatgaaaataaagtgggaatttgtactcaaaaacatagtgagaatgtatcaaaagttacttcaactaccactgtgaaaagtaaagatactcaggagccaaatttgagtgaaacatttaataataatgaaattgagaagaaaagaaatttaattccaacagataaaaaagggaaagatgatgagatatacacacatttttcattaataattgatgatacagaatatgagaaggaagtacttggatcagattctgaaataggctataaaaagaagattgacaatgcaagggaaagctcatttaaaaaagatgacaagctctttcagttatcctccttgaagtccaagagaaatctagggactacaacagatactttggaaataagaattcgaacatcaagcaatgaggggagaagagactctccaacacaaacgtgtagggatgaggaacaccactcagattatgaacatgttcaaaatgtcattgaaaatatttttgaagatgttttagaactatcttcttctccagaaccagcatattattcgaaactcagttatgaccaaagccccccaggtgataatgtattaaatgtaattcaagagattagcagggattcggcacagtctgttacaacaaaaaaagtatcctcctcaactaacaaaaatatctctgccaaagaaaaagaagaggaagagagagaaaaagagaaagtaagagaggagattaaaagtgaacccagtaaaccagatgatcctcaaaaccaacgagaaagtaaacctggaatttttcccgctaagtttttagaagatgttattactgagatggttaaacaattgatcttttcttctataccagaaacacaaatacaagatagatgtcaaaatgttagtgataagcaaaatcaagccaaactctatgacactgctatgaaactcatcaattcactgttaaaggagttctcagatgctcaaattaaggttttcaggccagataagggaaatcagttccctgggggtaaagtgtcttcagttcctaaagtacctccaaggtataaagagccaactacagatgaagcaccatccagcattaagataaaatctgcagataaaatgccacctatgcataaaatgatgagaaaaccttcttcagataagataccatcaattgacaaaacattggtcaataaagttgttcactcctctgtttgtaatattttaaatgactatggatctcaagactctatttggaagaatataaacagtaatggagaaaatttagcaagaagactaactagtgcagtgataaatgaaattttccaacgtcaggttaacttgatattttgtgatgaggtttcagtttcagcatgtttgcctctggaatctaaggatgttgttaaaaaggtccaaaagttggcccaaacagccagcaaagaatgtcaaacttcatcaccatatacaataatattacctcataaatttttggagaatgtgatttctgctcttttctccaaaattttctcaacaatatccagcacaaaaacaaaagaacctgaggacaatttgtccacagaactgaatttccttcaaatgaagttagtaagtgcagttgcaacagagatctcccaagataaatatatgactatacagtatgtagaaaccttacaatctgatgatgatgaaattattcaattagtggttcagtctgtttataataatctcttgccacagtttggatcacaagagattatacaaaattgtgtaaccagtggatgcaaaatcctttcagaaaacatagttgacttggttctacgagaagtggctagcaatcagctgcagagctatttttgtggagagctaactccacatcagtgtgtggaagttgaaaacatcgttgaaaagatccttaaagatgttttccaaactactgatgtgcccctacctaaaccttcacatgctgataagctgtcttataacataatagaagaaattgctgtgaaatttttatcaaagcttttatctatatttccaaaagtacataaagaaagaacaaaatctctagagactgatatgcaaaaaataacttcaaaagtactaaattcagtccaagaatttatctccaaaagctttttaatggtgaatgcaatttcgaattctgaatttcaacctcaagtagaggaagaagtatcaaattcagaattagttctggaagctgtcaaaattatggaaaaagtgatcaaaattattgatgaacttaagtctaaggaaaagtcttcatccagaaaaggtttgacattagatgccaaacttttagaagaggtgttggccttgttcttggctaaactaataaggttgccaagttcctcaagcaaagatgaaaaaaacttatcaaagactgagttaaataaaattgcatctcaactgtcaaaattggtaacagctgaaatttccagaagtagcattagtctaatagcttctgatcctgaagagcactgtttaaatccagaaaatacagaaaggatttatcaggttgtcgattccgtttatagtaacatactgcaacaatcaggaaccaacaaagaattttattatgatataaaagatacaaatacagcctttcctaaaaaagtggctagtttaattattgatggagtttcaagttttccattagatacaattaactcaacaatttcaaatgctgatctctctggagagctagacgttaatagaattgttcaaaaggcccaagaacatgcttttaatgtgattcctgaattagagcaagaaaagttagatcaaaatttatctgaagaggaatctccaattaaaatagttccacatgttggaaaaaaaccagtcaaaatagatccaaaaattatttcagaacacttagcagttatttctataaaaactcaacctcttgagaaacttaagcaggagtgtttgaaaagaactggacatagcatagcagaactgagaagagcatcaataagtgggagaaattactccttaggatcacctgatttagaaaagagaaagacagaaagttctcaggaacaaaagccagagcatggaaacagtgttaagtttatcaccatctttgaaagatccaaggatgttcttggcagtgcaaatccctcaaaggaagtcatttcagaaactcccaagcccgatgtctccaaacaaggatctaaaatgctgacaaaaatgtcttcagctttgtcaaaggtgttttctcaatgtaacaccaatatttccagatcttcctcaccagctcaccaggatgaacactgaagcttttgtacctgatataagtatgcttacttcttttagaaaataaaatggtttttaaagcatagtatagcgtcttataagatgattcctatactactgaaaataaaagcaaaaggaagtgtagaagggaccaggcaaagaagggtttaacaaatgctttgaataagcattttgatgtaagaaatgttaataattagtattacctgtgtgccatgagagtaagtgactaaacacataattattaaactagacaactcacagtacccaccagaaaatgcacattgattgctcctgctaaattttagaggatgttgttaccaggacagttattaaattgagatgaaaaccaagctgaaaatgaaactatgtcacggataagtttattgttaaaggcatatttagatactcgaataaaaggatttataacagataaatttttcccacctgaaagtaaagttaatttagtttatgtctcccaggcaaaatgatccaactgtagacaaagcaccatttgaaagtaaatgataactatatataattccatatatgcataaaatggcccctgtgataaaaaaaatccttgcaagtaacgtacctcttatggataaaatatcaatcaagaaatcattggtcaataaagttattaaataattttcagaaatattatacacgaatatagagatcaagatccatttgtaaaaacaaaagtaatgggaaaaatttaataatatggctagctagtgcagtgataaaagaaatttttcaaaattagctgaacttgctactttgtgataaagttccaatgtcagcatgtttgcctctggaatccaaggatgttttataaagagattcaacagatggaccaagaagctgggaaggaatgtcaaatatcatcacccaaaaagggtgactcatgaatttttagagaatgtgtattctgttttatctaaaattttcttgacaattgccactaataaagcagaaacttctgaaaaagttttgttttaaaacaacaaacttcctttaatgaagttgatctgtgcagtaatgacagggaagaaaaaagtgattacctagtcaaatttttacatataaataataaaattatttaactggcaatttagtctacttataataatctcttaaaaacagattaatcccaaagatcatacaaaattgccgaacttgtggatgcagaccttttaaaaaatgatggttggtgagaaatagctggaaattcatctctgaattattttcaaaagagctgactctacatcagtttgcattagttgacagtgttgttgaaagcattcttacagatgtcatccaaaccaatgatgtttcccaaacttagatattacgtgcttataagctgtctttcaacgtaacatttcactgtaaaaatttaaagcactgtgattcacatacttatcaactgaaaaatgtaatatataaacataagatactctgaattaagagggtttttaatggtgaaggaaatttcctgttttctctgactcaagtagaggaagcaacatcaagttcagaattagtccttgaagttgacaacattttagtaaggaatggttaatgttattgagaaatttaagtcctaggaaaaaccatccagaaatacttctgtgttagacatcatgtatgtgaaacatcatctttattttcaacaaaactagtagggtaaatgtgctaaaagtatcaaacactgaattgaaaaaatgtgtattattacctgataaaacctgtagtggctaaaatctctaaaagtaacattagtcttctagctaatgactaatgctaaagcagaagaaagtttttaagattcataaaatttaaattattccttaggttgttgattctttctatgttttactaaaatggactggaaaacattttgtgtgaaaggctagaaagtagacattttaggtttgtagattctctgtcaaatctactccattatgctattgtagcacaaaaccaaccatatacaacacataaacaaataaatagatgtggatgtgattcaataaaaatttctttataaacactgaaatttgaatttcatttaatgttacatgtcataacatagaatttttcttttgatttttttcaataatttgaaaatataaaaattattcttaggtttattaaagacaagtgacaggacagatttagcccatgctgatttctgtactataataatttggaactcatgaataagcttatttttatatgaaggtactgattattgacttaaaataatactagtaaaggttcaaattctgttgcgggaagtcagggaccctgaatggagggacaagctggagctgcggcagaggaacataaattgtgaagatttcattttaatatggacatttatcaattcccaaataatacttttataatttcttacacctgtctttaatctcttaatcctgttatcttcataagctgaggatgtatgtcacctcaggaccactgtgataattgtgttaactgtacaaattgattgtaaaatgtgtgtgtttgaacaatatgaagtcagtgcacctagaaaaagaactaaataacagtgatttttagggaacaagggaagacaaccataa

SEQ ID NO: 463627 - DNA, 990 bp, Homo sapiens
tgatatatccaccttctccctgtcattgaaaattgttatgattttgttgccagccttcacacagatggcatttctcagtgccagccacctggaggaaagagtcccctggtcccggggctgggcatttccgctggttgcactgtcgaggggggagaggcagtggctggtcacttcgagcctgtgggcttgcggcccctactccctgttttcccccagccctgcccctacccaggtgaatgttcttgtccaggtaggcgcgaaggcccgacccttgcggagggaaagcctctgcagcgcctcctcgccacctgggcccgagactcccggtgctggcgtggcaggggtgcccccgccgggacgggacagctgggacccgcgcagccgagccggggcagccacgtggcggcggggcggggaccgggcgggccgggcgctgggagctggctgtcccaggagcagagcagtctccctgtccagatcaccaggatccctgcttgctggagaatgacccagatgtcccaggtgcaggagctcttccatgaggcagcccagcagtgtgcagcacctcccaggacctcttgctcctgctctggtgacataagatgcctgcctcgcctttgccttccaccatgattgaaagtttcctgaggcctccctggaagcagaagctgctatgcttcccgtacagcctgtggaaccataagccaattaaacctcttttctttataaattacccagtctcaagtatttctttatagcaatgcacttggaattccttctccaactgtgagaaacttgactcttattcaatatattttgttatttgcttataattcacagaaagcagatttagaattggtaattcatactcctacaaatacccaaattttctatctggcatttaatattaattgcagttatttttgttttcgaatgtgatacatagtcaaagtactgtgttcataagttactctggttagttctttttcc

SEQ ID NO: 463628 - DNA, 3720 bp, Homo sapiens
caatacagacttcaaaaaaccagagcttttgctggggatatgtgctccttccaaaggcaattgattgtgtgcaatattctgagaattaattcctccaaaggtggatattgagggagaaacagaaaaatccaagacaatcccctgtggaagaaaattctccaacccaaatctcaaccgaactcacagcgctgaacagcgcatcaattaagacctgtcaaatataatcacactatctaatagttttaaatatgcaaaataaagagcaccaaagtcaatgtaattcagaaataacaacaacaaaaccagagcaccccgatgcaattaggccacaaggaattccaaagtagtgtattaggtatagaaaatatatatgtaattagaaatgtttacagagattagagagattttttaaaaaaagatttggcctctaagacagttaacaattccagtaaagaagaaaagagaaattcaatgtttgatatacatacataaaaataaatttcaggaaaatgaaaagtccatgtgatgacagaatccaaattatataaaagatagaaatctcaatatttgtttttacacattttaaggaaaaaacaaccccgaaagcataaaatgcagaaaataatgttaataattcttgagttttcaagtccctctcactgactttggcacttagagaacagccagcacaggctcaggatcacctaatggtcatttctgccaaggagaccaaactcatgaaaatggagcagaaagctatgcgcacaagatggatggatgctcctctcccagagaccagcaggttcagaacgcagctccgccctcgcggtgcccccgacccgcccaggtctgtgctgagaagaacattgctccgccttcactgtatctccaaagtctgtgctgaggagaacgcagctccgccctcgcaaaggccccccagcgccggcgcaggcgcggagaggcgcacccgaacccgaatcctaaccctaacgcctaaggcactccagctgcaggtccacgcccgctcccccaagcggggaaggcgcttcgcgctgccgccggctggggactgggcaccgccctcccgcggctccggagccggctgccaccagggggcgcgcccgcggtgtccgggagcctggcggcgcgtctgcagctgccagtgcacctgctcctgctctcaccgctgtctctgccaggaacccgacgcccagccggaccctgccctccagcggggctgcggctccacggcctgcgacagcagccccaccccgcattcggcgcgctcccgggggcagaggtcgcgtccctccctggcggctgcggagccgtccgaggacaggggccataaactctccagagcgggaagccgcacgctggtggcccggccccgcgcacagacctggcggcagctggcacctgacccgctgcatgggtctccagggagctcgctgcccacccggcgctgcagcctcggctccctcgtacgcgctctggtaggtgctagggacgaccctatgggccagcttgccatgccaagtccccaggccgcacccaccgtggctccgtgggctaggggactggctcctcctgtggatatcaggcctcaagaggatggcagtcaccaggtagacatctggcctcagatagacaccaaggtcccagatgtacagcaggccccaaccgaaccccagactcatgtggacatcaggccacaggtggacaatcaggccccaggcacacatcaggccttaagtggacacccaggccccaggctgatatccagctcccaggtgatcaccaagccccaggtctctggtgaacatcaggtgcaggtgtccaagcaggccctgggtggacataactgtgtacagatgcctctggccatttggcagaagccccccgcccaggtaccacaggacaggagtcaccaggtagacatcaggccccagatggagctaccaggccaggcctcaccagtgatcccaccagggccacatctgcacattgtccttgtccagctggagcctctggagctcattgagacacaggcacatgctgaggtcacctgcagtgcagaaatacagcgatttccagtgccagctgttgagccagtgccagcaccaggggcagattcccctccagggacagcgctggagctagaggaagctccagagccctcctgccgctgccctgggactgcccaggaccagcccagtgaggagctgcctgacttcatggcacctcctgtagagccaccggcctcagccctggagctgaaagtgtggctggagctagaggtggcagagaggggtggccagcacagctccagccagcagctcccacactgctcccagtcctgggcacacagagcagcagccctgctgctgaagggcctgctgctactgctgctggggctgtttgcctgcctgcaggaggcggacagggggtgagggggccagggggcatctccaaaggaagcttttaaactcagcagctgcaccccagaatctgtatgcctgcacctgcccaaggatttattcatagcttacctaagaatttcaaatttctaccataacactgaataaagtttgactttttgaaacttccatggcttctttcactccctaatattgtagatggtgtttttgaggcgatgttgaaaacctctgatagttgtgtgttttgttgtggttctttctgtgattaaattaccatatgatcaagtgatattgaaaacccttcaggctaggcaacaagagcaaaactctgtctaatatctatacatacattttgtatatatacatatatacatgtgtgtatatatatacataatatatttatacatatacatatatgtatatgtatattatatatgcatatacatatacatatacatatacatatacatatacatatacatatatatgtatatgtacatatatatctgtctaatatatatacacatatacatatatatgtatatgtgtatatatacatatacatatatatgtatatgtatatatgtatatatatgtgtatatgtgtatatatacatatacatatatgtgtgtatgtgtatatatatatacacatatatgtatacatatatgtatatatgtgtatatgtgtatatatacatatacatatacatatatgtgtatgtgtatatatacatatacatatacatatatgtgtatgtgtatatatacatatacatatatgtgtatatgtgtatatatacatatacatatatgtgtatatgtgtatatatacatatacatatatgtgtatatgtgtatatatacatatacatatacatatacatatatgtgcgtatgtgtatatatacatatacatatatgtgcgtatgtgtatatatacatatacatatatgtgcgtatgtgtatatatacatatacatatatgtgtgtatgtgtatatatactatacatatatgtgtatatgtgtatgtatagatacacatatacacatatattagaggttgtactgctgaaaacaagagctattaataaaaaaatttcaggaaacgtagtgtgattatttttaatagaagtggatattttaatacaggtctcttgttttttcttgtggaaataaatgacaagatggaatttctgggtgtttggtatctgaatatttaagtatagcaggtattgtcagtttttcaaaggcattttaccatcttacttgtccatc

SEQ ID NO: 463629 - DNA, 7234 bp, Homo sapiens
  misc_feature (1)..(1): n is a, c, g, or t
  misc_feature (4)..(4): n is a, c, g, or t
  misc_feature (6)..(6): n is a, c, g, or t
  misc_feature (8)..(8): n is a, c, g, or t
  misc_feature (10)..(10): n is a, c, g, or t
  misc_feature (14)..(15): n is a, c, g, or t
  misc_feature (17)..(17): n is a, c, g, or t
naanantntnatanntnggctctcgccaatggcaaatgtaattgatgatggctggtgccagaatggcagcacagctgttgggtctcagtgcccttttttaccttctgaacaagggaataatgaagagactatttcgtctgttgatgaactgaaaattcccaaagactgtgatcgttatgatgatctttgttcatatatgtcatggaagacacgaaaagatacacagtggcctgaaaacaatttagctgataaagatcaagtttcagttgcaacttcatttgacataactgatgaaaacatagctactaaaagaagtgaccattttgatgctgctcgttcatatgggcagtattggacacaggaagattcatctaagcaggcagaaacatatttaaccaagcttaagtcatctgcttctttgagtgaaaaatcttacaaccaggctgttggtcttggcaaaacacagtcagctttatttcagtgtgatataggcaatgaaccatttcttccctttgggaagataaagtctgttccttctcttgaccttgcagagaaggtaggatcttcagatgttatttatcatgtgaaagtattaacttcagaatctttggttttacaagatttaaagcagccaacctttgaagaagttgcagattactcaaactttaatttggagggcctgcaggggaaggttgagtctgacgtcattactctggatggcctaaatgaaaatgctgttgtatgcagtgaaagagttgctgaactacaaagaaagccaacaagagagtcggaatatcactcttcagatctcagaatgttgaggatgtctcctgacactgtgccaaaggctcctaaacatttaaaagcaggagacacttctaaaggaggcatagctaaagttactcaatccaacttgaagtcaggcatcactaccactcctgttgattcagacattggatctcatttatccttgtcccttgaggacctgtctcagttggctgtaagttctctagaaactactactggtcaacacactgatactctcaaccaaaagacattagcagatactcatctaactgaagagactctgaaagtcacagctattcctgaaccagctgaccagaagactgcaacaccaacagtactctctagttcccactcacatagggggaagcccagcattttctaccagcagggcttgccagacagtcatctaactgaagaggctttgaaagtttcagctgctcctggactagctgaccagacaactggcatgtcaactctaacctctacttcctactcacatagagagaagcctggtactttttaccaacaagagttaccagagagtaacttaaccgaagagcctttggaagtttcagctgctcctggcccagtggagcagaagacgggaatacctacagtatcctctacatcccactcacatgtagaggacctcctctttttctatcgacagaccttgccagatggtcatctaactgatcaggctctgaaagtctcagctgtgtctggaccagctgaccagaagactgggacagcaacagtactctctactccccactcacatagagagaagcctggtattttttaccaacaagagttcgcagacagtcatcaaactgaagagactcttactaaagtttcagccactcctggaccagctgaccagaagactgagataccagcagtacagtctagttcttactcacaaagagaaaagcctagtattttgtacccacaggacttagcagacagtcatctacctgaagagggtctgaaagtttcagctgttgctggaccagctgaccagaagactggcctaccaacagtaccctctagtgcatactcacacagagagaagctccttgttttctaccaacaggccttgctggacagccatctacccgaagaggctctgaaagtttcagctgtttctggaccagctgacggaaagactgggacaccagctgtaacctctacttcctctgcgtcctcttcacttggagaaaagcccagtgctttctatcagcagaccttacccaatagtcatctaactgaagaggctctgaaagtatcaattgttcctggaccaggtgatcagaagactgggataccctcagcaccatctagtttctactcacacagagagaagcccattattttttcccagcagaccctgccagactttcttttccctgaagaagctctgaaggtttcagctgtttctgtattggctgcccagaagactgggacaccaacagtgtcctctaattctcactcacatagcgagaaatctagtgttttctaccagcaagagttgccagacagtgatctacctagagaatctctgaaaatgtctgctattcctggactgactgaccagaagactgtcccaacaccaacagtaccttcaggttccttctcacatagagagaagcccagtattttctatcaacaggagtggccagatagttatgcaactgaaaaggctctgaaagtttcaactggccctggaccagctgaccagaagactgagataccagcagtacagtctagttcttacccacagagggagaagcctagtgttttgtacccacaggtgttatcagacagtcatctacctgaagagagtctgaaagtttcagccttccctggaccagctgaccagatgactgacacaccagcagtaccgtctactttctactcacaaagagagaagcctggtattttctaccaacagaccttgccagagagtcatctgcctaaagaggctctgaaaatttcagtagctcctggactagcagaccagaagactggcacaccaactgtaacctcaacttcctactcacaacatagagaaaagcccagcattttccaccagcaggccttgccaggtactcatatacctgaagaggctcagaaagtttcagctgttactggaccaggtaaccagaagacttggataccaagagtactttctaccttctactcacaaagagagaaacctggtattttctatcaacagaccttgccaggtagtcacatacctgaagaggcacagaaagtttcacctgttcttggaccagctgaccagaagactgggacaccaactccaacctctgcttcttactcacacacagagaagcctggtattttctaccaacaggtcttgccagataatcatccaactgaagaggctctgaaaatttcagttgcctctgaaccagttgaccagacaactggcacaccagctgtaacctctacttcctactcacaatatagagagaagcccagcattttctaccaacagtcgttgccaagtagtcatctaactgaagaggctaagaatgtttcagcggttcctggaccagctgaccagaagactgtgataccaattttaccctctactttctactcacacacagagaagcctggtgttttctaccaacaggtcttgccacatagtcatccaactgaagaggctctgaaaatttcagttgcctctgaaccagttgaccagacaactggcacaccaactgtaacctctacttcttactcacaacatacagagaagccgagtattttctaccaacagtcgttgccaggtagtcatctaactgaagaggctaagaacgtttcagcggttcctggaccaggtgaccggaagactgggataccaactttaccctctactttctactcacacacagagaagcctggtagtttctaccaacaggtcttgccacatagtcatctacctgaagaggctttggaagtttcagttgctcctggaccagttgaccagacgattggcacaccaactgtaacctccccttccagctcatttggagagaagcccattgttatctacaaacaggcctttccagagggtcatctacctgaagagtctctgaaagtttcagttgctcctggaccagttggccagacaactggcgcaccaactataacctctccttcctactcacaacatagagcaaagtctggcagtttctaccaactggcattgctaggtagtcaaatacctgaagaggctctcagagtttcttctgctcctggaccagctgaccagacaactggcataccaaccataacctctacttcctactcatttggagagaagccgattgttaactacaaacaggcctttccagatggtcatctacctgaagaggctctgaaagtttccattgtttctggacctactgaaaaaaagactgacataccagcaggacctttaggttccagtgcacttggagagaagcccattactttctaccggcaggctctgctagacagtcctctaaataaagaggttgtgaaagtttcagctgctcctggaccagctgaccagaagactgagacattaccagtacattctactagctactcaaatagggggaagcctgtcattttctaccagcagaccctatcagacagtcatttacctgaagaagctctgaaagttccacctgttcctggaccagatgcccagaagactgagacaccatcagtatcctctagtttatactcatatagagagaagcccattgtcttctaccaacaggccctgccagacagtgagctaactcaagaagctctgaaagtttcagctgttcctcaaccagctgaccagaagactgggttatctactgtaacttcctctttctattcacatacagagaagcctaatatttcttaccagcaagagttgccagatagtcatctaactgaagaggctctgaaagtttcaaatgttcctggaccagctgaccagaagactggggtatcaacagtaacctctacttcctactcacacagagagaagcccattgtttcctaccagcgagagttgccgcattttactgaagcaggtttgaaaattttaagagttcctggaccagctgaccagaagactggaataaacatcctgccctctaattcctacccacagagagagcactctgtcatttcttatgagcaggagttgccagatcttactgaagtaactttgaaagcaataggggttcctgggcctgctgaccagaagactgggatacaaatagcatcctctagttcctactcaaatagagagaaggccagtatttttcatcagcaggagttgccagatgttactgaagaagctttaaatgtttttgttgttcctggacaaggtgaccggaagactgagataccaacagtacctttaagttactactcacgtagagagaagcccagtgttatctctcaacaggagttgccagacagtcatctcacagaagaggctctgaaagtttcacctgtttctataccagcagagcagaagactgggataccaataggactgtctagttcctactcacattcacataaagagaaactcaagatttcaactgtgcatataccagatgaccagaaaactgagtttccagcagctacccttagttcctactcacaaatagagaagcccaagatttcaactgtgattggaccaaatgaccagaagactccatcccagacagcttttcatagttcctattctcaaacagtaaagcccaatattttatttcaacagcagttgccagatagagatcaaagtaaaggtattctaaagatttcagctgtccctgaactaactgatgtgaatactggaaaaccagtatctctctctagttcttattttcacagagagaaatcgaatattttcagtccacaggaattgccaggtagtcatgtaactgaagatgtgctgaaggtttcaacaattcctggaccagctggccagaaaacagtattaccaacagctcttcctagttccttttcacatcgagagaaaccagatattttctatcaaaaggatttgccagatagacatctaactgaagatgctctaaagatctcaagtgctcttgggcaagctgatcaaattaccggattacaaacagttccctctggtacttactcacatggtgagaatcacaagcttgtttcagaacatgtccaaaggctaatagataatttgaattcttctgactccagtgttagctcaaataatgtgcttttaaattctcaggctgatgacagagttgtaataaataaaccagaatctgcaggttttagagatgttggctctgaagaaatccaggatgcagaaaatagtgctaaaactcttaaggaaattcggacacttttgatggaggcagaaaatatggcactgaaacgatgcaattttcctgctccccttgcccgtttcagagatattagtgatatttcatttatacaatctaagaaggtggtttgcttcaaagaaccctcttccacgggtgtatctaatggtgatttgcttcacagacagccattcacagaggaaagcccaagcagcaggtgcatacagaaggatattggcacacagacgaatttgaaatgccggagaggcattgaaaattgggagtttattagttcaactacagttagaagtcctctacaggaagcagagagcaaagtcagtatggcattagaagaaactcttaggcaatatcaagcagccaaatctgtaatgaggtctgaacctgaagggtgtagtggaaccattgggaataaaattattatccctatgatgactgtcataaaaagtgattcaagtagtgatgccagtgatggaaatggttcctgctcgtgggacagtaatttaccagagtctttggaatcagtttctgatgttcttctaaacttctttccatatgtttcacccaagacaagtataacagatagcagggaggaagagggtgtgtcagagagtgaggatggtggtggtagcagtgtagattcactggctgcacatgtgaaaaaccttctgcaatgtgaatcctcactgaatcatgctaaagaaatactcagaaatgcagaggaagaggaaagccgggtacgagcacatggtaagaagaaagtttcaggcttataaacgttatagtttaataatgtgtttaaagttagatatttatgttttgaggaagcttagccaatgaaaaatacaagcaagatcaagaaaaaaaatgaagttagatatttggagttctaaatgtattttccaatagaattgttagaatgactatatttcttctaacaatccataaaaagcctatttaaccaataatgtagttaagttacagtattaatagtaccagcctgagtttac

SEQ ID NO: 463630 - DNA, 968 bp, Homo sapiens
aactgccctcctggatttcagacttgtctggggatctttcctgacaagtattgttttgagtcacagatgatgtggaaggtgaaaactctggagcatccagatagtggcccaaaataccaaatgctgaaaacccagaatacccaagtaacagcctatgagtgtccccacaccaaatgccaggaaaccctggagtatccaggggctgaccagtgcagaaaatcctggagcctcagtggggtggccaacaatgagccccaaaggcctggcatgcgaaagttatgtggagctgatagagtcgactgtgtgtaccccgcttgcatcacagctcaggaacccggaaaagcagacactctgggttttatatcctggggtaatgagacgcacagggctaacgtgcttaagaacattccattctatgagaaactggaatacagcacagctctgagatactcaggccctatcagtttcctacagcaagtaaggagttgccattcaaaagaggcacaaatgatggctgcttcaggaaacatttgtctccaaaatctaagtctggtgcacccagtgacaattttacattgccacagactccagtcagcatgcctagaaatagtggacacctggatttacatagaacaagcaggctctaaaggtcttaaagaaatgccttggacatgtatagttgaatagattccaaggctaccgttgcaaagggctccattcaaagttgtcaaatttgttcatgcttttgactaaggtgaccaaaaaaaaaaaaaaaaaaaaaaaaaaaaaaaagactcagggggacagtgcagctacgtaagaatccagtggctttcccgagcttatttgtcttgcatttttggtgacatggattgttgttcatatcggcttcctctggcaggtccacctggaaagcattatatttagcaagaataaaggaggctgtgaatgatgtcactgcggactgc

SEQ ID NO: 463631 - DNA, 432 bp, Homo sapiens
acgggtttgcagaccactgaaataaaataaaggggcgttgagggagagaaacattaattctgaagatgaagaaactagacagtcagacctccaggactaagatgaagtgagccgagaggagatcgtatcataagaatgcttctgtcgttagccgggtgcagtgctgtgtgtatctagttccagctacttgagaggctgaggcaggaggattgcttgagtccagaaagtggcagttgcagtgagtggagatcgcgccactgctctccagcctgggtggcagagcgagaccctgtctcaaaaaataaacaaaaacaaaatgcttctgtcagttaacaatctttattagagggtttttagtctttctttctcagctgtatgttaagttggttgacaaatgcaaataaacgtctttattatcctttctttctgaaa

SEQ ID NO: 463632 - DNA, 434 bp, Homo sapiens
aagatcagtaatggaggtcgacttcacacaaacaaaaaaaccttggagggaaacattaattctgaagatgaagaaactagacagtcagacctccaggactaagatgaagtgagccgagaggagatcgtatcataagaatgcttctgtcgttagccgggtgcagtgctgtgtgtatctagttccagctacttgagaggctgaggcaggaggattgcttgagtccagaaagtggcagttgcagtgagtggagatcgcgccactgctctccagcctgggtggcagagcgagaccctgtctcaaaaaataaacaaaaacaaaatgcttctgtcagttaacaatctttattagagggtttttagtctttctttctcagctgtatgttaagttggttgacaaatgcaaataaacgtctttattatcctttctttctgaaa

SEQ ID NO: 463633 - DNA, 436 bp, Homo sapiens
  misc_feature (50)..(50): n is a, c, g, or t
ctgcgccctccgtgatacccccccacacaatcgaacaagcggaaaccttnggaaacattaattctgaagatgaagaaactagacagtcagacctccaggactaagatgaagtgagccgagaggagatcgtatcataagaatgcttctgtcgttagccgggtgcagtgctgtgtgtatctagttccagctacttgagaggctgaggcaggaggattgcttgagtccagaaagtggcagttgcagtgagtggagatcgcgccactgctctccagcctgggtggcagagcgagaccctgtctcaaaaaataaacaaaaacaaaatgcttctgtcagttaacaatctttattagagggtttttagtctttctttctcagctgtatgttaagttggttgacaaatgcaaataaacgtctttattatcctttctttctgaaa

SEQ ID NO: 463634 - DNA, 450 bp, Homo sapiens
aagggacactcttttcttagcaccgaagaaacaggttctgttgttaaacttaattcctgagccttgaaacattaattctgaagatgaagaaactagacagtcagacctccaggactaagatgaagtgagccgagaggagatcgtatcataagaatgcttctgtcgttagccgggtgcagtgctgtgtgtatctagttccagctacttgagaggctgaggcaggaggattgcttgagtccagaaagtggcagttgcagtgagtggagatcgcgccactgctctccagcctgggtggcagagcgagaccctgtctcaaaaaataaacaaaaacaaaatgcttctgtcagttaacaatctttattagagggtttttagtctttctttctcagctgtatgttaagttggttgacaaatgcaaataaacgtctttattatcctttctttctgaaa

SEQ ID NO: 463635 - DNA, 447 bp, Homo sapiens
ggactccagcgttagagaagaattgcgctggtcaggtgggggacagggccgggggttctggcgaaacattaattctgaagatgaagaaactagacagtcagacctccaggactaagatgaagtgagccgagaggagatcgtatcataagaatgcttctgtcgttagccgggtgcagtgctgtgtgtatctagttccagctacttgagaggctgaggcaggaggattgcttgagtccagaaagtggcagttgcagtgagtggagatcgcgccactgctctccagcctgggtggcagagcgagaccctgtctcaaaaaataaacaaaaacaaaatgcttctgtcagttaacaatctttattagagggtttttagtctttctttctcagctgtatgttaagttggttgacaaatgcaaataaacgtctttattatcctttctttctgaaa

SEQ ID NO: 463636 - DNA, 449 bp, Homo sapiens
agggtgtcccttgctccacacgcggcaccggtctttggaaactacattctgagcttcagaggacgaaacattaattctgaagatgaagaaactagacagtcagacctccaggactaagatgaagtgagccgagaggagatcgtatcataagaatgcttctgtcgttagccgggtgcagtgctgtgtgtatctagttccagctacttgagaggctgaggcaggaggattgcttgagtccagaaagtggcagttgcagtgagtggagatcgcgccactgctctccagcctgggtggcagagcgagaccctgtctcaaaaaataaacaaaaacaaaatgcttctgtcagttaacaatctttattagagggtttttagtctttctttctcagctgtatgttaagttggttgacaaatgcaaataaacgtctttattatcctttctttctgaaa

SEQ ID NO: 463637 - DNA, 456 bp, Homo sapiens
  misc_feature (38)..(38): n is a, c, g, or t
acacgccccccaacgccgagccaaccgtcggaatggcngaacaccttgtgcgaaactaattctgagctttagaaacattaattctgaagatgaagaaactagacagtcagacctccaggactaagatgaagtgagccgagaggagatcgtatcataagaatgcttctgtcgttagccgggtgcagtgctgtgtgtatctagttccagctacttgagaggctgaggcaggaggattgcttgagtccagaaagtggcagttgcagtgagtggagatcgcgccactgctctccagcctgggtggcagagcgagaccctgtctcaaaaaataaacaaaaacaaaatgcttctgtcagttaacaatctttattagagggtttttagtctttctttctcagctgtatgttaagttggttgacaaatgcaaataaacgtctttattatcctttctttctgaaa

SEQ ID NO: 463638 - DNA, 445 bp, Homo sapiens
  misc_feature (60)..(60): n is a, c, g, or t
gcaagttgcaactttaacacacaaaaaaagggtgtattgttaaccttaattctgagctgngaaacattaattctgaagatgaagaaactagacagtcagacctccaggactaagatgaagtgagccgagaggagatcgtatcataagaatgcttctgtcgttagccgggtgcagtgctgtgtgtatctagttccagctacttgagaggctgaggcaggaggattgcttgagtccagaaagtggcagttgcagtgagtggagatcgcgccactgctctccagcctgggtggcagagcgagaccctgtctcaaaaaataaacaaaaacaaaatgcttctgtcagttaacaatctttattagagggtttttagtctttctttctcagctgtatgttaagttggttgacaaatgcaaataaacgtctttattatcctttctttctgaaa

SEQ ID NO: 463639 - DNA, 436 bp, Homo sapiens
ttatctattagcacttactacgcgcccccgcccgttctcttctaggtaaccgaaacattaattctgaagatgaagaaactagacagtcagacctccaggactaagatgaagtgagccgagaggagatcgtatcataagaatgcttctgtcgttagccgggtgcagtgctgtgtgtatctagttccagctacttgagaggctgaggcaggaggattgcttgagtccagaaagtggcagttgcagtgagtggagatcgcgccactgctctccagcctgggtggcagagcgagaccctgtctcaaaaaataaacaaaaacaaaatgcttctgtcagttaacaatctttattagagggtttttagtctttctttctcagctgtatgttaagttggttgacaaatgcaaataaacgtctttattatcctttctttctgaaa

SEQ ID NO: 463640 - DNA, 435 bp, Homo sapiens
tttttttttttatacctcccccaccccccccacaacccgtcccggctttagaaacattaattctgaagatgaagaaactagacagtcagacctccaggactaagatgaagtgagccgagaggagatcgtatcataagaatgcttctgtcgttagccgggtgcagtgctgtgtgtatctagttccagctacttgagaggctgaggcaggaggattgcttgagtccagaaagtggcagttgcagtgagtggagatcgcgccactgctctccagcctgggtggcagagcgagaccctgtctcaaaaaataaacaaaaacaaaatgcttctgtcagttaacaatctttattagagggtttttagtctttctttctcagctgtatgttaagttggttgacaaatgcaaataaacgtctttattatcctttctttctgaaa

SEQ ID NO: 463641 - DNA, 434 bp, Homo sapiens
aggaactatcgaattgcgtgcgcctatcagatgagcttggctttctggggaaacattaattctgaagatgaagaaactagacagtcagacctccaggactaagatgaagtgagccgagaggagatcgtatcataagaatgcttctgtcgttagccgggtgcagtgctgtgtgtatctagttccagctacttgagaggctgaggcaggaggattgcttgagtccagaaagtggcagttgcagtgagtggagatcgcgccactgctctccagcctgggtggcagagcgagaccctgtctcaaaaaataaacaaaaacaaaatgcttctgtcagttaacaatctttattagagggtttttagtctttctttctcagctgtatgttaagttggttgacaaatgcaaataaacgtctttattatcctttctttctgaaa

SEQ ID NO: 463642 - DNA, 440 bp, Homo sapiens
  misc_feature (12)..(12): n is a, c, g, or t
cccccccccttngggggttatgtgtaatctcctattttgtctgcacataaatagagaaacattaattctgaagatgaagaaactagacagtcagacctccaggactaagatgaagtgagccgagaggagatcgtatcataagaatgcttctgtcgttagccgggtgcagtgctgtgtgtatctagttccagctacttgagaggctgaggcaggaggattgcttgagtccagaaagtggcagttgcagtgagtggagatcgcgccactgctctccagcctgggtggcagagcgagaccctgtctcaaaaaataaacaaaaacaaaatgcttctgtcagttaacaatctttattagagggtttttagtctttctttctcagctgtatgttaagttggttgacaaatgcaaataaacgtctttattatcctttctttctgaaa

SEQ ID NO: 463643 - DNA, 431 bp, Homo sapiens
cgaacctcttagcattccctgcccaccccacagcagcccctcaagggaaacattaattctgaagatgaagaaactagacagtcagacctccaggactaagatgaagtgagccgagaggagatcgtatcataagaatgcttctgtcgttagccgggtgcagtgctgtgtgtatctagttccagctacttgagaggctgaggcaggaggattgcttgagtccagaaagtggcagttgcagtgagtggagatcgcgccactgctctccagcctgggtggcagagcgagaccctgtctcaaaaaataaacaaaaacaaaatgcttctgtcagttaacaatctttattagagggtttttagtctttctttctcagctgtatgttaagttggttgacaaatgcaaataaacgtctttattatcctttctttctgaaa

SEQ ID NO: 463644 - DNA, 545 bp, Homo sapiens
gtgcatatgagataaaattaacattcaatttttgactgatgaatgcttaatagttacaataatttttttcggcaaaagatctgttagtgaataaaggctttaaaaatagaacaaagtaaatatgagatatactcatgtttctcttttcttttcaggaaacgaaacattaattctgaagatgaagaaactagacagtcagacctccaggactaagatgaagtgagccgagaggagatcgtatcataagaatgcttctgtcgttagccgggtgcagtgctgtgtgtatctagttccagctacttgagaggctgaggcaggaggattgcttgagtccagaaagtggcagttgcagtgagtggagatcgcgccactgctctccagcctgggtggcagagcgagaccctgtctcaaaaaataaacaaaaacaaaatgcttctgtcagttaacaatctttattagagggtttttagtctttctttctcagctgtatgttaagttggttgacaaatgcaaataaacgtctttattatcctttctttctgaaa

SEQ ID NO: 463645 - DNA, 427 bp, Homo sapiens
tttacagacctgtttgtatccatcagaaaggaacgcttcggggaaacattaattctgaagatgaagaaactagacagtcagacctccaggactaagatgaagtgagccgagaggagatcgtatcataagaatgcttctgtcgttagccgggtgcagtgctgtgtgtatctagttccagctacttgagaggctgaggcaggaggattgcttgagtccagaaagtggcagttgcagtgagtggagatcgcgccactgctctccagcctgggtggcagagcgagaccctgtctcaaaaaataaacaaaaacaaaatgcttctgtcagttaacaatctttattagagggtttttagtctttctttctcagctgtatgttaagttggttgacaaatgcaaataaacgtctttattatcctttctttctgaaa

SEQ ID NO: 463646 - DNA, 419 bp, Homo sapiens
tcgtagggactcttatagagaccaaggtcctcgggaaacattaattctgaagatgaagaaactagacagtcagacctccaggactaagatgaagtgagccgagaggagatcgtatcataagaatgcttctgtcgttagccgggtgcagtgctgtgtgtatctagttccagctacttgagaggctgaggcaggaggattgcttgagtccagaaagtggcagttgcagtgagtggagatcgcgccactgctctccagcctgggtggcagagcgagaccctgtctcaaaaaataaacaaaaacaaaatgcttctgtcagttaacaatctttattagagggtttttagtctttctttctcagctgtatgttaagttggttgacaaatgcaaataaacgtctttattatcctttctttctgaaa

SEQ ID NO: 463647 - DNA, 417 bp, Homo sapiens
cgcatactgctgagcaagcaacggcggtttgggaaacattaattctgaagatgaagaaactagacagtcagacctccaggactaagatgaagtgagccgagaggagatcgtatcataagaatgcttctgtcgttagccgggtgcagtgctgtgtgtatctagttccagctacttgagaggctgaggcaggaggattgcttgagtccagaaagtggcagttgcagtgagtggagatcgcgccactgctctccagcctgggtggcagagcgagaccctgtctcaaaaaataaacaaaaacaaaatgcttctgtcagttaacaatctttattagagggtttttagtctttctttctcagctgtatgttaagttggttgacaaatgcaaataaacgtctttattatcctttctttctgaaa

SEQ ID NO: 463648 - DNA, 425 bp, Homo sapiens
ttactttttttgatcgtatcttcaccaccaccgccttcaggaaacattaattctgaagatgaagaaactagacagtcagacctccaggactaagatgaagtgagccgagaggagatcgtatcataagaatgcttctgtcgttagccgggtgcagtgctgtgtgtatctagttccagctacttgagaggctgaggcaggaggattgcttgagtccagaaagtggcagttgcagtgagtggagatcgcgccactgctctccagcctgggtggcagagcgagaccctgtctcaaaaaataaacaaaaacaaaatgcttctgtcagttaacaatctttattagagggtttttagtctttctttctcagctgtatgttaagttggttgacaaatgcaaataaacgtctttattatcctttctttctgaaa

SEQ ID NO: 463649 - DNA, 942 bp, Homo sapiens
agcacctggttagcgcttaatgaatggtagctgtaattgtgtcaattttcattacccaggaatatgaggggggtcggaatgaggcaggcgaaaggcacggacgtgggagggcacggctacccaacggggacacctacgaagggagctacgaattcggtaaaagacatggccaggggatctacaaatttaaaaatggtgctcgatatatcggagaatatgttagaaataaaaagcacggtcaaggcacttttatatatccagatggatccagatatgaaggagagtgggcaaatgacctgcggcacggccatggcgtatactactacatcaataatgacacctacactggagagtggtttgctcatcaaaggcatgggcaaggcacctatttatacgcggagacgggcagtaagtatgttggcacctgggtgaacggacagcaggagggcacggccgagctcattcacctgaaccacaggtaccagggcaagttcttgaacaaaaatcctgttggccctggaaagtatgtatttgatgttgggtgtgaacaacatggtgaatatcgtttaacagatatggtcctgcaagtgaaaactgaatctgtaactggtgttgccacagtttgtccagtgactgttagcttgtccgttgtgcagcatgctcctctgaacgtgccgttgctaaaaggaaccactggctaggggcaggtccctagaaaaccagaaaatgaaatggccaaaatgcttgattttgttgctaagtaagaggccctacctcctctgagcacgaattcttcatggaccgcagggtgctctagtctgggtggaaggcagcttcctggttactggtgattgagcaagtttttacatttgtgtagtgataaaaataaagcccatcttattaagtgctttgcagctttagactctactggaaaaagttcct

SEQ ID NO: 463650 - DNA, 456 bp, Homo sapiens
  misc_feature (443)..(444): n is a, c, g, or t
ttactttttttgatcgtatcttcaccaccaccgccttcaggaaacattaattctgaagatgaagaaactagacagtcagacctccaggactaagatgaagtgagccgagaggagatcgtatcataagaatgcttctgtcgttagccgggtgcagtgctgtgtgtatctagttccagctacttgagaggctgaggcaggaggattgcttgagtccagaaagtggcagttgcagtgagtggagatcgcgccactgctctccagcctgggtggcagagcgagaccctgtctcaaaaaataaacaaaaacaaaatgcttctgtcagttaacaatctttattagagggtttttagtctttctttctcagctgtatgttaagttggttgacaaatgcaaataaacgtctttattatcctttctttctgaaaaaaacaaaaaaatggccnncctggcctcagc

SEQ ID NO: 463651 - DNA, 461 bp, Homo sapiens
acgggtttgcagaccactgaaataaaataaaggggcgttgagggagagaaacattaattctgaagatgaagaaactagacagtcagacctccaggactaagatgaagtgagccgagaggagatcgtatcataagaatgcttctgtcgttagccgggtgcagtgctgtgtgtatctagttccagctacttgagaggctgaggcaggaggattgcttgagtccagaaagtggcagttgcagtgagtggagatcgcgccactgctctccagcctgggtggcagagcgagaccctgtctcaaaaaataaacaaaaacaaaatgcttctgtcagttaacaatctttattagagggtttttagtctttctttctcagctgtatgttaagttggttgacaaatgcaaataaacgtctttattatcctttctttctgaaaaagaggcagctggcctcgttgggcctcat

SEQ ID NO: 463652 - DNA, 439 bp, Homo sapiens
gtgcatatgagataaaattaacattcaatttttgactgatgaatgcttaatagttacaataatttttttcggcaaaagatctgttagtgaataaaggctttaaaaatagaacaaagtaaatatgagatatactcatgtttctcttttcttttcaggaaacgaaacattaattctgaagatgaagaaactagacagtcagacctccaggactaagatgaagtgagccgagaggagatcgtatcataagaatgcttctgtcgttagccgggtgcagtgctgtgtgtatctagttccagctacttgagaggctgaggcaggaggattgcttgagtccagaaagtggcagttgcagtgagtggagatcgcgccactgctctccagcctgggtggcagagcgagaccacttaagaattggtggaaaatattggagggaaatgtg

SEQ ID NO: 463653 - DNA, 1267 bp, Homo sapiens
agcacctggttagcgcttaatgaatggtagctgtaattgtgtcaattttcattacccaggaatatgaggggggtcggaatgaggcaggcgaaaggcacggacgtgggagggcacggctacccaacggggacacctacgaagggagctacgaattcggtaaaagacatggccaggggatctacaaatttaaaaatggtgctcgatatatcggagaatatgttagaaataaaaagcacggtcaaggcacttttatatatccagatggatccagatatgaaggagagtgggcaaatgacctgcggcacggccatggcgtatactactacatcaataatgacacctacactggagagtggtttgctcatcaaaggcatgggcaaggcacctatttatacgcggagacgggcagtaagtatgttggcacctgggtgaacggacagcaggagggcacggccgagctcattcacctgaaccacaggtaccagggcaagttcttgaacaaaaatcctgttggccctggaaagtatgtatttgatgttgggtgtgaacaacatggtgaatatcgtttaacagatatggaaagaggagaagaggaagaggaggaagaattagtaactgttgttccaaaatggaaagctacccaaatcactgaattggccctgtggacaccaactctccccaaaaagccgacctctacggatggacctggccaagacgctccaggagctgagagtgcaggagaacccggggaggaggcccaggctctgctggagggcttcgagggtgagatggacatgaggcctggagatgaagatgcagacgtcctccgggaagagagccgggagtatgaccaggaggagttccgctatgacatggatgagggaaacattaattctgaagatgaagaaactagacagtcagacctccaggactaagatgaagtgagccgagaggagatcgtatcataagaatgcttctgtcgttagccgggtgcagtgctgtgtgtatctagttccagctacttgagaggctgaggcaggaggattgcttgagtccagaaagtggcagttgcagtgagtggagatcgcgccactgctctccagcctgggtggcagagcgagaccctgtctcaaaaaataaacaaaaacaaaatgcttctgtcagttaacaatctttattagagggtttttagtctttctttctcagctgtatgttaagttggttgacaaatgcaaataaacgtctttattatcctttctttctgaaa

SEQ ID NO: 463654 - DNA, 1152 bp, Homo sapiens
gaccatgtcggacctgggctcggaggagttggaggaggagggagagaatgatattggggggatctacaaatttaaaaatggtgctcgatatatcggagaatatgttagaaataaaaagcacggtcaaggcacttttatatatccagatggatccagatatgaaggagagtgggcaaatgacctgcggcacggccatggcgtatactactacatcaataatgacacctacactggagagtggtttgctcatcaaaggcatgggcaaggcacctatttatacgcggagacgggcagtaagtatgttggcacctgggtgaacggacagcaggagggcacggccgagctcattcacctgaaccacaggtaccagggcaagttcttgaacaaaaatcctgttggccctggaaagtatgtatttgatgttgggtgtgaacaacatggtgaatatcgtttaacagatatggaaagaggagaagaggaagaggaggaagaattagtaactgttgttccaaaatggaaagctacccaaatcactgaattggccctgtggacaccaactctccccaaaaagccgacctctacggatggacctggccaagacgctccaggagctgagagtgcaggagaacccggggaggaggcccaggctctgctggagggcttcgagggtgagatggacatgaggcctggagatgaagatgcagacgtcctccgggaagagagccgggagtatgaccaggaggagttccgctatgacatggatgagggaaacattaattctgaagatgaagaaactagacagtcagacctccaggactaagatgaagtgagccgagaggagatcgtatcataagaatgcttctgtcgttagccgggtgcagtgctgtgtgtatctagttccagctacttgagaggctgaggcaggaggattgcttgagtccagaaagtggcagttgcagtgagtggagatcgcgccactgctctccagcctgggtggcagagcgagaccctgtctcaaaaaataaacaaaaacaaaatgcttctgtcagttaacaatctttattagagggtttttagtctttctttctcagctgtatgttaagttggttgacaaatgcaaataaacgtctttattatcctttctttctgaaa

SEQ ID NO: 463655 - DNA, 421 bp, Homo sapiens
tgtatagtaattttataacgcagctcgcccctcagggaaacattaattctgaagatgaagaaactagacagtcagacctccaggactaagatgaagtgagccgagaggagatcgtatcataagaatgcttctgtcgttagccgggtgcagtgctgtgtgtatctagttccagctacttgagaggctgaggcaggaggattgcttgagtccagaaagtggcagttgcagtgagtggagatcgcgccactgctctccagcctgggtggcagagcgagaccctgtctcaaaaaataaacaaaaacaaaatgcttctgtcagttaacaatctttattagagggtttttagtctttctttctcagctgtatgttaagttggttgacaaatgcaaataaacgtctttattatcctttctttctgaaa

SEQ ID NO: 463656 - DNA, 419 bp, Homo sapiens
gtaccatcttctagttttgaaaaatcggctttgggaaacattaattctgaagatgaagaaactagacagtcagacctccaggactaagatgaagtgagccgagaggagatcgtatcataagaatgcttctgtcgttagccgggtgcagtgctgtgtgtatctagttccagctacttgagaggctgaggcaggaggattgcttgagtccagaaagtggcagttgcagtgagtggagatcgcgccactgctctccagcctgggtggcagagcgagaccctgtctcaaaaaataaacaaaaacaaaatgcttctgtcagttaacaatctttattagagggtttttagtctttctttctcagctgtatgttaagttggttgacaaatgcaaataaacgtctttattatcctttctttctgaaa

SEQ ID NO: 463657 - DNA, 412 bp, Homo sapiens
  misc_feature (20)..(20): n is a, c, g, or t
gtctttggtaattccccccngattcttgaaacattaattctgaagatgaagaaactagacagtcagacctccaggactaagatgaagtgagccgagaggagatcgtatcataagaatgcttctgtcgttagccgggtgcagtgctgtgtgtatctagttccagctacttgagaggctgaggcaggaggattgcttgagtccagaaagtggcagttgcagtgagtggagatcgcgccactgctctccagcctgggtggcagagcgagaccctgtctcaaaaaataaacaaaaacaaaatgcttctgtcagttaacaatctttattagagggtttttagtctttctttctcagctgtatgttaagttggttgacaaatgcaaataaacgtctttattatcctttctttctgaaa

SEQ ID NO: 463658 - DNA, 429 bp, Homo sapiens
agatgaaaggactaataaaacaagcgacagaagaaaggtcaagggaaacattaattctgaagatgaagaaactagacagtcagacctccaggactaagatgaagtgagccgagaggagatcgtatcataagaatgcttctgtcgttagccgggtgcagtgctgtgtgtatctagttccagctacttgagaggctgaggcaggaggattgcttgagtccagaaagtggcagttgcagtgagtggagatcgcgccactgctctccagcctgggtggcagagcgagaccctgtctcaaaaaataaacaaaaacaaaatgcttctgtcagttaacaatctttattagagggtttttagtctttctttctcagctgtatgttaagttggttgacaaatgcaaataaacgtctttattatcctttctttctgaaa

SEQ ID NO: 463659 - DNA, 437 bp, Homo sapiens
cgctcgcggagcactatgattccacacgggggcacacccacgcggcttttcggaaacattaattctgaagatgaagaaactagacagtcagacctccaggactaagatgaagtgagccgagaggagatcgtatcataagaatgcttctgtcgttagccgggtgcagtgctgtgtgtatctagttccagctacttgagaggctgaggcaggaggattgcttgagtccagaaagtggcagttgcagtgagtggagatcgcgccactgctctccagcctgggtggcagagcgagaccctgtctcaaaaaataaacaaaaacaaaatgcttctgtcagttaacaatctttattagagggtttttagtctttctttctcagctgtatgttaagttggttgacaaatgcaaataaacgtctttattatcctttctttctgaaa

SEQ ID NO: 463660 - DNA, 426 bp, Homo sapiens
  misc_feature (23)..(23): n is a, c, g, or t
  misc_feature (38)..(38): n is a, c, g, or t
gcgctgccttctctagaaagcanaaggaggccgcctcnagggaaacattaattctgaagatgaagaaactagacagtcagacctccaggactaagatgaagtgagccgagaggagatcgtatcataagaatgcttctgtcgttagccgggtgcagtgctgtgtgtatctagttccagctacttgagaggctgaggcaggaggattgcttgagtccagaaagtggcagttgcagtgagtggagatcgcgccactgctctccagcctgggtggcagagcgagaccctgtctcaaaaaataaacaaaaacaaaatgcttctgtcagttaacaatctttattagagggtttttagtctttctttctcagctgtatgttaagttggttgacaaatgcaaataaacgtctttattatcctttctttctgaaa

SEQ ID NO: 463661 - DNA, 1298 bp, Homo sapiens
  misc_feature (1285)..(1286): n is a, c, g, or t
agcacctggttagcgcttaatgaatggtagctgtaattgtgtcaattttcattacccaggaatatgaggggggtcggaatgaggcaggcgaaaggcacggacgtgggagggcacggctacccaacggggacacctacgaagggagctacgaattcggtaaaagacatggccaggggatctacaaatttaaaaatggtgctcgatatatcggagaatatgttagaaataaaaagcacggtcaaggcacttttatatatccagatggatccagatatgaaggagagtgggcaaatgacctgcggcacggccatggcgtatactactacatcaataatgacacctacactggagagtggtttgctcatcaaaggcatgggcaaggcacctatttatacgcggagacgggcagtaagtatgttggcacctgggtgaacggacagcaggagggcacggccgagctcattcacctgaaccacaggtaccagggcaagttcttgaacaaaaatcctgttggccctggaaagtatgtatttgatgttgggtgtgaacaacatggtgaatatcgtttaacagatatggaaagaggagaagaggaagaggaggaagaattagtaactgttgttccaaaatggaaagctacccaaatcactgaattggccctgtggacaccaactctccccaaaaagccgacctctacggatggacctggccaagacgctccaggagctgagagtgcaggagaacccggggaggaggcccaggctctgctggagggcttcgagggtgagatggacatgaggcctggagatgaagatgcagacgtcctccgggaagagagccgggagtatgaccaggaggagttccgctatgacatggatgagggaaacattaattctgaagatgaagaaactagacagtcagacctccaggactaagatgaagtgagccgagaggagatcgtatcataagaatgcttctgtcgttagccgggtgcagtgctgtgtgtatctagttccagctacttgagaggctgaggcaggaggattgcttgagtccagaaagtggcagttgcagtgagtggagatcgcgccactgctctccagcctgggtggcagagcgagaccctgtctcaaaaaataaacaaaaacaaaatgcttctgtcagttaacaatctttattagagggtttttagtctttctttctcagctgtatgttaagttggttgacaaatgcaaataaacgtctttattatcctttctttctgaaaaaaacaaaaaaatggccnncctggcctcagc

SEQ ID NO: 463662 - DNA, 566 bp, Homo sapiens
  misc_feature (515)..(515): n is a, c, g, or t
agcacctggttagcgcttaatgaatggtagctgtaattgtgtcaattttcattacccaggaatatgaggggggtcggaatgaggcaggcgaaaggcacggacgtgggagggcacggctacccaacggggacacctacgaagggagctacgaattcggtaaaagacatggccaggggatctacaaatttaaaaatggtgctcgatatatcggagaatatgttagaaataaaaagcacggtcaaggcacttttatatatccagatggatccagatatgaaggagagtgggcaaatgacctgcggcacggccatggcgtatactactacatcaataatgacacctacactggagagtggtttgctcatcaaaggcatgggcaaggcacctatttatacgcggagacgggcagtaagtatgttggcacctgggtgaacggacagcaggagggcacggccgagctcattcacctgaaccacaggtaccagggcaagttcttgaacaaaaatcctgttggncctggaaagtatgtatttgatgttggtaccgtcgacgtaagatcctctaga

SEQ ID NO: 463663 - DNA, 1712 bp, Homo sapiens
  misc_feature (1661)..(1661): n is a, c, g, or t
  misc_feature (1679)..(1679): n is a, c, g, or t
agcacctggttagcgcttaatgaatggtagctgtaattgtgtcaattttcattacccaggaatatgaggggggtcggaatgaggcaggcgaaaggcacggacgtgggagggcacggctacccaacggggacacctacgaagggagctacgaattcggtaaaagacatggccaggggatctacaaatttaaaaatggtgctcgatatatcggagaatatgttagaaataaaaagcacggtcaaggcacttttatatatccagatggatccagatatgaaggagagtgggcaaatgacctgcggcacggccatggcgtatactactacatcaataatgacacctacactggagagtggtttgctcatcaaaggcatgggcaaggcacctatttatacgcggagacgggcagtaagtatgttggcacctgggtgaacggacagcaggagggcacggccgagctcattcacctgaaccacaggtaccagggcaagttcttgaacaaaaatcctgttggccctggaaagtatgtatttgatgttgggtgtgaacaacatggtgaatatcgtttaacagatatggaaagaggagaagaggaagaggaggaagaattagtaactgttgttccaaaatggaaagctacccaaatcactgaattggccctgtggacaccaactctccccaaaaagccgacctctacggatggacctggccaagacgctccaggagctgagagtgcaggagaacccggggaggaggcccaggctctgctggagggcttcgagggtgagatggacatgaggcctggagatgaagatgcagacgtcctccgggaagagagccgggagtatgaccaggaggagttccgctatgacatggatgagggaaacattaattctgaagatgaagaaactagacagtcagacctccaggactaagatgaagtgagccgagaggagatcgtatcataagaatgcttctgtcgttagccgggtgcagtgctgtgtgtatctagttccagctacttgagaggctgaggcaggaggattgcttgagtccagaaagtggcagttgcagtgagtggagatcgcgccactgctctccagcctgggtggcagagcgagaccctgtctcaaaaaataaacaaaaacaaaatgcttctgtcagttaacaatctttattagagggtttttagtctttctttctcagctgtatgttaagttggttgacaaatgcaaataaacgtctttattatcctttctttctgaaaaaaaaaaagaaaatggacgtcgtggccctagtgggaggacctttggggccccttccctttatcatggggtaattcattgacctcttttcctcgcctaactacctccggcccttggtcgacgtgaaggctttaggtcacccaacccgggccacgctttgctgcgcataacgcgagtacttcccacgacacatcatcaatcctaatgctccctaaagggtgggaatataaaagggcctaattttgtgtccttctccctggttctccgtcgttgccacccctctcctttaccctcctccgcgactccgcgaaccccccacgttttattgaacgactcactccgccagaaagcaccgcgggaaggactcacgccccccctcggcgtccccgctccttnccatcctcagccgagttnatggatgcttatctccgcccccgggttcttgtt

SEQ ID NO: 463664 - DNA, 832 bp, Homo sapiens
tctaacctcatttattatgcttaaggctttttctcagctgacctgactttgctttaggtcattcttttttatgccagcactgtttgaaagtgcatgtcaagcggctagctccacatttggtcttcgaaagggaaacgcatgcagttaaaacgtaatgtacatgatggaattgggaggatcatagtctcagtttccccccctctttctcccatctaggagacctccgtggactgcagcaaaattaaaaataaagcacagacaacagaattattcttcactgagagagtttaatacgcgtttctaacaccatctatacttgctttgttgttcttgaggtcatcaacacacattctggttattccagagctagaagctcttctggttgctaactcagttataagaagatgaaagacataactagacttacgtatttcagtagtttgctctttaatttttcccttactcttagtttcaggcgacctccaagaagggtatcagtcgactggataaacagatgagaaagttcacagatataaggaaaaaaagcagatctgcacacgcagtgaaaatcagcattgagggcaacaaaatgccattgtgaccttgcctggaatgtgtccccatctctactctaagaaatgcgcaatggactctttggagaaagaagatattttaaaacatttttagtgtgtctgtaaatggttcagcgtgtatcagatgttgtcataggactcacatttctctcagttatatttaaaaccgttgtgtactttgtacaaaggaatactagtcatacttctataaactttacacaataaaatttcattctggt

SEQ ID NO: 463665 - DNA, 457 bp, Homo sapiens
cgactcagcaaagtgcatcgtgctgtcaagttcagcattgaaggcaacaggatgcccctataggcctggccctaccagagtgtatacacgagagtttcaggcgacctccaagaagggtatcagtcgactggataaacagatgagaaagttcacagatataaggaaaaaaagcagatctgcacacgcagtgaaaatcagcattgagggcaacaaaatgccattgtgaccttgcctggaatgtgtccccatctctactctaagaaatgcgcaatggactctttggagaaagaagatattttaaaacatttttagtgtgtctgtaaatggttcagcgtgtatcagatgttgtcataggactcacatttctctcagttatatttaaaaccgttgtgtactttgtacaaaggaatactagtcatacttctataaactttacacaataaaatttcattctggt

SEQ ID NO: 463666 - DNA, 601 bp, Homo sapiens
tggatcccccgggctgcaggcaacgacgaagaatgaacagcactggtggtcagacacccagaagagacctggaaaaggtgctgacaggagaggagaaggctcttagacctggagatcctggattctgtgcccgtgcaagggtcccaatgccttcaaacaaggactatgttgtcaggcccaaatggaatgtggaaatggagtcatccaggtttcaggcgacctccaagaagggtatcagtcgactggataaacagatgagaaagttcacagatataaggaaaaaaagcagatctgcacacgcagtgaaaatcagcattgagggcaacaaaatgccattgtgaccttgcctggaatgtgtccccatctctactctaagaaatgcgcaatggactctttggagaaagaagatattttaaaacatttttagtgtgtctgtaaatggttcagcgtgtatcagatgttgtcataggactcacatttctctcagttatatttaaaaccgttgtgtactttgtacaaaggaatactagtcatacttctataaactttacacaataaaatttcattctggtctggtttttggggggctgtctcttcattt

SEQ ID NO: 463667 - DNA, 455 bp, Homo sapiens
tggggatgtaaggaaaattgagaaaataattcattcaataaagattttattgctgtttgctaagtgctagactccttgttgtgctctgagaatataaaaacaaattaaaaatagtctatgctctcaaaagtgtaagtctttacaaggatgataggcaaagggaggtctttggtaaagccatgggctaagtgtgccaggtctgtgtttggaatggcaagtagactgaaggggttggacagtagtatggggcctgaggtggtagaagataaggttggaaataatagaccggtgaagggctttgaatcaagatgaggaattttcacgtcttgtgattccacaggaagtttttgaggctggatgtgaagccatctggtttgatttgatttagggtgctgatgccaatggcatcatgtaggatggattggagggcagtgggactgaggcagtgatacagc

SEQ ID NO: 463668 - DNA, 2733 bp, Homo sapiens
cgccattttggccccagcggtgcttctaggaagtagaacgccggctcgcatgcctgcccgcccgccagcctgccggatgatggtggtgctaccccagtacaggatgaacgggattcagggtcagacggtgaggatgatgtaaatgagcaacactccggatcagacactggaagtgtagaacgtcattcagagaatgaaactagtgatcgagaagatggcctccccaaaggacatcatgtgacagactctgagaacgatgagcccttaaatcttaatgctagtgactctgaaagtgaggagcttcacaggcaaaaggacagcgactctgaatctgaggaacgtgcagagcctcctgcaagcgattctgaaaatgaggatgtcaatcagcatgggagcgactctgagagtgaagagaccaggaaattacctggtagtgactctgaaaatgaggaacttcttaatgggcatgcaagtgactcagaaaacgaagatgttgggaagcatcccgccagtgattctgagattgaggagctccagaagagtcctgctagtgactctgaaacagaagatgctctaaaacctcaaatcagtgactctgagagtgaggaacccccaaggcaccaagccagtgactccgaaaatgaggagcctcccaaacctcgaatgagtgattctgaaagtgaggagcttcctaaacctcaggtcagtgattcagaaagtgaggaacccccaaggcaccaggccagtgactctgaaaatgaggagcttcccaaacctcgtatcagtgactcagaaagtgaggaccctccgaggcaccaggccagtgactcagaaaatgaagagcttcccaaaccccgaatcagtgattcggaaagtgaggatcccccaaggaaccaggccagtgattcggaaaatgaggagctacccaaaccccgagtcagtgactctgagagtgaggggcctcagaaggggcctgccagtgactcagaaactgaggatgcgtccagacacaaacagaagccagagtcagatgatgacagcgacagggagaataagggagaggatacagaaatgcagaatgactccttccattcagacagccatatggacagaaaaaagtttcacagttctgatagtgaggaggaagaacacaaaaagcaaaaaatggacagtgatgaagatgaaaaagagggtgaggaggagaaagtagcgaagagaaaagctgctgtgctttctgatagtgaagatgaagagaaagcatcagcaaagaagagtcgtgttgtctctgatgcagatgactctgacagtgatgctgtatcagacaagtcaggcaaaagagagaagaccatagcatctgacagtgaggaagaagctgggaaagaattgtctgataagaaaaatgaagagaaggatctgtttgggagtgacagtgagtcaggcaatgaagaagaaaatcttattgcagacatatttggagaatctggtgatgaagaggaagaagaatttacaggttttaaccaagaagatctggaagaagaaaaaggtgaaacacaggtaaaagaagcagaagattcagattctgatgataacataaagagaggaaaacatatggactttctgtcagattttgagatgatgttgcagcgaaaaaagagcatgagtggcaagcgcagacggaaccgcgatggtggcacctttattagtgatgcagacgacgtcgtgagtgccatgatcgtcaagatgaatgaagctgctgaggaagacagacagttgaacaatcaaaaaaagccagcactgaaaaaattaactttactgcctgctgtagttatgcaccttaagaagcaggaccttaaagaaacattcattgacagtggtgtgatgtctgccatcaaagaatggctctcacctctaccagataggagtttgcctgcactcaagatccgggaggagctgctgaagatcctgcaagagctgcctagtgtgagccaggagaccctgaagcatagtgggattggacgagcagtgatgtatctctataaacaccccaaggagtcaaggtctaacaaggacatggcagggaaattaatcaatgagtggtctaggcctatatttggtcttacctcaaactacaaaggaatgacaagagaagaaagggagcagagagatctagaacagatgcctcaacgacgaagaatgaacagcactggtggtcagacacccagaagagacctggaaaaggtgctgacaggagaggagaaggctcttagacctggagatcctggattctgtgcccgtgcaagggtcccaatgccttcaaacaaggactatgttgtcaggcccaaatggaatgtggaaatggagtcatccaggtttcaggcgacctccaagaagggtatcagtcgactggataaacagatgagaaagttcacagatataaggaaaaaaagcagatctgcacacgcagtgaaaatcagcattgagggcaacaaaatgccattgtgaccttgcctggaatgtgtccccatctctactctaagaaatgcgcaatggactctttggagaaagaagatattttaaaacatttttagtgtgtctgtaaatggttcagcgtgtatcagatgttgtcataggactcacatttctctcagttatatttaaaaccgttgtgtactttgtacaaaggaatactagtcatacttctataaactttacacaataaaatttcattctggt

SEQ ID NO: 463669 - DNA, 2337 bp, Homo sapiens
cgccattttggccccagcggtgcttctaggaagtagaacgccggctcgcatgcctgcccgcccgccagcctgccgggtacggccttttccgccggggcttccaggtcaaagaattcgcctttgccgctaccgctttcttaccctccgcacccgttaagttctccggtcgggcggcagtctctgaacacttagccgcgccatccggggtcacaccgcctggaaggaggtgacgggggcggcgcggggcgcggacactccccgctgagagtccgcctgccatggactcggaatattacagcggcgaccagtcagatgatggtggtgctaccccagtacaggatgaacgggattcagggtcagacggtgaggatgatgtaaatgagcaacactccggatcagacactggaagtgtagaacgtcattcagagtgactcagaaaatgaagagcttcccaaaccccgaatcagtgattcggaaagtgaggatcccccaaggaaccaggccagtgattcggaaaatgaggagctacccaaaccccgagtcagtgactctgagagtgaggggcctcagaaggggcctgccagtgactcagaaactgaggatgcgtccagacacaaacagaagccagagtcagatgatgacagcgacagggagaataagggagaggatacagaaatgcagaatgactccttccattcagacagccatatggacagaaaaaagtttcacagttctgatagtgaggaggaagaacacaaaaagcaaaaaatggacagtgatgaagatgaaaaagagggtgaggaggagaaagtagcgaagagaaaagctgctgtgctttctgatagtgaagatgaagagaaagcatcagcaaagaagagtcgtgttgtctctgatgcagatgactctgacagtgatgctgtatcagacaagtcaggcaaaagagagaagaccatagcatctgacagtgaggaagaagctgggaaagaattgtctgataagaaaaatgaagagaaggatctgtttgggagtgacagtgagtcaggcaatgaagaagaaaatcttattgcagacatatttggagaatctggtgatgaagaggaagaagaatttacaggttttaaccaagaagatctggaagaagaaaaaggtgaaacacaggtaaaagaagcagaagattcagattctgatgataacataaagagaggaaaacatatggactttctgtcagattttgagatgatgttgcagcgaaaaaagagcatgagtggcaagcgcagacggaaccgcgatggtggcacctttattagtgatgcagacgacgtcgtgagtgccatgatcgtcaagatgaatgaagctgctgaggaagacagacagttgaacaatcaaaaaaagccagcactgaaaaaattaactttactgcctgctgtagttatgcaccttaagaagcaggaccttaaagaaacattcattgacagtggtgtgatgtctgccatcaaagaatggctctcacctctaccagataggagtttgcctgcactcaagatccgggaggagctgctgaagatcctgcaagagctgcctagtgtgagccaggagaccctgaagcatagtgggattggacgagcagtgatgtatctctataaacaccccaaggagtcaaggtctaacaaggacatggcagggaaattaatcaatgagtggtctaggcctatatttggtcttacctcaaactacaaaggaatgacaagagaagaaagggagcagagagatctagaacagatgcctcaacgacgaagaatgaacagcactggtggtcagacacccagaagagacctggaaaaggtgctgacaggagaggagaaggctcttagacctggagatcctggattctgtgcccgtgcaagggtcccaatgccttcaaacaaggactatgttgtcaggcccaaatggaatgtggaaatggagtcatccaggtttcaggcgacctccaagaagggtatcagtcgactggataaacagatgagaaagttcacagatataaggaaaaaaagcagatctgcacacgcagtgaaaatcagcattgagggcaacaaaatgccattgtgaccttgcctggaatgtgtccccatctctactctaagaaatgcgcaatggactctttggagaaagaagatattttaaaacatttttagtgtgtctgtaaatggttcagcgtgtatcagatgttgtcataggactcacatttctctcagttatatttaaaaccgttgtgtactttgtacaaaggaatactagtcatacttctataaactttacacaataaaatttcattctggt

SEQ ID NO: 463670 - DNA, 2022 bp, Homo sapiens
acagtatcaatagactttacgttacccaaagagattacgaattgatagggcctctttctatgtagtgtgtctgtagaaataattggacaagaaaaaaatacggttcttccccgtgactcagaaaatgaagagcttcccaaaccccgaatcagtgattcggaaagtgaggatcccccaaggaaccaggccagtgattcggaaaatgaggagctacccaaaccccgagtcagtgactctgagagtgaggggcctcagaaggggcctgccagtgactcagaaactgaggatgcgtccagacacaaacagaagccagagtcagatgatgacagcgacagggagaataagggagaggatacagaaatgcagaatgactccttccattcagacagccatatggacagaaaaaagtttcacagttctgatagtgaggaggaagaacacaaaaagcaaaaaatggacagtgatgaagatgaaaaagagggtgaggaggagaaagtagcgaagagaaaagctgctgtgctttctgatagtgaagatgaagagaaagcatcagcaaagaagagtcgtgttgtctctgatgcagatgactctgacagtgatgctgtatcagacaagtcaggcaaaagagagaagaccatagcatctgacagtgaggaagaagctgggaaagaattgtctgataagaaaaatgaagagaaggatctgtttgggagtgacagtgagtcaggcaatgaagaagaaaatcttattgcagacatatttggagaatctggtgatgaagaggaagaagaatttacaggttttaaccaagaagatctggaagaagaaaaaggtgaaacacaggtaaaagaagcagaagattcagattctgatgataacataaagagaggaaaacatatggactttctgtcagattttgagatgatgttgcagcgaaaaaagagcatgagtggcaagcgcagacggaaccgcgatggtggcacctttattagtgatgcagacgacgtcgtgagtgccatgatcgtcaagatgaatgaagctgctgaggaagacagacagttgaacaatcaaaaaaagccagcactgaaaaaattaactttactgcctgctgtagttatgcaccttaagaagcaggaccttaaagaaacattcattgacagtggtgtgatgtctgccatcaaagaatggctctcacctctaccagataggagtttgcctgcactcaagatccgggaggagctgctgaagatcctgcaagagctgcctagtgtgagccaggagaccctgaagcatagtgggattggacgagcagtgatgtatctctataaacaccccaaggagtcaaggtctaacaaggacatggcagggaaattaatcaatgagtggtctaggcctatatttggtcttacctcaaactacaaaggaatgacaagagaagaaagggagcagagagatctagaacagatgcctcaacgacgaagaatgaacagcactggtggtcagacacccagaagagacctggaaaaggtgctgacaggagaggagaaggctcttagacctggagatcctggattctgtgcccgtgcaagggtcccaatgccttcaaacaaggactatgttgtcaggcccaaatggaatgtggaaatggagtcatccaggtttcaggcgacctccaagaagggtatcagtcgactggataaacagatgagaaagttcacagatataaggaaaaaaagcagatctgcacacgcagtgaaaatcagcattgagggcaacaaaatgccattgtgaccttgcctggaatgtgtccccatctctactctaagaaatgcgcaatggactctttggagaaagaagatattttaaaacatttttagtgtgtctgtaaatggttcagcgtgtatcagatgttgtcataggactcacatttctctcagttatatttaaaaccgttgtgtactttgtacaaaggaatactagtcatacttctataaactttacacaataaaatttcattctggt

SEQ ID NO: 463671 - DNA, 2915 bp, Homo sapiens
cgccattttggccccagcggtgcttctaggaagtagaacgccggctcgcatgcctgcccgcccgccagcctgccgggtacggccttttccgccggggcttccaggtcaaagaattcgcctttgccgctaccgctttcttaccctccgcacccgttaagttctccggtcgggcggcagtctctgaacacttagccgcgccatccggggtcacaccgcctggaaggaggtgacgggggcggcgcggggcgcggacactccccgctgagagtccgcctgccatggactcggaatattacagcggcgaccagtcagatgatggtggtgctaccccagtacaggatgaacgggattcagggtcagacggtgaggatgatgtaaatgagcaacactccggatcagacactggaagtgtagaacgtcattcagagaatgaaactagtgatcgagaagatggcctccccaaaggacatcatgtgacagactctgagaacgatgagcccttaaatcttaatgctagtgactctgaaagtgaggagcttcacaggcaaaaggacagcgactctgaatctgaggaacgtgcagagcctcctgcaagcgattctgaaaatgaggatgtcaatcagcatgggagcgactctgagagtgaagagaccaggaaattacctggtagtgactctgaaaatgaggaacttcttaatgggcatgcaagtgactcagaaaacgaagatgttgggaagcatcccgccagtgattctgagattgaggagctccagaagagtcctgctagtgactctgaaacagaagatgctctaaaacctcaaatcagtgactctgagagtgaggaacccccaaggcaccaagccagtgactccgaaaatgaggagcctcccaaacctcgaatgagtgattctgaaagtgaggagcttcctaaacctcaggtcagtgattcagaaagtgaggaacccccaaggcaccaggccagtgactctgaaaatgaggagcttcccaaacctcgtatcagtgactcagaaagtgaggaccctccgaggcaccaggccagtgactcagaaaatgaagagcttcccaaaccccgaatcagtgattcggaaagtgaggatcccccaaggaaccaggccagtgattcggaaaatgaggagctacccaaaccccgagtcagtgactctgagagtgaggggcctcagaaggggcctgccagtgactcagaaactgaggatgcgtccagacacaaacagaagccagagtcagatgatgacagcgacagggagaataagggagaggatacagaaatgcagaatgactccttccattcagacagccatatggacagaaaaaagtttcacagttctgatagtgaggaggaagaacacaaaaagcaaaaaatggacagtgatgaagatgaaaaagagggtgaggaggagaaagtagcgaagagaaaagctgctgtgctttctgatagtgaagatgaagagaaagcatcagcaaagaagagtcgtgttgtctctgatgcagatgactctgacagtgatgctgtatcagacaagtcaggcaaaagagagaagaccatagcatctgacagtgaggaagaagctgggaaagaattgtctgataagaaaaatgaagagaaggatctgtttgggagtgacagtgagtcaggcaatgaagaagaaaatcttattgcagacatatttggagaatctggtgatgaagaggaagaagaatttacaggttttaaccaagaagatctggaagaagaaaaaggtgaaacacaggtaaaagaagcagaagattcagattctgatgataacataaagagaggaaaacatatggactttctgtcagattttgagatgatgttgcagcgaaaaaagagcatgagtggcaagcgcagacggaaccgcgatggtggcacctttattagtgatgcagacgacgtcgtgagtgccatgatcgtcaagatgaatgaagctgctgaggaagacagacagttgaacaatcaaaaaaagccagcactgaaaaaattaactttactgcctgctgtagttatgcaccttaagaagcaggaccttaaagaaacattcattgacagtggtgtgatgtctgccatcaaagaatggctctcacctctaccagataggagtttgcctgcactcaagatccgggaggagctgctgaagatcctgcaagagctgcctagtgtgagccaggagaccctgaagcatagtgggattggacgagcagtgatgtatctctataaacaccccaaggagtcaaggtctaacaaggacatggcagggaaattaatcaatgagtggtctaggcctatatttggtcttacctcaaactacaaaggaatgacaagagaagaaagggagcagagagatctagaacagatgcctcaacgacgaagaatgaacagcactggtggtcagacacccagaagagacctgggtgcccgtgcaagggtcccaatgccttcaaacaaggactatgttgtcaggcccaaatggaatgtggaaatggagtcatccaggtttcaggcgacctccaagaagggtatcagtcgactggataaacagatgagaaagttcacagatataaggaaaaaaagcagatctgcacacgcagtgaaaatcagcattgagggcaacaaaatgccattgtgaccttgcctggaatgtgtccccatctctactctaagaaatgcgcaatggactctttggagaaagaagatattttaaaacatttttagtgtgtctgtaaatggttcagcgtgtatcagatgttgtcataggactcacatttctctcagttatatttaaaaccgttgtgtactttgtacaaaggaatactagtcatacttctataaactttacacaataaaatttcattctggt

SEQ ID NO: 463672 - DNA, 3020 bp, Homo sapiens
  misc_feature (2971)..(2972): n is a, c, g, or t
  misc_feature (2991)..(2991): n is a, c, g, or t
  misc_feature (2995)..(2995): n is a, c, g, or t
cgccattttggccccagcggtgcttctaggaagtagaacgccggctcgcatgcctgcccgcccgccagcctgccgggtacggccttttccgccggggcttccaggtcaaagaattcgcctttgccgctaccgctttcttaccctccgcacccgttaagttctccggtcgggcggcagtctctgaacacttagccgcgccatccggggtcacaccgcctggaaggaggtgacgggggcggcgcggggcgcggacactccccgctgagagtccgcctgccatggactcggaatattacagcggcgaccagtcagatgatggtggtgctaccccagtacaggatgaacgggattcagggtcagacggtgaggatgatgtaaatgagcaacactccggatcagacactggaagtgtagaacgtcattcagagaatgaaactagtgatcgagaagatggcctccccaaaggacatcatgtgacagactctgagaacgatgagcccttaaatcttaatgctagtgactctgaaagtgaggagcttcacaggcaaaaggacagcgactctgaatctgaggaacgtgcagagcctcctgcaagcgattctgaaaatgaggatgtcaatcagcatgggagcgactctgagagtgaagagaccaggaaattacctggtagtgactctgaaaatgaggaacttcttaatgggcatgcaagtgactcagaaaacgaagatgttgggaagcatcccgccagtgattctgagattgaggagctccagaagagtcctgctagtgactctgaaacagaagatgctctaaaacctcaaatcagtgactctgagagtgaggaacccccaaggcaccaagccagtgactccgaaaatgaggagcctcccaaacctcgaatgagtgattctgaaagtgaggagcttcctaaacctcaggtcagtgattcagaaagtgaggaacccccaaggcaccaggccagtgactctgaaaatgaggagcttcccaaacctcgtatcagtgactcagaaagtgaggaccctccgaggcaccaggccagtgactcagaaaatgaagagcttcccaaaccccgaatcagtgattcggaaagtgaggatcccccaaggaaccaggccagtgattcggaaaatgaggagctacccaaaccccgagtcagtgactctgagagtgaggggcctcagaaggggcctgccagtgactcagaaactgaggatgcgtccagacacaaacagaagccagagtcagatgatgacagcgacagggagaataagggagaggatacagaaatgcagaatgactccttccattcagacagccatatggacagaaaaaagtttcacagttctgatagtgaggaggaagaacacaaaaagcaaaaaatggacagtgatgaagatgaaaaagagggtgaggaggagaaagtagcgaagagaaaagctgctgtgctttctgatagtgaagatgaagagaaagcatcagcaaagaagagtcgtgttgtctctgatgcagatgactctgacagtgatgctgtatcagacaagtcaggcaaaagagagaagaccatagcatctgacagtgaggaagaagctgggaaagaattgtctgataagaaaaatgaagagaaggatctgtttgggagtgacagtgagtcaggcaatgaagaagaaaatcttattgcagacatatttggagaatctggtgatgaagaggaagaagaatttacaggttttaaccaagaagatctggaagaagaaaaaggtgaaacacaggtaaaagaagcagaagattcagattctgatgataacataaagagaggaaaacatatggactttctgtcagattttgagatgatgttgcagcgaaaaaagagcatgagtggcaagcgcagacggaaccgcgatggtggcacctttattagtgatgcagacgacgtcgtgagtgccatgatcgtcaagatgaatgaagctgctgaggaagacagacagttgaacaatcaaaaaaagccagcactgaaaaaattaactttactgcctgctgtagttatgcaccttaagaagcaggaccttaaagaaacattcattgacagtggtgtgatgtctgccatcaaagaatggctctcacctctaccagataggagtttgcctgcactcaagatccgggaggagctgctgaagatcctgcaagagctgcctagtgtgagccaggagaccctgaagcatagtgggattggacgagcagtgatgtatctctataaacaccccaaggagtcaaggtctaacaaggacatggcagggaaattaatcaatgagtggtctaggcctatatttggtcttacctcaaactacaaaggaatgacaagagaagaaagggagcagagagatctagaacagatgcctcaacgacgaagaatgaacagcactggtggtcagacacccagaagagacctggaaaaggtgctgacaggagaggagaaggctcttagacctggagatcctggattctgtgcccgtgcaagggtcccaatgccttcaaacaaggactatgttgtcaggcccaaatggaatgtggaaatggagtcatccaggtttcaggcgacctccaagaagggtatcagtcgactggataaacagatgagaaagttcacagatataaggaaaaaaagcagatctgcacacgcagtgaaaatcagcattgagggcaacaaaatgccattgtgaccttgcctggaatgtgtccccatctctactctaagaaatgcgcaatggactctttggagaaagaagatattttaaaacatttttagtgtgtctgtaaatggttcagcgtgtatcagatgttgtcataggactcacatttctctcagttatatttaaaaccgttgtgtactttgtacaaaggaatactagtcatacttctataaactttacacaataaaatttcattctggtcnngatgcggcaagcttttttnttcntcctccctatacgtaaatccctttc

SEQ ID NO: 463673 - DNA, 3120 bp, Homo sapiens
cgccattttggccccagcggtgcttctaggaagtagaacgccggctcgcatgcctgcccgcccgccagcctgccgggtacggccttttccgccggggcttccaggtcaaagaattcgcctttgccgctaccgctttcttaccctccgcacccgttaagttctccggtcgggcggcagtctctgaacacttagccgcgccatccggggtcacaccgcctggaaggaggtgacgggggcggcgcggggcgcggacactccccgctgagagtccgcctgccatggactcggaatattacagcggcgaccagtcagatgatggtggtgctaccccagtacaggatgaacgggattcagggtcagacggtgaggatgatgtaaatgagcaacactccggatcagacactggaagtgtagaacgtcattcagagaatgaaactagtgatcgagaagatggcctccccaaaggacatcatgtgacagactctgagaacgatgagcccttaaatcttaatgctagtgactctgaaagtgaggagcttcacaggcaaaaggacagcgactctgaatctgaggaacgtgcagagcctcctgcaagcgattctgaaaatgaggatgtcaatcagcatgggagcgactctgagagtgaagagaccaggaaattacctggtagtgactctgaaaatgaggaacttcttaatgggcatgcaagtgactcagaaaacgaagatgttgggaagcatcccgccagtgattctgagattgaggagctccagaagagtcctgctagtgactctgaaacagaagatgctctaaaacctcaaatcagtgactctgagagtgaggaacccccaaggcaccaagccagtgactccgaaaatgaggagcctcccaaacctcgaatgagtgattctgaaagtgaggagcttcctaaacctcaggtcagtgattcagaaagtgaggaacccccaaggcaccaggccagtgactctgaaaatgaggagcttcccaaacctcgtatcagtgactcagaaagtgaggaccctccgaggcaccaggccagtgactcagaaaatgaagagcttcccaaaccccgaatcagtgattcggaaagtgaggatcccccaaggaaccaggccagtgattcggaaaatgaggagctacccaaaccccgagtcagtgactctgagagtgaggggcctcagaaggggcctgccagtgactcagaaactgaggatgcgtccagacacaaacagaagccagagtcagatgatgacagcgacagggagaataagggagaggatacagaaatgcagaatgactccttccattcagacagccatatggacagaaaaaagtttcacagttctgatagtgaggaggaagaacacaaaaagcaaaaaatggacagtgatgaagatgaaaaagagggtgaggaggagaaagtagcgaagagaaaagctgctgtgctttctgatagtgaagatgaagagaaagcatcagcaaagaagagtcgtgttgtctctgatgcagatgactctgacagtgatgctgtatcagacaagtcaggcaaaagagagaagaccatagcatctgacagtgaggaagaagctgggaaagaattgtctgataagaaaaatgaagagaaggatctgtttgggagtgacagtgagtcaggcaatgaagaagaaaatcttattgcagacatatttggagaatctggtgatgaagaggaagaagaatttacaggttttaaccaagaagatctggaagaagaaaaaggtgaaacacaggtaaaagaagcagaagattcagattctgatgataacataaagagaggaaaacatatggactttctgtcagattttgagatgatgttgcagcgaaaaaagagcatgagtggcaagcgcagacggaaccgcgatggtggcacctttattagtgatgcagacgacgtcgtgagtgccatgatcgtcaagatgaatgaagctgctgaggaagacagacagttgaacaatcaaaaaaagccagcactgaaaaaattaactttactgcctgctgtagttatgcaccttaagaagcaggaccttaaagaaacattcattgacagtggtgtgatgtctgccatcaaagaatggctctcacctctaccagataggagtttgcctgcactcaagatccgggaggagctgctgaagatcctgcaagagctgcctagtgtgagccaggagaccctgaagcatagtgggattggacgagcagtgatgtatctctataaacaccccaaggagtcaaggtctaacaaggacatggcagggaaattaatcaatgagtggtctaggcctatatttggtcttacctcaaactacaaaggaatgacaagagaagaaagggagcagagagatctagaacagatgcctcaacgacgaagaatgaacagcactggtggtcagacacccagaagagacctggaaaaggtgctgacaggagaggagaaggctcttagacctggagatcctggattctgtgcccgtgcaagggtcccaatgccttcaaacaaggactatgttgtcaggcccaaatggaatgtggaaatggagtcatccaggctcttgaagtttgtctgattcagagaggactgttttctggtcgcttatctagccaaaccacaaattgagcaatagagaaaggaaaagtattacccaggattaaagtttattgctgatgaatttttcttcagtcttaattcaacattatcagtttcaggcgacctccaagaagggtatcagtcgactggataaacagatgagaaagttcacagatataaggaaaaaaagcagatctgcacacgcagtgaaaatcagcattgagggcaacaaaatgccattgtgaccttgcctggaatgtgtccccatctctactctaagaaatgcgcaatggactctttggagaaagaagatattttaaaacatttttagtgtgtctgtaaatggttcagcgtgtatcagatgttgtcataggactcacatttctctcagttatatttaaaaccgttgtgtactttgtacaaaggaatactagtcatacttctataaactttacacaataaaatttcattctggt

SEQ ID NO: 463674 - DNA, 3275 bp, Homo sapiens
cgccattttggccccagcggtgcttctaggaagtagaacgccggctcgcatgcctgcccgcccgccagcctgccgggtacggccttttccgccggggcttccaggtcaaagaattcgcctttgccgctaccgctttcttaccctccgcacccgttaagttctccggtcgggcggcagtctctgaacacttagccgcgccatccggggtcacaccgcctggaaggaggtgacgggggcggcgcggggcgcggacactccccgctgagagtccgcctgccatggactcggaatattacagcggcgaccagtcagatgatggtggtgctaccccagtacaggatgaacgggattcagggtcagacggtgaggatgatgtaaatgagcaacactccggatcagacactggaagtgtagaacgtcattcagagaatgaaactagtgatcgagaagatggcctccccaaaggacatcatgtgacagactctgagaacgatgagcccttaaatcttaatgctagtgactctgaaagtgaggagcttcacaggcaaaaggacagcgactctgaatctgaggaacgtgcagagcctcctgcaagcgattctgaaaatgaggatgtcaatcagcatgggagcgactctgagagtgaagagaccaggaaattacctggtagtgactctgaaaatgaggaacttcttaatgggcatgcaagtgactcagaaaacgaagatgttgggaagcatcccgccagtgattctgagattgaggagctccagaagagtcctgctagtgactctgaaacagaagatgctctaaaacctcaaatcagtgactctgagagtgaggaacccccaaggcaccaagccagtgactccgaaaatgaggagcctcccaaacctcgaatgagtgattctgaaagtgaggagcttcctaaacctcaggtcagtgattcagaaagtgaggaacccccaaggcaccaggccagtgactctgaaaatgaggagcttcccaaacctcgtatcagtgactcagaaagtgaggaccctccgaggcaccaggccagtgactcagaaaatgaagagcttcccaaaccccgaatcagtgattcggaaagtgaggatcccccaaggaaccaggccagtgattcggaaaatgaggagctacccaaaccccgagtcagtgactctgagagtgaggggcctcagaaggggcctgccagtgactcagaaactgaggatgcgtccagacacaaacagaagccagagtcagatgatgacagcgacagggagaataagggagaggatacagaaatgcagaatgactccttccattcagacagccatatggacagaaaaaagtttcacagttctgatagtgaggaggaagaacacaaaaagcaaaaaatggacagtgatgaagatgaaaaagagggtgaggaggagaaagtagcgaagagaaaagctgctgtgctttctgatagtgaagatgaagagaaagcatcagcaaagaagagtcgtgttgtctctgatgcagatgactctgacagtgatgctgtatcagacaagtcaggcaaaagagagaagaccatagcatctgacagtgaggaagaagctgggaaagaattgtctgataagaaaaatgaagagaaggatctgtttgggagtgacagtgagtcaggcaatgaagaagaaaatcttattgcagacatatttggagaatctggtgatgaagaggaagaagaatttacaggttttaaccaagaagatctggaagaagaaaaaggtgaaacacaggtaaaagaagcagaagattcagattctgatgataacataaagagaggaaaacatatggactttctgtcagattttgagatgatgttgcagcgaaaaaagagcatgagtggcaagcgcagacggaaccgcgatggtggcacctttattagtgatgcagacgacgtcgtgagtgccatgatcgtcaagatgaatgaagctgctgaggaagacagacagttgaacaatcaaaaaaagccagcactgaaaaaattaactttactgcctgctgtagttatgcaccttaagaagcaggaccttaaagaaacattcattgacagtggtgtgatgtctgccatcaaagaatggctctcacctctaccagataggagtttgcctgcactcaagatccgggaggagctgctgaagatcctgcaagagctgcctagtgtgagccaggagaccctgaagcatagtgggattggacgagcagtgatgtatctctataaacaccccaaggagtcaaggtctaacaaggacatggcagggaaattaatcaatgagtggtctaggcctatatttggtcttacctcaaactacaaaggaatgacaagagaagaaagggagcagagagatctagaacagatgcctcaacgacgaagaatgaacagcactggtggtcagacacccagaagagacctggaaaaggtgctgacaggagaggagaaggctcttagacctggagatcctggattctgtgcccgtgcaagggtcccaatgccttcaaacaaggactatgttgtcaggcccaaatggaatgtggaaatggagtcatccagggttttgctgttactgctcagtgtagtcacaccttgaataagaaatggaaaaccttgggatgttgataaagctaatatcctgaggaagaacttcagtgggtcccagctgagtaggagatgggattcaacagtactggtctaatgtgctggagtggcccaggcggaggcccacttgcagagactaatgggagcctcaagagaaaatctaccataagaaaaggaccagtctgatagcaagcccagcttcccaagaagatagaaggttggaggcaagctgctgtccaggtatgtcccaaaccagccaacttgaaggtaagtttgctccctggggagagaagggctctaggtgtgaactaaaagctgtgtccatagacactgtaacactggagttcaaaaaatgttgctgtggaacggcccttctcatccaaacccagacggaatgttctcacctgccaagagtagtgtcttgtattgaggcacagtggtagctttctggatccacaggcaaggccctgtggagtctcagaataatgataaatcctctggatgacctaggggctggtgaggtgagtggagcaccctactgtggtgtgtctgtaggaccactggagcctgatgctgccaaagcatgacctgaccagccctggcaactggtttaggatcatacaac

SEQ ID NO: 463675 - DNA, 791 bp, Homo sapiens
cgccattttggccccagcggtgcttctaggaagtagaacgccggctcgcatgcctgcccgcccgccagcctgccgggtacggccttttccgccggggcttccaggtcaaagaattcgcctttgccgctaccgctttcttaccctccgcacccgttaagttctccggtcgggcggcagtctctgaacacttagccgcgccatccggggtcacaccgcctggaaggaggtgacgggggcggcgcggggcgcggacactccccgctgagagtccgcctgccatggactcggaatattacagcggcgaccagtcagatgatggtggtgctaccccagtacaggatgaacgggattcagggtcagacggtgaggatgatgtaaatgagcaacactccggatcagacactggaagtgtagaacgtcattcagagtttcaggcgacctccaagaagggtatcagtcgactggataaacagatgagaaagttcacagatataaggaaaaaaagcagatctgcacacgcagtgaaaatcagcattgagggcaacaaaatgccattgtgaccttgcctggaatgtgtccccatctctactctaagaaatgcgcaatggactctttggagaaagaagatattttaaaacatttttagtgtgtctgtaaatggttcagcgtgtatcagatgttgtcataggactcacatttctctcagttatatttaaaaccgttgtgtactttgtacaaaggaatactagtcatacttctataaactttacacaataaaatttcattctggt

SEQ ID NO: 463676 - DNA, 882 bp, Homo sapiens
cgccattttggccccagcggtgcttctaggaagtagaacgccggctcgcatgcctgcccgcccgccagcctgccgggtacggccttttccgccggggcttccaggtcaaagaattcgcctttgccgctaccgctttcttaccctccgcacccgttaagttctccggtcgggcggcagtctctgaacacttagccgcgccatccggggtcacaccgcctggaaggaggtgacgggggcggcgcggggcgcggacactccccgctgagagtccgcctgccatggactcggaatattacagcggcgaccagtcagatgatggtggtgctaccccagtacaggatgaacgggattcagggtcagacggtgaggatgatgtaaatgagcaacactccggatcagacactggaagtgtagaacgtcattcagagaatgaaactagtgatcgagaagatggcctccccaaaggacatcatgtgacagactctgagaacgatgagcccttaaatcttaatgctagtgactctgaaagtgaggagcttcacaggcaaaaggacagcgactctgaatctgaggaacgtgcagagcctcctgcaagcgattctgaaaatgaggatgtcaatcagcatgggagcgactctgagagtgaagagaccaggaaattacctggtagtgactctgaaaatgaggaacttcttaatgggcatgcaagtgactcagaaaacgaagatgttgggaagcatcccgccagtgattctgagattgaggagctccagaagagtcctgctagtgactctgaaacagaagatgctctaaaacctcaaatcagtgactctgagagtgagacccctcagactcttgcatccagacggggatcctcagatc

SEQ ID NO: 463677 - DNA, 321 bp, Homo sapiens
aatagttatggtctaagtttgatttttagtttgctctttttctgagttattaggttctaatattcctggtatctccttgtttacttttttttcagcactggtggtcagacacccagaagagacctggaaaaggtgctgacaggagaggagaagtaaggttttaatgttaatttttcttcctagactatatagagaatttccgtttgctgctttaagaaaagtagtaaatgaaatgatgttatgctctcatttgtgggaggtgactttcattttaacgtttagtatctacaaagcattgtattgggtactctggggatgtaa

SEQ ID NO: 463678 - DNA, 599 bp, Homo sapiens
tttcactgtagatgtcattcatcttacaccataagttggtttttgttttgtttttaatcagatgatggtggtgctaccccagtacaggatgaacgggattcagggtcagacggtgaggatgatgtaaatgagcaacactccggatcagacactggaagtgtagaacgtcattcagaggtattggctaaccaacatctttgggagggcttttcccttgcgttctgtgagatctgttatattataggagttacagaatctctgtgacagagtttagggtttaatctctgagagtaaaggagcataagttaatagaaaaccgcttgaaaaataaatagggatggtctggttactgttgaaatcacagtgaaatatgttctgattgggtcacatttcaaatgttaggcagttttcaactgtgcatattgattcagaaaatgggcccggcctttgatatttgactaagtttccctattctgcaataatgtcatagtggggcattgagcatttgcaatctgaagaaacaccacttgaaatagaaagttatgggggttatcacctgtcaacatttatgtcagcatttgcccttctgattttgaact

SEQ ID NO: 463679 - DNA, 2969 bp, Homo sapiens
cgccattttggccccagcggtgcttctaggaagtagaacgccggctcgcatgcctgcccgcccgccagcctgccgggtacggccttttccgccggggcttccaggtcaaagaattcgcctttgccgctaccgctttcttaccctccgcacccgttaagttctccggtcgggcggcagtctctgaacacttagccgcgccatccggggtcacaccgcctggaaggaggtgacgggggcggcgcggggcgcggacactccccgctgagagtccgcctgccatggactcggaatattacagcggcgaccagtcagatgatggtggtgctaccccagtacaggatgaacgggattcagggtcagacggtgaggatgatgtaaatgagcaacactccggatcagacactggaagtgtagaacgtcattcagagaatgaaactagtgatcgagaagatggcctccccaaaggacatcatgtgacagactctgagaacgatgagcccttaaatcttaatgctagtgactctgaaagtgaggagcttcacaggcaaaaggacagcgactctgaatctgaggaacgtgcagagcctcctgcaagcgattctgaaaatgaggatgtcaatcagcatgggagcgactctgagagtgaagagaccaggaaattacctggtagtgactctgaaaatgaggaacttcttaatgggcatgcaagtgactcagaaaacgaagatgttgggaagcatcccgccagtgattctgagattgaggagctccagaagagtcctgctagtgactctgaaacagaagatgctctaaaacctcaaatcagtgactctgagagtgaggaacccccaaggcaccaagccagtgactccgaaaatgaggagcctcccaaacctcgaatgagtgattctgaaagtgaggagcttcctaaacctcaggtcagtgattcagaaagtgaggaacccccaaggcaccaggccagtgactctgaaaatgaggagcttcccaaacctcgtatcagtgactcagaaagtgaggaccctccgaggcaccaggccagtgactcagaaaatgaagagcttcccaaaccccgaatcagtgattcggaaagtgaggatcccccaaggaaccaggccagtgattcggaaaatgaggagctacccaaaccccgagtcagtgactctgagagtgaggggcctcagaaggggcctgccagtgactcagaaactgaggatgcgtccagacacaaacagaagccagagtcagatgatgacagcgacagggagaataagggagaggatacagaaatgcagaatgactccttccattcagacagccatatggacagaaaaaagtttcacagttctgatagtgaggaggaagaacacaaaaagcaaaaaatggacagtgatgaagatgaaaaagagggtgaggaggagaaagtagcgaagagaaaagctgctgtgctttctgatagtgaagatgaagagaaagcatcagcaaagaagagtcgtgttgtctctgatgcagatgactctgacagtgatgctgtatcagacaagtcaggcaaaagagagaagaccatagcatctgacagtgaggaagaagctgggaaagaattgtctgataagaaaaatgaagagaaggatctgtttgggagtgacagtgagtcaggcaatgaagaagaaaatcttattgcagacatatttggagaatctggtgatgaagaggaagaagaatttacaggttttaaccaagaagatctggaagaagaaaaaggtgaaacacaggtaaaagaagcagaagattcagattctgatgataacataaagagaggaaaacatatggactttctgtcagattttgagatgatgttgcagcgaaaaaagagcatgagtggcaagcgcagacggaaccgcgatggtggcacctttattagtgatgcagacgacgtcgtgagtgccatgatcgtcaagatgaatgaagctgctgaggaagacagacagttgaacaatcaaaaaaagccagcactgaaaaaattaactttactgcctgctgtagttatgcaccttaagaagcaggaccttaaagaaacattcattgacagtggtgtgatgtctgccatcaaagaatggctctcacctctaccagataggagtttgcctgcactcaagatccgggaggagctgctgaagatcctgcaagagctgcctagtgtgagccaggagaccctgaagcatagtgggattggacgagcagtgatgtatctctataaacaccccaaggagtcaaggtctaacaaggacatggcagggaaattaatcaatgagtggtctaggcctatatttggtcttacctcaaactacaaaggaatgacaagagaagaaagggagcagagagatctagaacagatgcctcaacgacgaagaatgaacagcactggtggtcagacacccagaagagacctggaaaaggtgctgacaggagaggagaaggctcttagacctggagatcctggattctgtgcccgtgcaagggtcccaatgccttcaaacaaggactatgttgtcaggcccaaatggaatgtggaaatggagtcatccaggtttcaggcgacctccaagaagggtatcagtcgactggataaacagatgagaaagttcacagatataaggaaaaaaagcagatctgcacacgcagtgaaaatcagcattgagggcaacaaaatgccattgtgaccttgcctggaatgtgtccccatctctactctaagaaatgcgcaatggactctttggagaaagaagatattttaaaacatttttagtgtgtctgtaaatggttcagcgtgtatcagatgttgtcataggactcacatttctctcagttatatttaaaaccgttgtgtactttgtacaaaggaatactagtcatacttctataaactttacacaataaaatttcattctggt

SEQ ID NO: 463680 - DNA, 2007 bp, Homo sapiens
acttgttacccacatcacacaattcacctcttagcattttcttttttcaaagccgtacttcctaatgaattgtaagcttctcaaggaaaatgggaatttccagagagaaaccacttctcccctttcttctcttcccacgtcctcttcaggagcctataattgggctctgccagcatactctgactggctaacgaagggtcagatatctgcagtagtaacaaaaggctctttttctacatgtctacacctcctggggagtctttgcttaaacctctactggccctcctccgatccaaaggcaagaatgttcccctctctgtccaagactaaaatgaacaacgggaatttggaaggtctgtttggctttattaacaggctcagaataaaggggaaaggtctctggccttgtcacaggcaaacaagggggtcatctgcacgcgttttatctgagtcacatggagacgggtggttctttacagtgtgccgttccagaaacacaaatagatgagggggtttcttaatcaccgctgttttccaggaacacagggctcaggtaaagttcaacttcaccttcctccggtgtttcatcaggggaacccttctggaagcaaagacgtgtacttcttactgttggctaaatggcttcttaacaaggaaattaaatcgttgtttagaatgaaagagaggaagacgccgggagaggaggcgctgtggatcgcgccagttagtaacgcatcacagctcgcgggcgtcatactacaagtcccagtgagcaacgcccgctttcttgcctactgcgggcgggaaccaggcgcctctgggcctgacgggaaagacagtggtttggctgaatgacggaaaagtcatttgagcaggtcttcatttttcggaagagtatctcaaaagctcttcaaacaaggcacggacacagaatctaggaaatgataaagaatcaatgataacgttattaccacgggggtcagaccaggatccacccgaggaagatgatggtggtgctaccccagtacaggatgaacgggattcagggtcagacggtgaggatgatgtaaatgagcaacactccggatcagacactggaagtgtagaacgtcattcagaggtattggctaaccaacatctttgggagggcttttcccttgcgttctgtgagatctgttatattataggagttacagaatctctgtgacagagtttagggtttaatctctgagagtaaaggagcataagttaatagaaaaccgcttgaaaaataaatagggatggtctggttactgttgaaatcacagtgaaatatgttctgattgggtcacatttcaaatgttaggcagttttcaactgtgcatattgattcagaaaatgggcccggcctttgatatttgactaagtttccctattctgcaataatgtcatagtggggcattgagcatttgcaatctgaagaaacaccacttgaaatagaaagttatgggggttatcacctgtcaacatttatgtcagcatttgcccttctgattttgaactgtaaaagatacatttttacagaatagcctctgatcttaaggtcagtgtatcagataaatgtaaataaatgtgtaaatcacctttcagtgaagtgtgagcgtacaagatgccatggggatatgaagggagggaatggctaaccagctccgtctcttctttatgttattgctgccacaaattacatctttatatattgtgtacccactagcaaagatttatagttttttatgcttttctattttaagtcctgtaaaataataaggggagttacgaaccaaaattgcaataatactgatttttatatttgtctatgtgtttaccttgaaaggaaaaatgtatatttttatacatctttgagttactgtctagtgttgtttacttacaacctgaaggaagggactccttttaacgtttcttgcagggtaggtctagtggtaatgaattccttcagcttttgtttattta

SEQ ID NO: 463681 - DNA, 3661 bp, Homo sapiens
acttgttacccacatcacacaattcacctcttagcattttcttttttcaaagccgtacttcctaatgaattgtaagcttctcaaggaaaatgggaatttccagagagaaaccacttctcccctttcttctcttcccacgtcctcttcaggagcctataattgggctctgccagcatactctgactggctaacgaagggtcagatatctgcagtagtaacaaaaggctctttttctacatgtctacacctcctggggagtctttgcttaaacctctactggccctcctccgatccaaaggcaagaatgttcccctctctgtccaagactaaaatgaacaacgggaatttggaaggtctgtttggctttattaacaggctcagaataaaggggaaaggtctctggccttgtcacaggcaaacaagggggtcatctgcacgcgttttatctgagtcacatggagacgggtggttctttacagtgtgccgttccagaaacacaaatagatgagggggtttcttaatcaccgctgttttccaggaacacagggctcaggtaaagttcaacttcaccttcctccggtgtttcatcaggggaacccttctggaagcaaagacgtgtacttcttactgttggctaaatggcttcttaacaaggaaattaaatcgttgtttagaatgaaagagaggaagacgccgggagaggaggcgctgtggatcgcgccagttagtaacgcatcacagctcgcgggcgtcatactacaagtcccagtgagcaacgcccgctttcttgcctactgcgggcgggaaccaggcgcctctgggcctgacgggaaagacagtggtttggctgaatgacggaaaagtcatttgagcaggtcttcatttttcggaagagtatctcaaaagctcttcaaacaaggcacggacacagaatctaggaaatgataaagaatcaatgataacgttattaccacgggggtcagaccaggatccacccgaggaagatgatggtggtgctaccccagtacaggatgaacgggattcagggtcagacggtgaggatgatgtaaatgagcaacactccggatcagacactggaagtgtagaacgtcattcagagaatgaaactagtgatcgagaagatggcctccccaaaggacatcatgtgacagactctgagaacgatgagcccttaaatcttaatgctagtgactctgaaagtgaggagcttcacaggcaaaaggacagcgactctgaatctgaggaacgtgcagagcctcctgcaagcgattctgaaaatgaggatgtcaatcagcatgggagcgactctgagagtgaagagaccaggaaattacctggtagtgactctgaaaatgaggaacttcttaatgggcatgcaagtgactcagaaaacgaagatgttgggaagcatcccgccagtgattctgagattgaggagctccagaagagtcctgctagtgactctgaaacagaagatgctctaaaacctcaaatcagtgactctgagagtgaggaacccccaaggcaccaagccagtgactccgaaaatgaggagcctcccaaacctcgaatgagtgattctgaaagtgaggagcttcctaaacctcaggtcagtgattcagaaagtgaggaacccccaaggcaccaggccagtgactctgaaaatgaggagcttcccaaacctcgtatcagtgactcagaaagtgaggaccctccgaggcaccaggccagtgactcagaaaatgaagagcttcccaaaccccgaatcagtgattcggaaagtgaggatcccccaaggaaccaggccagtgattcggaaaatgaggagctacccaaaccccgagtcagtgactctgagagtgaggggcctcagaaggggcctgccagtgactcagaaactgaggatgcgtccagacacaaacagaagccagagtcagatgatgacagcgacagggagaataagggagaggatacagaaatgcagaatgactccttccattcagacagccatatggacagaaaaaagtttcacagttctgatagtgaggaggaagaacacaaaaagcaaaaaatggacagtgatgaagatgaaaaagagggtgaggaggagaaagtagcgaagagaaaagctgctgtgctttctgatagtgaagatgaagagaaagcatcagcaaagaagagtcgtgttgtctctgatgcagatgactctgacagtgatgctgtatcagacaagtcaggcaaaagagagaagaccatagcatctgacagtgaggaagaagctgggaaagaattgtctgataagaaaaatgaagagaaggatctgtttgggagtgacagtgagtcaggcaatgaagaagaaaatcttattgcagacatatttggagaatctggtgatgaagaggaagaagaatttacaggttttaaccaagaagatctggaagaagaaaaaggtgaaacacaggtaaaagaagcagaagattcagattctgatgataacataaagagaggaaaacatatggactttctgtcagattttgagatgatgttgcagcgaaaaaagagcatgagtggcaagcgcagacggaaccgcgatggtggcacctttattagtgatgcagacgacgtcgtgagtgccatgatcgtcaagatgaatgaagctgctgaggaagacagacagttgaacaatcaaaaaaagccagcactgaaaaaattaactttactgcctgctgtagttatgcaccttaagaagcaggaccttaaagaaacattcattgacagtggtgtgatgtctgccatcaaagaatggctctcacctctaccagataggagtttgcctgcactcaagatccgggaggagctgctgaagatcctgcaagagctgcctagtgtgagccaggagaccctgaagcatagtgggattggacgagcagtgatgtatctctataaacaccccaaggagtcaaggtctaacaaggacatggcagggaaattaatcaatgagtggtctaggcctatatttggtcttacctcaaactacaaaggaatgacaagagaagaaagggagcagagagatctagaacagatgcctcaacgacgaagaatgaacagcactggtggtcagacacccagaagagacctggaaaaggtgctgacaggagaggagaaggctcttagacctggagatcctggattctgtgcccgtgcaagggtcccaatgccttcaaacaaggactatgttgtcaggcccaaatggaatgtggaaatggagtcatccaggtttcaggcgacctccaagaagggtatcagtcgactggataaacagatgagaaagttcacagatataaggaaaaaaagcagatctgcacacgcagtgaaaatcagcattgagggcaacaaaatgccattgtgaccttgcctggaatgtgtccccatctctactctaagaaatgcgcaatggactctttggagaaagaagatattttaaaacatttttagtgtgtctgtaaatggttcagcgtgtatcagatgttgtcataggactcacatttctctcagttatatttaaaaccgttgtgtactttgtacaaaggaatactagtcatacttctataaactttacacaataaaatttcattctggt

SEQ ID NO: 463682 - DNA, 2925 bp, Homo sapiens
cgccattttggccccagcggtgcttctaggaagtagaacgccggctcgcatgcctgcccgcccgccagcctgccgggtacggccttttccgccggggcttccaggtcaaagaattcgcctttgccgctaccgctttcttaccctccgcacccgttaagttctccggtcgggcggcagtctctgaacacttagccgcgccatccggggtcacaccgcctggaaggaggtgacgggggcggcgcggggcgcggacactccccgctgagagtccgcctgccatggactcggaatattacagcggcgaccagtcagatgatggtggtgctaccccagtacaggatgaacgggattcaggacactggaagtgtagaacgtcattcagagaatgaaactagtgatcgagaagatggcctccccaaaggacatcatgtgacagactctgagaacgatgagcccttaaatcttaatgctagtgactctgaaagtgaggagcttcacaggcaaaaggacagcgactctgaatctgaggaacgtgcagagcctcctgcaagcgattctgaaaatgaggatgtcaatcagcatgggagcgactctgagagtgaagagaccaggaaattacctggtagtgactctgaaaatgaggaacttcttaatgggcatgcaagtgactcagaaaacgaagatgttgggaagcatcccgccagtgattctgagattgaggagctccagaagagtcctgctagtgactctgaaacagaagatgctctaaaacctcaaatcagtgactctgagagtgaggaacccccaaggcaccaagccagtgactccgaaaatgaggagcctcccaaacctcgaatgagtgattctgaaagtgaggagcttcctaaacctcaggtcagtgattcagaaagtgaggaacccccaaggcaccaggccagtgactctgaaaatgaggagcttcccaaacctcgtatcagtgactcagaaagtgaggaccctccgaggcaccaggccagtgactcagaaaatgaagagcttcccaaaccccgaatcagtgattcggaaagtgaggatcccccaaggaaccaggccagtgattcggaaaatgaggagctacccaaaccccgagtcagtgactctgagagtgaggggcctcagaaggggcctgccagtgactcagaaactgaggatgcgtccagacacaaacagaagccagagtcagatgatgacagcgacagggagaataagggagaggatacagaaatgcagaatgactccttccattcagacagccatatggacagaaaaaagtttcacagttctgatagtgaggaggaagaacacaaaaagcaaaaaatggacagtgatgaagatgaaaaagagggtgaggaggagaaagtagcgaagagaaaagctgctgtgctttctgatagtgaagatgaagagaaagcatcagcaaagaagagtcgtgttgtctctgatgcagatgactctgacagtgatgctgtatcagacaagtcaggcaaaagagagaagaccatagcatctgacagtgaggaagaagctgggaaagaattgtctgataagaaaaatgaagagaaggatctgtttgggagtgacagtgagtcaggcaatgaagaagaaaatcttattgcagacatatttggagaatctggtgatgaagaggaagaagaatttacaggttttaaccaagaagatctggaagaagaaaaaggtgaaacacaggtaaaagaagcagaagattcagattctgatgataacataaagagaggaaaacatatggactttctgtcagattttgagatgatgttgcagcgaaaaaagagcatgagtggcaagcgcagacggaaccgcgatggtggcacctttattagtgatgcagacgacgtcgtgagtgccatgatcgtcaagatgaatgaagctgctgaggaagacagacagttgaacaatcaaaaaaagccagcactgaaaaaattaactttactgcctgctgtagttatgcaccttaagaagcaggaccttaaagaaacattcattgacagtggtgtgatgtctgccatcaaagaatggctctcacctctaccagataggagtttgcctgcactcaagatccgggaggagctgctgaagatcctgcaagagctgcctagtgtgagccaggagaccctgaagcatagtgggattggacgagcagtgatgtatctctataaacaccccaaggagtcaaggtctaacaaggacatggcagggaaattaatcaatgagtggtctaggcctatatttggtcttacctcaaactacaaaggaatgacaagagaagaaagggagcagagagatctagaacagatgcctcaacgacgaagaatgaacagcactggtggtcagacacccagaagagacctggaaaaggtgctgacaggagaggagaaggctcttagacctggagatcctggattctgtgcccgtgcaagggtcccaatgccttcaaacaaggactatgttgtcaggcccaaatggaatgtggaaatggagtcatccaggtttcaggcgacctccaagaagggtatcagtcgactggataaacagatgagaaagttcacagatataaggaaaaaaagcagatctgcacacgcagtgaaaatcagcattgagggcaacaaaatgccattgtgaccttgcctggaatgtgtccccatctctactctaagaaatgcgcaatggactctttggagaaagaagatattttaaaacatttttagtgtgtctgtaaatggttcagcgtgtatcagatgttgtcataggactcacatttctctcagttatatttaaaaccgttgtgtactttgtacaaaggaatactagtcatacttctataaactttacacaataaaatttcattctggt

SEQ ID NO: 463683 - DNA, 1312 bp, Homo sapiens
gtcgtatttgcagtccgtcattgaccgaaacatcgttatgcggcgcatgactgtatttgcacttttaaaagaaggtagcacttcattgagttagaattaagaaatttggtgttcttaattgttgtgaaagtaaatgtgtatttaaaagacaacttgtatttcacttgcttttgtttactgctttagtatggactttctgtcagattttgagatgatgttgcagcgaaaaaagagcatgagtggcaagcgcagacggaaccgcgatggtggcacctttattagtgatgcagacgacgtcgtgagtgccatgatcgtcaagatgaatgaagctgctgaggaagacagacagttgaacaatcaaaaaaagccagcactgaaaaaattaactttactgcctgctgtagttatgcaccttaagaagcaggaccttaaagaaacattcattgacagtggtgtgatgtctgccatcaaagaatggctctcacctctaccagataggagtttgcctgcactcaagatccgggaggagctgctgaagatcctgcaagagctgcctagtgtgagccaggagaccctgaagcatagtgggattggacgagcagtgatgtatctctataaacaccccaaggagtcaaggtctaacaaggacatggcagggaaattaatcaatgagtggtctaggcctatatttggtcttacctcaaactacaaaggaatgacaagagaagaaagggagcagagagatctagaacagatgcctcaacgacgaagaatgaacagcactggtggtcagacacccagaagagacctggaaaaggtgctgacaggagaggagaaggctcttagacctggagatcctggattctgtgcccgtgcaagggtcccaatgccttcaaacaaggactatgttgtcaggcccaaatggaatgtggaaatggagtcatccaggtttcaggcgacctccaagaagggtatcagtcgactggataaacagatgagaaagttcacagatataaggaaaaaaagcagatctgcacacgcagtgaaaatcagcattgagggcaacaaaatgccattgtgaccttgcctggaatgtgtccccatctctactctaagaaatgcgcaatggactctttggagaaagaagatattttaaaacatttttagtgtgtctgtaaatggttcagcgtgtatcagatgttgtcataggactcacatttctctcagttatatttaaaaccgttgtgtactttgtacaaaggaatactagtcatacttctataaactttacacaataaaatttcattctggt

SEQ ID NO: 463684 - DNA, 2998 bp, Homo sapiens
cgccattttggccccagcggtgcttctaggaagtagaacgccggctcgcatgcctgcccgcccgccagcctgccgggtacggccttttccgccggggcttccaggtcaaagaattcgcctttgccgctaccgctttcttaccctccgcacccgttaagttctccggtcgggcggcagtctctgaacacttagccgcgccatccggggtcacaccgcctggaaggaggtgacgggggcggcgcggggcgcggacactccccgctgagagtccgcctgccatggactcggaatattacagcggcgaccagtcagatgatggtggtgctaccccagtacaggatgaacgggattcagggtcagacggtgaggatgatgtaaatgagcaacactccggatcagacactggaagtgtagaacgtcattcagagaatgaaactagtgatcgagaagatggcctccccaaaggacatcatgtgacagactctgagaacgatgagcccttaaatcttaatgctagtgactctgaaagtgaggagcttcacaggcaaaaggacagcgactctgaatctgaggaacgtgcagagcctcctgcaagcgattctgaaaatgaggatgtcaatcagcatgggagcgactctgagagtgaagagaccaggaaattacctggtagtgactctgaaaatgaggaacttcttaatgggcatgcaagtgactcagaaaacgaagatgttgggaagcatcccgccagtgattctgagattgaggagctccagaagagtcctgctagtgactctgaaacagaagatgctctaaaacctcaaatcagtgactctgagagtgaggaacccccaaggcaccaagccagtgactccgaaaatgaggagcctcccaaacctcgaatgagtgattctgaaagtgaggagcttcctaaacctcaggtcagtgattcagaaagtgaggaacccccaaggcaccaggccagtgactctgaaaatgaggagcttcccaaacctcgtatcagtgactcagaaagtgaggaccctccgaggcaccaggccagtgactcagaaaatgaagagcttcccaaaccccgaatcagtgattcggaaagtgaggatcccccaaggaaccaggccagtgattcggaaaatgaggagctacccaaaccccgagtcagtgactctgagagtgaggggcctcagaaggggcctgccagtgactcagaaactgaggatgcgtccagacacaaacagaagccagagtcagatgatgacagcgacagggagaataagggagaggatacagaaatgcagaatgactccttccattcagacagccatatggacagaaaaaagtttcacagttctgatagtgaggaggaagaacacaaaaagcaaaaaatggacagtgatgaagatgaaaaagagggtgaggaggagaaagtagcgaagagaaaagctgctgtgctttctgatagtgaagatgaagagaaagcatcagcaaagaagagtcgtgttgtctctgatgcagatgactctgacagtgatgctgtatcagacaagtcaggcaaaagagagaagaccatagcatctgacagtgaggaagaagctgggaaagaattgtctgataagaaaaatgaagagaaggatctgtttgggagtgacagtgagtcaggcaatgaagaagaaaatcttattgcagacatatttggagaatctggtgatgaagaggaagaagaatttacaggttttaaccaagaagatctggaagaagaaaaaggtgaaacacaggtaaaagaagcagaagattcagattctgatgataacataaagagaggaaaacatatggactttctgtcagattttgagatgatgttgcagcgaaaaaagagcatgagtggcaagcgcagacggaaccgcgatggtggcacctttattagtgatgcagacgacgtcgtgagtgccatgatcgtcaagatgaatgaagctgctgaggaagacagacagttgaacaatcaaaaaaagccagcactgaaaaaattaactttactgcctgctgtagttatgcaccttaagaagcaggaccttaaagaaacattcattgacagtggtgtgatgtctgccatcaaagaatggctctcacctctaccagataggagtttgcctgcactcaagatccgggaggagctgctgaagatcctgcaagagctgcctagtgtgagccaggagaccctgaagcatagtgggattggacgagcagtgatgtatctctataaacaccccaaggagtcaaggtctaacaaggacatggcagggaaattaatcaatgagtggtctaggcctatatttggtcttacctcaaactacaaaggaatgacaagagaagaaagggagcagagagatctagaacagatgcctcaacgacgaagaatgaacagcactggtggtcagacacccagaagagacctggaaaaggtgctgacaggagaggagaaggctcttagacctggagatcctggattctgtgcccgtgcaagggtcccaatgccttcaaacaaggactatgttgtcaggcccaaatggaatgtggaaatggagtcatccaggtttcaggcgacctccaagaagggtatcagtcgactggataaacagatgagaaagttcacagatataaggaaaaaaagcagatctgcacacgcagtgaaaatcagcattgagggcaacaaaatgccattgtgaccttgcctggaatgtgtccccatctctactctaagaaatgcgcaatggactctttggagaaagaagatattttaaaacatttttagtgtgtctgtaaatggttcagcgtgtatcagatgttgtcataggactcacatttctctcagttatatttaaaaccgttgtgtactttgtacaaaggaatactagtcatacttctataaactttacacaataaaatttcattctggtctggtttttggggggctgtctcttcattt

SEQ ID NO: 463685 - DNA, 671 bp, Homo sapiens
taccagaatgaaattttattgtgtaaagtttatagaagtatgactagtattcctttgtacaaagtacacaacggttttaaatataactgagagaaatgtgagtcctagaacagatgcctcaacgacgaagaatgaacagcactggtggtcagacacccagaagagacctggaaaaggtgctgacaggagaggagaaggctcttagacctggagatcctggattctgtgcccgtgcaagggtcccaatgccttcaaacaaggactatgttgtcaggcccaaatggaatgtggaaatggagtcatccaggtttcaggcgacctccaagaagggtatcagtcgactggataaacagatgagaaagttcacagatataaggaaaaaaagcagatctgcacacgcagtgaaaatcagcattgagggcaacaaaatgccattgtgaccttgcctggaatgtgtccccatctctactctaagaaatgcgcaatggactctttggagaaagaagatattttaaaacatttttagtgtgtctgtaaatggttcagcgtgtatcagatgttgtcataggactcacatttctctcagttatatttaaaaccgttgtgtactttgtacaaaggaatactagtcatacttctataaactttacacaataaaatttcattctggt

SEQ ID NO: 463686 - DNA, 1811 bp, Homo sapiens
cgccattttggccccagcggtgcttctaggaagtagaacgccggctcgcatgcctgcccgcccgccagcctgccgggtacggccttttccgccggggcttccaggtcaaagaattcgcctttgccgctaccgctttcttaccctccgcacccgttaagttctccggtcgggcggcagtctctgaacacttagccgcgccatccggggtcacaccgcctggaaggaggtgacgggggcggcgcggggcgcggacactccccgctgagagtccgcctgccatggactcggaatattacagcggcgaccagtcagatgatggtggtgctaccccagtacaggatgaacgggattcagggtcagacggtgaggatgatgtaaatgagcaacactccggatcagacactggaagtgtagaacgtcattcagagaatgaaactagtgatcgagaagatggcctccccaaaggacatcatgtgacagactctgagaacgatgagcccttaaatcttaatgctagtgactctgaaagtgaggagcttcacaggcaaaaggacagcgactctgaatctgaggaacgtgcagagcctcctgcaagcgattctgaaaatgaggatgtcaatcagcatgggagcgactctgagagtgaagagaccaggaaattacctggtagtgactctgaaaatgaggaacttcttaatgggcatgcaagtgactcagaaaacgaagatgttgggaagcatcccgccagtgattctgagattgaggagctccagaagagtcctgctagtgactctgaaacagaagatgctctaaaacctcaaatcagtgactctgagagtgaggaacccccaaggcaccaagccagtgactccgaaaatgaggagcctcccaaacctcgaatgagtgattctgaaagtgaggagcttcctaaacctcaggtcagtgattcagaaagtgaggaacccccaaggcaccaggccagtgactctgaaaatgaggagcttcccaaacctcgtatcagtgactcagaaagtgaggaccctccgaggcaccaggccagtgactcagaaaatgaagagcttcccaaaccccgaatcagtgattcggaaagtgaggatcccccaaggaaccaggccagtgattcggaaaatgaggagctacccaaaccccgagtcagtgactctgagagtgaggggcctcagaaggggcctgccagtgactcagaaactgaggatgcgtccagacacaaacagaagccagagtcagatgatgacagcgacagggagaataagggagaggatacagaaatgcagaatgactccttccattcagacagccatatggacagaaaaaagtttcacagttctgatagtgaggaggaagaacacaaaaagcaaaaaatggacagtgatgaagatgaaaaagagggtgaggaggagaaagtagcgaagagaaaagctgctgtgctttctgatagtgaagatgaagagaaagcatcagcaaagaagagtcgtgttgtctctgatgcagatgactctgacagtgatgctgtatcagacaagtcaggcaaaagagagaagaccatagcatctgacagtgaggaagaagctgggaaagaattgtctgataagaaaaatgaagagaaggatctgtttgggagtgacagtgagtcaggcaatgaagaagaaaatcttattgcagacatatttggagaatctggtgatgaagaggaagaagaatttacagtaagtataagatggaaatatttcctccttgattgtgcttttttttggtgtttttatggcagtgat

SEQ ID NO: 463687 - DNA, 1395 bp, Homo sapiens
ttttgtcaccaccagacctgcctttcaagagctcctgaaggaagcactaaatatggaaaggaaaaaactggtaccagccactgcaaaaacataccaaaatgtaaagagcattgacactgtgaagaagctgcatcaactaatcggcaaaataaccagctactctgcagctgaaatggagaaagcaggagctgacttatctttttcagatgcttggctgggaagaggagggaacaagataaaatatcccatgaatgaacgcttactacttacggtgtttgtgaaagatactgtggcttccaggcacaactctcagatcctatgtctttggatccttaccaagacaggactgtccacttacctccatgaggctgccatttctgaaagagacattggaactccattttggggatggccttcacagcttaccacctatttctctgaatattctcagcgctaccaaatctttatcattggagaccagtcttaacttctgagatgacccaaatatttggagccaagtttgttgattaagtaagttttcatcctcgacattcttttgcccaccttatgagaccaatgagtctactgaagatcctccaagtgccgaggaaataaagacattggaggatgcccttaatattttcagaaatgttaccactgtaaagagcacttccaaaatctccttttcacatattctctgtgaagttatgcaacacaaaggcttcaaagcaatctcccaagtttcccagaaaataaatacatctgatttgaaaaatcttacatcggcaagattgtgcaaatattattcatatgtctgaaagggcagcctattcagctattaaaaggtacagccttttaactgaaggtagtcttaaggctggacacagctttcatactgagctttcaattactttaagatgtcaccatagcatacagaggtgtttacatttacatatacaaatagatcagccatacaaatacctactaactttgcaaaatggctagtaaaaaaactcatttttaccacatgtatattgcccttgcttatgtgtgttaatgaaaaacatgtgtgcttgtaatgcacataggcagtaaagagcaatgatttttaatgcattagtattgctatcaattatgggtgccaatgaaatgcatgggactacaatgcatatgaactcttcaaatttccttttagcgaataatttttccctccacactttttagcagaagtaatcacattgactaccttaatttcatctttttacattgtttcccagatgggaaacttttgcacatcttactctcagattctcatgaacattcccatctagtctccttgattaaatgttgtgctgacctaaagagaatatgtttttagtggtatccaaaggcaac

SEQ ID NO: 463688 - DNA, 1065 bp, Homo sapiens
  misc_feature (2)..(2): n is a, c, g, or t
  misc_feature (5)..(5): n is a, c, g, or t
  misc_feature (8)..(9): n is a, c, g, or t
  misc_feature (12)..(12): n is a, c, g, or t
antcntcnngtnagtccctgaacaggagtgatgcctccaggcaggtggcatgctgcctatccagctcaggcccagtcttcgagggagcgagggcggcttcagacagtaaagaaggaagaagaggatgaaagctatactccagtgcaggctgccaggccacagactctcaaccgccctggccaggagctgttccgccagctcttcagacagcttcgctaccatgagtcttcagggcccctagaaactctgagccggctccgggaactctgtcgctggtggctgaggcctgacgttctctccaaggcacagatcctagagctgctggtgctggaacagttcctgagcatcctgcctggggagctccgggtttgggtgcagcttcataaccctgagagtggcgaggaggctgtggccttgctggaggagctgcagagggaccttgatgggacatcctggaggacttcattccacaacctcaacatctgtggccacatagttgtacctttcagagcctctgttcgttgagaagaaaatgcagaaatggtttaatcgtgagaatttgttcggtaaatattcaagtgcttatcatgtgcctggccctggcagagttggcagtcccaggcctggcaggagagcagcagctggtcagttcaagtgcgttcgttcttcctgcccttctcctgcacacaggggagctgatgcttcctgtattgttacagttttttaaaaaagcatttatcacttttttaaggcttctttatataaaaatacatgattctggccaggcgtggtggctcactcctgtagtgctagcactttgggaggccaaggcgggcagatcacttgaggtcaggagttcgagactagcctggccaacatggtgaaactccatttctactaaaagggcagaaattagccgggtgtggtggtgtgcacctgtagacccagctactcaggaggctgaggcaggagaattgcttgaacctggaaggtggaggctgcagtgagctgagatttcaccagtgcagtctagactgggcaacagaacaagtcgctgtgtaaaaa

SEQ ID NO: 463689 - DNA, 1186 bp, Homo sapiens
agaaagtacaaaaaaactggccattttttttaattgcttgtttttctttgtaattaacattcagtctactttctaaaaaataaataaataataagcagtccagatgtggcaagttgctaaagaaaggaaccatcaggccatagacgtaaatatattctcttcttggattttaggtctcacctaagaaaataaacacatgctatgtcagagaagcctcagggtttccacacctgctcgaaaagggagttgagcttcagcagctgacccaggactctgttcccctttggtgagaagggtttttgttcagcaagacaatggagagctctcactgtggtggacgttcggccaagggaccaaggtggaaatcaaacgtgagtagaatttaaactttgcttcctcagttgtctgtgtcttctgttccctgtgtctatgaagtgatctataaggtgactctgcaatcagcctctgatatccttcagggaaaagataaagataagtctgtagtcaaactcgagaattgattgcacattttctttgaagagcaagcaagattcagtcattgggtgagaataacttgtctaagtaatagcttcagaaatgtcctggggaacataacatgttctggacagagccttggtcaattgtcagaaagggagtttttgtataggagggaagttaagaggaaccattgtgtgtacacttttggccaggggaccaagctggagatcaaacgtaagtacttttttccactgattcttcactgttgctaattagtttactttgtgttcctttgtgtggattttcattagtcggatgccagggatctaacaaacttcattcccaggttaggtacagaggaggggaaattgttccacaggacgctagcttgtggctaatttttaagatttctaaatcaaaataacttcattgggggaaagaggcttgctgagctttcagggaggtttttgtaaagggaaaagttaagacgaatcactgtgattcactttcggccctgggaccaaagtggatatcaaacgtaagtacatctgtctcaattattcgtgagattttagtgccattgtatcatttgtgcaagttttgtgatattttggttgaataaacctggtgacccagaagtaaatagcaggacaccagaaaatgaacttaaaaagctgagcaaatagac

SEQ ID NO: 463690 - DNA, 538 bp, Homo sapiens
  misc_feature (465)..(465): n is a, c, g, or t
  misc_feature (515)..(515): n is a, c, g, or t
  misc_feature (519)..(519): n is a, c, g, or t
  misc_feature (524)..(524): n is a, c, g, or t
  misc_feature (538)..(538): n is a, c, g, or t
agaaagtacaaaaaaactggccattttttttaattgcttgtttttctttgtaattaacattcagtctactttctaaaaaataaataaataataagcagtccagatgtggcaagttgctaaagaaaggaaccatcaggccatagacgtaaatatattctcttcttggattttaggtctcacctaagaaaataaacacatgctatgtcagagaagcctcagggtttccacacctgctcgaaaagggagttgagcttcagcagctgacccaggactctgttcccctttggtgagaagggtttttgttcagcaagacaatggagagctctcactgtggtggacgttcggccaagggaccaaggtggaaatcaaacgtgagtagaatttaaactttgcttcctcagttgtctgtgtcttctgttccctgtgtctatgaagtgatctataaggtgatgctacatctagctntgtttcctcgagtgtcctctcatgctgttatcaaacaggggagggagatnagancgacncatcctcacaccan

SEQ ID NO: 463691 - DNA, 1072 bp, Homo sapiens
cttttattttcattctatgctatccgatgcctactgctatttcccttcatatttaacctccaacagctgcattttgctccctccagaccacctgattggagctcacgtgctcccacacagtacctccaaccagagagagtcgagtcccacagaaaggcttgatgttgctggagttcagtgttgtgcagatggcagtgacaaatgccatgggcacatgagatatgataaaaggtccctgaagaaggtggagaaccagttatcttatgaaattttccagagaagtcaaaaaacacctgcagccttactgtccccttggaaacaagatgaacatctacattttctagagtgggacaagaatctctgttcatatttatgtcccatgcatttgcacgtggccggacaaaggactttgcttctgccagcacatctgtcttcagatatgagaggaaacagacacaacctggaggcggcaaagaagcagctctttctcaagtgacctcctctatctccctacttcctggctaatggggcagccttgatccttgggaatccaggacagatatccactcgtgacaaactagctggaagaatgacaaccaatcaggttccaagcaccactggatgtgaaccacagaatttcctcctctccttgtggaatgtcagcttacgtctgacaaaaaatgtaaaactgagagagttacaatcttaaggaggagtcaagctaaagcagaaagaatcacctactctggactccagcatgactgctgagctcaaatatatatatagagagaaagaaccacaaacttgaagatggatatcagctacagactttcctgagtcagatcaatcttatcaatgtccatcacagatattttgtagaacggtggatcctggcagagtctcacagatgcttctgagacaacatttgctttcaaaaaatgaaccacacacatcctaaagatctcagccacttcccatgtttcattttatgttacagcaaacatcacaacaatcattcctacagatcaccactgcatgtgatcaataaaatagtttttgcaacaatggtact

SEQ ID NO: 463692 - DNA, 1855 bp, Homo sapiens
cttttattttcattctatgctatccgatgcctactgctatttcccttcatatttaacctccaacagctgcattttgctccctccagaccacctgattggagctcacgtgctcccacacagtacctccaaccagagagagtcgagtcccacagaaaggcttgatgttgctggagttcagtgttgtgcagatggcagtgacaaatgccatgggcacatgagatatgataaaaggtccctgaagaaggtggagaaccagttatcttatgaaattttccagagaagtcaaaaaacacctgcagccttactgtccccttggaaacaagatgaacatctacattttctagagtgggacaagaatctctgttcatatttatgtcccatgcatttgcacgtggccggacaaaggactttgcttctgccagcacatctgtcttcagatatgagaggaaacagacacaacctggaggcggcaaagaagcagctctttctcaagtgacctcctctatctccctacttcctggctaatggggcagccttgatccttgggaatccaggacagatatccactcgtgacaaactagctggaagaatgacaaccaatcaggttccaagcaccactggatgtgaaccacagaatttcctcctctccttgtggaatgtcagcttacgtctgacaaaaaatgtaaaactgagagagttacaatcttaaggaggagtcaagctaaagcagaaagaatcacctactctggactccagcatgactgctgagctcaaatatatatatagagagaaagaaccacaaacttgaagatggatatcagctacagactttcctgagtcaggtctcacctaagaaaataaacacatgctatgtcagagaagcctcagggtttccacacctgctcgaaaagggagttgagcttcagcagctgacccaggactctgttcccctttggtgagaagggtttttgttcagcaagacaatggagagctctcactgtggtggacgttcggccaagggaccaaggtggaaatcaaacgtgagtagaatttaaactttgcttcctcagttgtctgtgtcttctgttccctgtgtctatgaagtgatctataaggtgactctgcaatcagcctctgatatccttcagggaaaagataaagataagtctgtagtcaaactcgagaattgattgcacattttctttgaagagcaagcaagattcagtcattgggtgagaataacttgtctaagtaatagcttcagaaatgtcctggggaacataacatgttctggacagagccttggtcaattgtcagaaagggagtttttgtataggagggaagttaagaggaaccattgtgtgtacacttttggccaggggaccaagctggagatcaaacgtaagtacttttttccactgattcttcactgttgctaattagtttactttgtgttcctttgtgtggattttcattagtcggatgccagggatctaacaaacttcattcccaggttaggtacagaggaggggaaattgttccacaggacgctagcttgtggctaatttttaagatttctaaatcaaaataacttcattgggggaaagaggcttgctgagctttcagggaggtttttgtaaagggaaaagttaagacgaatcactgtgattcactttcggccctgggaccaaagtggatatcaaacgtaagtacatctgtctcaattattcgtgagattttagtgccattgtatcatttgtgcaagttttgtgatattttggttgaataaacctggtgacccagaagtaaatagcaggacaccagaaaatgaacttaaaaagctgagcaaatagac

SEQ ID NO: 463693 - DNA, 1460 bp, Homo sapiens
cgcacaagcgtttcaactgctggacccggccggtgtgaagtttcacacccaaaaggatgaagggcacccacctggcttaagagaacgactcccaggtaaagggccagacccaggaggtggaggttgcagtgagccgagatcgcgccattacacttcagcctgggcaacaagagcaaaaaactccgtcaaaaaaaaaaaaaagaagaagaagttgtggagctgtctgattcctgatcctgtccgttcaggctggggccgccctggtctttcaaacccagcagtgagcttggacagacccagaggtgtttactccagatcatgtctactgtgaaggaagcagcacaccggctgtccaaaagtgagatgagcctctatgcagtgctggatcttaagaagggcgcctcacctgaagacttcaaaaaatcctacagccattccgcattgcttccccaccctccttttgagtatcacctgggtaggaaactggccttgcggtatcatcccgacaagaatccagggaatgctcaagcagcagaaatattcaaagagatcaacgcagctcatgccatactgagcgactctaagaagcggaaaatttacgaccagcatggctcattgggaatatatctgtatgatcactttggtgaagaaggcgtcagatactattttattctgaatagttgttggttcaaggtacacaattctccaggtcctttaagaataaggaaagaagggtgaccttcctttccttatgacaaatgcttctgttgtctcattttctgggtgccaggaggattgagggagggaagcttgagcagtcatatagaaaactgctggactgaggccattctcgcctaccttttagacacttgtcatcctgtgtactctgctcacttgttgctgtttctgttgttgctgctgtttttgctgtggagcacttaaaccaccacctgagcaggatagtgggagaaaatatcagcagaatgtccagagtcagcctccaaggtcaggagccaaatgtgattttagaagcgaggaaaatagcgaagatgatttttaagagatgaagaaggatgaggtgctgacccagtgagggtgccttctgctgcccagtcccctggacacattgaagagaggagcaagtagccctgtcctgacattgaccctgatttgacccctcttcttataaggatctcaagaatctcttcagaagcactgatgacgttgatcccagtaaggacatcacctctacccttggtaccacaactctgtatggggttgcccagctactcttcctttcagttgcagtcccaattttactccgtcagaaagcagccctcccctccctccccttatgaggtctcaggcagtggtggcagatttttcctgaagagtctttttcctgtgtctgccttgttattggaaccaatgccagctggtaggatccctgagccccttgc

SEQ ID NO: 463694 - DNA, 1288 bp, Homo sapiens
cgcacaagcgtttcaactgctggacccggccggtgtgaagtttcacacccaaaaggatgaagggcacccacctggcttaagagaacgactcccaggtaaagggccagacccaggaggtggaggttgcagtgagccgagatcgcgccattacacttcagcctgggcaacaagagcaaaaaactccgtcaaaaaaaaaaaaaagaagaagaagttgtggagctgtctgattcctgatcctgtccgttcaggctggggccgccctggtctttcaaacccagcagtgagcttggacagacccagaggtgtttactccagatcatgtctactgtgaaggaagcagcacaccggctgtccaaaagtgagatgagcctctatgcagtgctggatcttaagaagggcgcctcacctgaagacttcaaaaaatcctacagccattccgcattgcttccccaccctccttttgagtatcacctgggtaggaaactggccttgcggtatcatcccgacaagaatccagggaatgctcaagcagcagaaatattcaaagagatcaacgcagctcatgccatactgagcgactctaagaagcggaaaatttacgaccagcatggctcattgggaatatatctgtatgatcactttggtgaagaaggcgtcagatactattttattctgaatagttgttggttcaagacacttgtcatcctgtgtactctgctcacttgttgctgtttctgttgttgctgctgtttttgctgtggagcacttaaaccaccacctgagcaggatagtgggagaaaatatcagcagaatgtccagagtcagcctccaaggtcaggagccaaatgtgattttagaagcgaggaaaatagcgaagatgatttttaagagatgaagaaggatgaggtgctgacccagtgagggtgccttctgctgcccagtcccctggacacattgaagagaggagcaagtagccctgtcctgacattgaccctgatttgacccctcttcttataaggatctcaagaatctcttcagaagcactgatgacgttgatcccagtaaggacatcacctctacccttggtaccacaactctgtatggggttgcccagctactcttcctttcagttgcagtcccaattttactccgtcagaaagcagccctcccctccctccccttatgaggtctcaggcagtggtggcagatttttcctgaagagtctttttcctgtgtctgccttgttattggaaccaatgccagctggtaggatccctgagccccttgc

SEQ ID NO: 463695 - DNA, 1227 bp, Homo sapiens
ggagtgtgcattgtcaactgcaaagggaagcaggactgcgggtgcagggcccagggtggcctcagagccaccttcactctctgctctgtgatgtgggagctggccctgcacaccacacctctgccttgcctgctcctctgtgagggctcggctcgcagaaactcctcccttgtggttttcactcccagaggcacaagtgtccctattcactggactggctgtgctgactgtccccaagtggggacagcagggcctggctcttccacagcactaccctcaggacagcccaggacccggcacctggcgagcattcggcggatgtactcaatcaatcaccgacgcatcttccaaagcctcctgcgagatggagacctcactgtgcacctcctttcatccgcccccgagtgccgtacaccctcctccgtgatgtccacaccagcttacaattctaccatcgactgggccttgggaagctctgggttctcaggctctgtcctgagccagcagtgatcttttacatgggttggaaaattaagtctcattgtacagttttccatttataatacagagatagaaatagtcaaccagttggcaaaactggaaatctgaacgacggactttataacaaacagctgagatcaggtgacaagcacacgctgttactgcctgtcctgcctgaagctgccactgccattcactgctttgctgcctgtttaggaatgtctgggaagatgctggggtgagtcaaggggaccggctgcctgcctgggctcagagggcctcagtttccccagtggaaggaaagatgggggaggcagcatggtacattttttacttaaatctttctcttaaagataaaagctgtcaagggttttaaaggggcctgcaggtgcccgtgtctgagctctgacaggtctatttttacacactcagcggatgcctgcctggctggcaatgctgctggggctcagaaaacaatgccccaaatgagggcctcagcagcagcctcagaagcaaagtttctctctgaccttctcctgccctcttgtctctcaggcccattcttccccaaggccagccacagaaactagaatccctcttccccaaggcaggacatagaaaccagtatccctttctcccaaagccagccataaaacatacaaatatcactctttccctctacttttctgtgtaaaaactagccataaagaaattatctggctgggc

SEQ ID NO: 463696 - DNA, 2333 bp, Homo sapiens
tggcattactcttcagttctcaccatttttacccttctgcaaagtctcttgtttttatttaatggtctctttggcttgccgtcacaatgaaggttggtggaaaggaatgaagcagtttcttcctgcaaaagcagtggaccatgaggaaaccccagttcgctatagcagcagcgaagttaatcacctgagtccaagagaagtcaccacagtgctgcaggctgactctgcagagtatgctcagccactggtaggaggaattgttggtacacttcatcaaagatctacctttaaaccagaagaaggaaaagaagcaggctatgcagacctagatccttacaactcaccagggcaggaagtttatcatgcctatgctgaaccactcccaattacggggcctgagtatgcaaccccaatcatcatggacatgtcagggcaccccacaacttcagttggtcagccctccacatccactttcaaggctacggggaaccaacctcccccactagtgggaacttacaatacacttctctccaggactgacagctgctcctcagcccaggcccagtatgataccccgaaagctgggaagccaggtctacctgccccagacgaattggtgtaccaggtgccacagagcacacaagaagtatcaggagcaggaagggatggggaatgtgatgtttttaaagaaatcctttgaagatgatgctgctttttacaaagcatcgttttaaagcacatggcctttttttttttaattattagtggtagtaatatatagaatgtattacataactgtcactgaagtggtgggaagagagcaaaccagttgattttttaattcatccttagtacacagagaatatacttttcctcaagtaatatacctgtttgaagctttaagagagatgtttttggtaactatttcattttcccaaagaagtttgctattcttgtgttaattgtgtatacctgattgttttttcctggaggtttttgttgttgttgtttagttttgggtttttttttttttaagaggggcaagtgttttctgaaatgatgcatattttaagactcgattcatattgccactgtgctatccttgaactaccaataatttttataaaatatctagtttttactacttttatataaactttactttccagatgaagagctgagcctgattcaaatggtttttctgctttatacttctttttagttcattggtttttatagtagaggttttctatttttttttttttttttttactacatttatatgtctgatacatatacggctttggagacaatcaagtaacaactgaaaatgtgaaagtaaccatatctgacaaaattcccttgaatttttatcctttgcttgcaacatttaagactcaaagtcactggtatattggattaagttttttcctgttaatgcaattatagaaatacatcggagacacaacaaatgtggccattacaggtttcataaaattacactgacttggctgttacttgatcttaggaaacagcacagtttaagatattgtgaattctgacttatactttattaaatgctgtaaatctaaatagatcctgttggatgtgatgggtctagtccagtttatttaagttcatgtttcactgtttgcactttgcattgaacaatgggtttattcgctgatgtaaacggttcgagtgaagaattaatgcagtaagtatgacaacacatacacacttgcctctccccatctccagaagaggggagcagagtccgagcttatctaaatatgaatgtggccacaaagctgtggaaggtgacaaagcttaaacacctttgccctggctctgcattgtcacctagagagcaagaggtctatagaaacatcatgtcacatgaaacgattctctgctttttggttctgaacttgaagtccctaaactgcaaaatctaagagttgggtggttattaaaatgcttttaaaaagtcaactgtggcaccaattctaatgtaatccaacttgtgactgtttttttttgttttgttttgtttttgtgtgtgtgtgtgtggcactgggaaaagtggaaacaaacatgtattgaaatacatattggaaataaaaatggtttgagcgtcagtgatattctcccagaatgtacttatcttacctcggcatgtactgtagtcactcagtatttgtatatgttgctagaatttagattgtaaaatagtgaaattttaatgtgttcatttgtttttaatgtatatatgtcttgctcagattatttggtttaaataaaacaaccttgaggtttgtagcttttcctta

SEQ ID NO: 463697 - DNA, 4230 bp, Homo sapiens
tggcattactcttcagttctcaccatttttacccttctgcaaagtctcttgtttttatttaatggtctctttggcttgccgtcacaatgaaggttggtggaaaggaatgaagcagtttcttcctgcaaaagcagtggaccatgaggaaaccccagttcgctatagcagcagcgaagttaatcacctgagtccaagagaagtcaccacagtgctgcaggctgactctgcagagtatgctcagccactggtaggaggaattgttggtacacttcatcaaagatctacctttaaaccagaagaaggaaaagaagcaggctatgcagacctagatccttacaactcaccagggcaggaagtttatcatgcctatgctgaaccactcccaattacggggcctgagtatgcaaccccaatcatcatggacatgtcagggcaccccacaacttcagttggtcagccctccacatccactttcaaggctacggggaaccaacctcccccactagtgggaacttacaatacacttctctccaggactgacagctgctcctcagcccaggcccagtatgataccccgaaagctgggaagccaggtctacctgccccagacgaattggtgtaccaggtgccacagagcacacaagaagtatcaggagcaggaagggatggggaatgtgatgtttttaaagaaatcctttgaagatgatgctgctttttacaaagcatcgttttaaagcacatggcctttttttttttaattattagtggtagtaatatatagaatgtattacataactgtcactgaagtggttggggaaaatgtggtgactgaggtacaggaaactactaatcttgccatctggctttaaggtgttatggtggcacagttacgtgctcgccgtgttaaatttcaaatgtccgtgttggatactactgtagaacactatttttaatacagaaaaagctccctataatgcacttcagagaaattaaaaatcacagagtatttattaccaatgctgcaggtacattaatgaactcgagatggctctgtaagcctgactggcaataacgcacggtactgttcttgaaatacctaatggcttgaaattctagtctgtttgtgaaagatgggtactatcatgatttcctcttctattcctatattcttttctggattttttttaataattagtgatataagcattgtttttattgcagccatatccacttatccatcttaagatctgtagctgggattttctgacttgtaatgagcagggggattgctttttcactttgtgacactctttagagctttaatgcttcacagtatatggcctggtctcatccttgcgtgttccacttgaggccctttggtgtcttgccccattcttgtgtttataaaatgtttgagtatttctgatgagtgatgcttgccttagtctcatgaattcagatcccttcatgtcctttaagtatgctcctcaatgtgtaaacaggaacaactttatgatttgaaagctttaaaggagattcttctcccacccccaactttatttgcaatgggatttttcctaggagagttatgaaaagttgaaggcttctaagggaatactgtaaacatgacccacttatatttatcacagtgaaaggcaaaattattcactcagaagtaatataaattacctctttaaaaagtaaccagaatttgtcctttttggttttatacattcacaaacatatacatttttcttgagtctcaaggtattttatatttttagtcagaaaaaataatttttcatttcagttttccataaactgttacacaaaatataaacctaacgtgtatttttcaggactgcgtgatcgtgcactttgtgtggtaagaggtttgagtagtcctatatgtcacctagggaacagacattatagcttcctagcaaatgaatattcatgccttgtttttgatacctcctggcagcttccatgtcaccacttgttcatacctgcccagagctagttttagacatggcaaaatagaaatcatctgtaatttattagctaacaatgtaaaaccatcttttaaagccttcagactgtcaagacgacatgagcagctcaccatatgataaaaatacataaatttgacattccctcttccataaacctttgtttgtagatttaatgttgaacagtacttttccataaagttctagtcacttctgttggcctgagccaccagattatgatgttgccagaattcactcaatttgaataaagatgaacagtatttgttttcttgtttccatgaattatatcagtattctaaaacatcgcttcagaaagagaactgtttatttctgcaggcttcctgtccttttgtggtatggttttttggccttattttcactggcttttccttctccaaactttgaggcgtgatttcattcattgaagaatcaatacatattttgtttcaaaatgtttgaaacaaaagacatagatggtagacttttattaaaacatatatggatgtggaaagcacatatattaatgcagtcatcccttttcaggtgggaagagagcaaaccagttgattttttaattcatccttagtacacagagaatatacttttcctcaagtaatatacctgtttgaagctttaagagagatgtttttggtaactatttcattttcccaaagaagtttgctattcttgtgttaattgtgtatacctgattgttttttcctggaggtttttgttgttgttgtttagttttgggtttttttttttttaagaggggcaagtgttttctgaaatgatgcatattttaagactcgattcatattgccactgtgctatccttgaactaccaataatttttataaaatatctagtttttactacttttatataaactttactttccagatgaagagctgagcctgattcaaatggtttttctgctttatacttctttttagttcattggtttttatagtagaggttttctatttttttttttttttttttactacatttatatgtctgatacatatacggctttggagacaatcaagtaacaactgaaaatgtgaaagtaaccatatctgacaaaattcccttgaatttttatcctttgcttgcaacatttaagactcaaagtcactggtatattggattaagttttttcctgttaatgcaattatagaaatacatcggagacacaacaaatgtggccattacaggtttcataaaattacactgacttggctgttacttgatcttaggaaacagcacagtttaagatattgtgaattctgacttatactttattaaatgctgtaaatctaaatagatcctgttggatgtgatgggtctagtccagtttatttaagttcatgtttcactgtttgcactttgcattgaacaatgggtttattcgctgatgtaaacggttcgagtgaagaattaatgcagtaagtatgacaacacatacacacttgcctctccccatctccagaagaggggagcagagtccgagcttatctaaatatgaatgtggccacaaagctgtggaaggtgacaaagcttaaacacctttgccctggctctgcattgtcacctagagagcaagaggtctatagaaacatcatgtcacatgaaacgattctctgctttttggttctgaacttgaagtccctaaactgcaaaatctaagagttgggtggttattaaaatgcttttaaaaagtcaactgtggcaccaattctaatgtaatccaacttgtgactgtttttttttgttttgttttgtttttgtgtgtgtgtgtgtggcactgggaaaagtggaaacaaacatgtattgaaatacatattggaaataaaaatggtttgagcgtcagtgatattctcccagaatgtacttatcttacctcggcatgtactgtagtcactcagtatttgtatatgttgctagaatttagattgtaaaatagtgaaattttaatgtgttcatttgtttttaatgtatatatgtcttgctcagattatttggtttaaataaaacaaccttgaggtttgtagcttttccttaaaaaaaaaaaaaaatttggggcggggccgaaagtttaaccatgtggggggccaggatgaagtcaagtccagagacgggaaggggggtccaaaaaggggggggggaaacagggtggttgtaagggaacagg

SEQ ID NO: 463698 - DNA, 1340 bp, Homo sapiens
gactagttctagatcgcgagcggcgcccttttttttttttaagaggggcaagtgttttctgaaatgatgcatattttaagactcgattcatattgccactgtgctatccttgaactaccaataatttttataaaatatctagtttttactacttttatataaactttactttccagatgaagagctgagcctgattcaaatggtttttctgctttatacttctttttagttcattggtttttatagtagaggttttctatttttttttttttttttttactacatttatatgtctgatacatatacggctttggagacaatcaagtaacaactgaaaatgtgaaagtaaccatatctgacaaaattcccttgaatttttatcctttgcttgcaacatttaagactcaaagtcactggtatattggattaagttttttcctgttaatgcaattatagaaatacatcggagacacaacaaatgtggccattacaggtttcataaaattacactgacttggctgttacttgatcttaggaaacagcacagtttaagatattgtgaattctgacttatactttattaaatgctgtaaatctaaatagatcctgttggatgtgatgggtctagtccagtttatttaagttcatgtttcactgtttgcactttgcattgaacaatgggtttattcgctgatgtaaacggttcgagtgaagaattaatgcagtaagtatgacaacacatacacacttgcctctccccatctccagaagaggggagcagagtccgagcttatctaaatatgaatgtggccacaaagctgtggaaggtgacaaagcttaaacacctttgccctggctctgcattgtcacctagagagcaagaggtctatagaaacatcatgtcacatgaaacgattctctgctttttggttctgaacttgaagtccctaaactgcaaaatctaagagttgggtggttattaaaatgcttttaaaaagtcaactgtggcaccaattctaatgtaatccaacttgtgactgtttttttttgttttgttttgtttttgtgtgtgtgtgtgtggcactgggaaaagtggaaacaaacatgtattgaaatacatattggaaataaaaatggtttgagcgtcagtgatattctcccagaatgtacttatcttacctcggcatgtactgtagtcactcagtatttgtatatgttgctagaatttagattgtaaaatagtgaaattttaatgtgttcatttgtttttaatgtatatatgtcttgctcagattatttggtttaaataaaacaaccttgaggtttgtagcttttcctta

SEQ ID NO: 463699 - DNA, 3940 bp, Homo sapiens
tggcattactcttcagttctcaccatttttacccttctgcaaagtctcttgtttttatttaatggtctctttggcttgccgtcacaatgaaggttggtggaaaggaatgaagcagtttcttcctgcaaaagcagtggaccatgaggaaaccccagttcgctatagcagcagcgaagttaatcacctgagtccaagagaagtcaccacagtgctgcaggctgactctgcagagtatgctcagccactggtaggaggaattgttggtacacttcatcaaagatctacctttaaaccagaagaaggaaaagaagcaggctatgcagacctagatccttacaactcaccagggcaggaagtttatcatgcctatgctgaaccactcccaattacggggcctgagtatgcaaccccaatcatcatggacatgtcagggcaccccacaacttcagttggtcagccctccacatccactttcaaggctacggggaaccaacctcccccactagtgggaacttacaatacacttctctccaggactgacagctgctcctcagcccaggcccagtatgataccccgaaagctgggaagccaggtctacctgccccagacgaattggtgtaccaggtgccacagagcacacaagaagtatcaggagcaggaagggatggggaatgtgatgtttttaaagaaatcctttgaagatgatgctgctttttacaaagcatcgttttaaagcacatggcctttttttttttaattattagtggtagtaatatatagaatgtattacataactgtcactgaagtggttggggaaaatgtggtgactgaggtacaggaaactactaatcttgccatctggctttaaggtgttatggtggcacagttacgtgctcgccgtgttaaatttcaaatgtccgtgttggatactactgtagaacactatttttaatacagaaaaagctccctataatgcacttcagagaaattaaaaatcacagagtatttattaccaatgctgcaggtacattaatgaactcgagatggctctgtaagcctgactggcaataacgcacggtactgttcttgaaatacctaatggcttgaaattctagtctgtttgtgaaagatgggtactatcatgatttcctcttctattcctatattcttttctggattttttttaataattagtgatataagcattgtttttattgcagccatatccacttatccatcttaagatctgtagctgggattttctgacttgtaatgagcagggggattgctttttcactttgtgacactctttagagctttaatgcttcacagtatatggcctggtctcatccttgcgtgttccacttgaggccctttggtgtcttgccccattcttgtgtttataaaatgtttgagtatttctgatgagtgatgcttgccttagtctcatgaattcagatcccttcatgtcctttaagtatgctcctcaatgtgtaaacaggaacaactttatgatttgaaagctttaaaggagattcttctcccacccccaactttatttgcaatgggatttttcctaggagagttatgaaaagttgaaggcttctaagggaatactgtaaacatgacccacttatatttatcacagtgaaaggcaaaattattcactcagaagtaatataaattacctctttaaaaagtaaccagaatttgtcctttttggttttatacattcacaaacatatacatttttcttgagtctcaaggtattttatatttttagtcagaaaaaataatttttcatttcagttttccataaactgttacacaaaatataaacctaacgtgtatttttcaggactgcgtgatcgtgcactttgtgtggtaagaggtttgagtagtcctatatgtcacctagggaacagacattatagcttcctagcaaatgaatattcatgccttgtttttgatacctcctggcagcttccatgtcaccacttgttcatacctgcccagagctagttttagacatggcaaaatagaaatcatctgtaatttattagctaacaatgtaaaaccatcttttaaagccttcagactgtcaagacgacatgagcagctcaccatatgataaaaatacataaatttgacattccctcttccataaacctttgtttgtagatttaatgttgaacagtacttttccataaagttctagtcacttctgttggcctgagccaccagattatgatgttgccagaattcactcaatttgaataaagatgaacagtatttgttttcttgtttccatgaattatatcagtattctaaaacatcgcttcagaaagagaactgtttatttctgcaggcttcctgtccttttgtggtatggttttttggccttattttcactggcttttccttctccaaactttgaggcgtgatttcattcattgaagaatcaatacatattttgtttcaaaatgtttgaaacaaaagacatagatggtagacttttattaaaacatatatggatgtggaaagcacatatattaatgcagtcatcccttttcaggtgggaagagagcaaaccagttgattttttaattcatccttagtacacagagaatatacttttcctcaagtaatatacctgtttgaagctttaagagagatgtttttggtaactatttcattttcccaaagaagtttgctattcttgtgttaattgtgtatacctgattgttttttcctggaggtttttgttgttgttgtttagttttgggtttttttttttttaagaggggcaagtgttttctgaaatgatgcatattttaagactcgattcatattgccactgtgctatccttgaactaccaataatttttataaaatatctagtttttactacttttatataaactttactttccagatgaagagctgagcctgattcaaatggtttttctgctttatacttctttttagttcattggtttttatagtagaggttttctatttttttttttttttttttactacatttatatgtctgatacatatacggctttggagacaatcaagtaacaactgaaaatgtgaaagtaaccatatctgacaaaattcccttgaatttttatcctttgcttgcaacatttaagactcaaagtcactggtatattggattaagttttttcctgttaatgcaattatagaaatacatcggagacacaacaaatgtggccattacaggtttcataaaattacactgacttggctgttacttgatcttaggaaacagcacagtttaagatattgtgaattctgacttatactttattaaatgctgtaaatctaaatagatcctgttggatgtgatgggtctagtccagtttatttaagttcatgtttcactgtttgcactttgcattgaacaatgggtttattcgctgatgtaaacggttcgagtgaagaattaatgcagtaagtatgacaacacatacacacttgcctctccccatctccagaagaggggagcagagtccgagcttatctaaatatgaatgtggccacaaagctgtggaaggtgacaaagcttaaacacctttgccctggctctgcattgtcacctagagagcaagaggtctatagaaacatcatgtcacatgaaacgattctctgctttttggttctgaacttgaagtccctaaactgcaaaatctaagagttgggtggttattaaaatgcttttaaaaagtcaactgtggcaccaattctaatgtaatccaacttgtgactgttttttgtggtggctgcgcgtgtgtgtcgtgcctcgcgcaccacttggcaccccctgtttgcctccctctcggaacacaaccggcttcggcgcgccaaacaaaagggggctaaaaaccagggccttctccctttaagcca

SEQ ID NO: 463700 - DNA, 3412 bp, Homo sapiens
tggcattactcttcagttctcaccatttttacccttctgcaaagtctcttgtttttatttaatggtctctttggcttgccgtcacaatgaaggttggtggaaaggaatgaagcagtttcttcctgcaaaagcagtggaccatgaggaaaccccagttcgctatagcagcagcgaagttaatcacctgagtccaagagaagtcaccacagtgctgcaggctgactctgcagagtatgctcagccactggtaggaggaattgttggtacacttcatcaaagatctacctttaaaccagaagaaggaaaagaagcaggctatgcagacctagatccttacaactcaccagggcaggaagtttatcatgcctatgctgaaccactcccaattacggggcctgagtatgcaaccccaatcatcatggacatgtcagggcaccccacaacttcagttggtcagccctccacatccactttcaaggctacggggaaccaacctcccccactagtgggaacttacaatacacttctctccaggactgacagctgctcctcagcccaggcccagtatgataccccgaaagctgggaagccaggtctacctgccccagacgaattggtgtaccaggtgccacagagcacacaagaagtatcaggagcaggaagggatggggaatgtgatgtttttaaagaaatcctttgaagatgatgctgctttttacaaagcatcgttttaaagcacatggcctttttttttttaattattagtggtagtaatatatagaatgtattacataactgtcactgaagtggttggggaaaatgtggtgactgaggtacaggaaactactaatcttgccatctggctttaaggtgttatggtggcacagttacgtgctcgccgtgttaaatttcaaatgtccgtgttggatactactgtagaacactatttttaatacagaaaaagctccctataatgcacttcagagaaattaaaaatcacagagtatttattaccaatgctgcaggtacattaatgaactcgagatggctctgtaagcctgactggcaataacgcacggtactgttcttgaaatacctaatggcttgaaattctagtctgtttgtgaaagatgggtactatcatgatttcctcttctattcctatattcttttctggattttttttaataattagtgatataagcattgtttttattgcagccatatccacttatccatcttaagatctgtagctgggattttctgacttgtaatgagcagggggattgctttttcactttgtgacactctttagagctttaatgcttcacagtatatggcctggtctcatccttgcgtgttccacttgaggccctttggtgtcttgccccattcttgtgtttataaaatgtttgagtatttctgatgagtgatgcttgccttagtctcatgaattcagatcccttcatgtcctttaagtatgctcctcaatgtgtaaacaggaacaactttatgatttgaaagctttaaaggagattcttctcccacccccaactttatttgcaatgggatttttcctaggagagttatgaaaagttgaaggcttctaagggaatactgtaaacatgacccacttatatttatcacagtgaaaggcaaaattattcactcagaagtaatataaattacctctttaaaaagtaaccagaatttgtcctttttggttttatacattcacaaacatatacatttttcttgagtctcaaggtattttatatttttagtcagaaaaaataatttttcatttcagttttccataaactgttacacaaaatataaacctaacgtgtatttttcaggactgcgtgatcgtgcactttgtgtggtaagaggtttgagtagtcctatatgtcacctagggaacagacattatagcttcctagcaaatgaatattcatgccttgtttttgatacctcctggcagcttccatgtcaccacttgttcatacctgcccagagctagttttagacatggcaaaatagaaatcatctgtaatttattagctaacaatgtaaaaccatcttttaaagccttcagactgtcaagacgacatgagcagctcaccatatgataaaaatacataaatttgacattccctcttccataaacctttgtttgtagatttaatgttgaacagtacttttccataaagttctagtcacttctgttggcctgagccaccagattatgatgttgccagaattcactcaatttgaataaagatgaacagtatttgttttcttgtttccatgaattatatcagtattctaaaacatcgcttcagaaagagaactgtttatttctgcaggcttcctgtccttttgtggtatggttttttggccttattttcactggcttttccttctccaaactttgaggcgtgatttcattcattgaagaatcaatacatattttgtttcaaaatgtttgaaacaaaagacatagatggtagacttttattaaaacatatatggatgtggaaagcacatatattaatgcagtcatcccttttcaggtgggaagagagcaaaccagttgattttttaattcatccttagtacacagagaatatacttttcctcaagtaatatacctgtttgaagctttaagagagatgtttttggtaactatttcattttcccaaagaagtttgctattcttgtgttaattgtgtatacctgattgttttttcctggaggtttttgttgttgttgtttagttttgggtttttttttttttaagaggggcaagtgttttctgaaatgatgcatattttaagactcgattcatattgccactgtgctatccttgaactaccaataatttttataaaatatctagtttttactacttttatataaactttactttccagatgaagagctgagcctgattcaaatggtttttctgctttatacttctttttagttcattggtttttatagtagaggttttctatttttttttttttttttttactacatttatatgtctgatacatatacggctttggagacaatcaagtaacaactgaaaatgtgaaagtaaccatatctgacaaaattcccttgaatttttatcctttgcttgcaacatttaagactcaaagtcactggtatattggattaagttttttcctgttaatgcaattatagaaatacatcggagacacaacaaatgtggccattacaggtttcataaaattacactgacttggctgttacttgatcttaggaaacagcacagtttaagatattgtgaaaagatgaacagtatttggtttcttgtttccatgaattatatcagtattctaaaacatcgcttcagaaagagaactgtttatttctgcag

SEQ ID NO: 463701 - DNA, 4100 bp, Homo sapiens
tggcattactcttcagttctcaccatttttacccttctgcaaagtctcttgtttttatttaatggtctctttggcttgccgtcacaatgaaggttggtggaaaggaatgaagcagtttcttcctgcaaaagcagtggaccatgaggaaaccccagttcgctatagcagcagcgaagttaatcacctgagtccaagagaagtcaccacagtgctgcaggctgactctgcagagtatgctcagccactggtaggaggaattgttggtacacttcatcaaagatctacctttaaaccagaagaaggaaaagaagcaggctatgcagacctagatccttacaactcaccagggcaggaagtttatcatgcctatgctgaaccactcccaattacggggcctgagtatgcaaccccaatcatcatggacatgtcagggcaccccacaacttcagttggtcagccctccacatccactttcaaggctacggggaaccaacctcccccactagtgggaacttacaatacacttctctccaggactgacagctgctcctcagcccaggcccagtatgataccccgaaagctgggaagccaggtctacctgccccagacgaattggtgtaccaggtgccacagagcacacaagaagtatcaggagcaggaagggatggggaatgtgatgtttttaaagaaatcctttgaagatgatgctgctttttacaaagcatcgttttaaagcacatggcctttttttttttaattattagtggtagtaatatatagaatgtattacataactgtcactgaagtggttggggaaaatgtggtgactgaggtacaggaaactactaatcttgccatctggctttaaggtgttatggtggcacagttacgtgctcgccgtgttaaatttcaaatgtccgtgttggatactactgtagaacactatttttaatacagaaaaagctccctataatgcacttcagagaaattaaaaatcacagagtatttattaccaatgctgcaggtacattaatgaactcgagatggctctgtaagcctgactggcaataacgcacggtactgttcttgaaatacctaatggcttgaaattctagtctgtttgtgaaagatgggtactatcatgatttcctcttctattcctatattcttttctggattttttttaataattagtgatataagcattgtttttattgcagccatatccacttatccatcttaagatctgtagctgggattttctgacttgtaatgagcagggggattgctttttcactttgtgacactctttagagctttaatgcttcacagtatatggcctggtctcatccttgcgtgttccacttgaggccctttggtgtcttgccccattcttgtgtttataaaatgtttgagtatttctgatgagtgatgcttgccttagtctcatgaattcagatcccttcatgtcctttaagtatgctcctcaatgtgtaaacaggaacaactttatgatttgaaagctttaaaggagattcttctcccacccccaactttatttgcaatgggatttttcctaggagagttatgaaaagttgaaggcttctaagggaatactgtaaacatgacccacttatatttatcacagtgaaaggcaaaattattcactcagaagtaatataaattacctctttaaaaagtaaccagaatttgtcctttttggttttatacattcacaaacatatacatttttcttgagtctcaaggtattttatatttttagtcagaaaaaataatttttcatttcagttttccataaactgttacacaaaatataaacctaacgtgtatttttcaggactgcgtgatcgtgcactttgtgtggtaagaggtttgagtagtcctatatgtcacctagggaacagacattatagcttcctagcaaatgaatattcatgccttgtttttgatacctcctggcagcttccatgtcaccacttgttcatacctgcccagagctagttttagacatggcaaaatagaaatcatctgtaatttattagctaacaatgtaaaaccatcttttaaagccttcagactgtcaagacgacatgagcagctcaccatatgataaaaatacataaatttgacattccctcttccataaacctttgtttgtagatttaatgttgaacagtacttttccataaagttctagtcacttctgttggcctgagccaccagattatgatgttgccagaattcactcaatttgaataaagatgaacagtatttgttttcttgtttccatgaattatatcagtattctaaaacatcgcttcagaaagagaactgtttatttctgcaggcttcctgtccttttgtggtatggttttttggccttattttcactggcttttccttctccaaactttgaggcgtgatttcattcattgaagaatcaatacatattttgtttcaaaatgtttgaaacaaaagacatagatggtagacttttattaaaacatatatggatgtggaaagcacatatattaatgcagtcatcccttttcaggtgggaagagagcaaaccagttgattttttaattcatccttagtacacagagaatatacttttcctcaagtaatatacctgtttgaagctttaagagagatgtttttggtaactatttcattttcccaaagaagtttgctattcttgtgttaattgtgtatacctgattgttttttcctggaggtttttgttgttgttgtttagttttgggtttttttttttttaagaggggcaagtgttttctgaaatgatgcatattttaagactcgattcatattgccactgtgctatccttgaactaccaataatttttataaaatatctagtttttactacttttatataaactttactttccagatgaagagctgagcctgattcaaatggtttttctgctttatacttctttttagttcattggtttttatagtagaggttttctatttttttttttttttttttactacatttatatgtctgatacatatacggctttggagacaatcaagtaacaactgaaaatgtgaaagtaaccatatctgacaaaattcccttgaatttttatcctttgcttgcaacatttaagactcaaagtcactggtatattggattaagttttttcctgttaatgcaattatagaaatacatcggagacacaacaaatgtggccattacaggtttcataaaattacactgacttggctgttacttgatcttaggaaacagcacagtttaagatattgtgaattctgacttatactttattaaatgctgtaaatctaaatagatcctgttggatgtgatgggtctagtccagtttatttaagttcatgtttcactgtttgcactttgcattgaacaatgggtttattcgctgatgtaaacggttcgagtgaagaattaatgcagtaagtatgacaacacatacacacttgcctctccccatctccagaagaggggagcagagtccgagcttatctaaatatgaatgtggccacaaagctgtggaaggtgacaaagcttaaacacctttgccctggctctgcattgtcacctagagagcaagaggtctatagaaacatcatgtcacatgaaacgattctctgctttttggttctgaacttgaagtccctaaactgcaaaatctaagagttgggtggttattaaaatgcttttaaaaagtcaactgtggcaccaattctaatgtaatccaacttgtgactgtttttttttgttttgttttgtttttgtgtgtgtgtgtgtggcactgggaaaagtggaaacaaacatgtattgaaatacatattggaaataaaaatggtttgagcgtcagtgatattctcccagaatgtacttatcttacctcggcatgtactgtagtcactcagtatttgtatatgttgctagaatttagattgtaaaatagtgaaattttaatgtgttcatttgtttttaatgtatatatgtcttgctcagattatttggtttaaataaaacaaccttgaggtttgtagcttttcctta

SEQ ID NO: 463702 - DNA, 4943 bp, Homo sapiens
tggcattactcttcagttctcaccatttttacccttctgcaaagtctcttgtttttatttaatggtctctttggcttgccgtcacaatgaaggttggtggaaaggaatgaagcagtttcttcctgcaaaagcagtggaccatgaggaaaccccagttcgctatagcagcagcgaagttaatcacctgagtccaagagaagtcaccacagtgctgcaggctgactctgcagagtatgctcagccactggtaggaggaattgttggtacacttcatcaaagatctacctttaaaccagaagaaggaaaagaagcaggctatgcagacctagatccttacaactcaccagggcaggaagtttatcatgcctatgctgaaccactcccaattacggggcctgagtatgcaaccccaatcatcatggacatgtcagggcaccccacaacttcagttggtcagccctccacatccactttcaaggctacggggaaccaacctcccccactagtgggaacttacaatacacttctctccaggactgacagctgctcctcagcccaggcccagtatgataccccgaaagctgggaagccaggtctacctgccccagacgaattggtgtaccaggtgccacagagcacacaagaagtatcaggagcaggaagggatggggaatgtgatgtttttaaagaaatcctttgaagatgatgctgctttttacaaagcatcgttttaaagcacatggcctttttttttttaattattagtggtagtaatatatagaatgtattacataactgtcactgaagtggttggggaaaatgtggtgactgaggtacaggaaactactaatcttgccatctggctttaaggtgttatggtggcacagttacgtgctcgccgtgttaaatttcaaatgtccgtgttggatactactgtagaacactatttttaatacagaaaaagctccctataatgcacttcagagaaattaaaaatcacagagtatttattaccaatgctgcaggtacattaatgaactcgagatggctctgtaagcctgactggcaataacgcacggtactgttcttgaaatacctaatggcttgaaattctagtctgtttgtgaaagatgggtactatcatgatttcctcttctattcctatattcttttctggattttttttaataattagtgatataagcattgtttttattgcagccatatccacttatccatcttaagatctgtagctgggattttctgacttgtaatgagcagggggattgctttttcactttgtgacactctttagagctttaatgcttcacagtatatggcctggtctcatccttgcgtgttccacttgaggccctttggtgtcttgccccattcttgtgtttataaaatgtttgagtatttctgatgagtgatgcttgccttagtctcatgaattcagatcccttcatgtcctttaagtatgctcctcaatgtgtaaacaggaacaactttatgatttgaaagctttaaaggagattcttctcccacccccaactttatttgcaatgggatttttcctaggagagttatgaaaagttgaaggcttctaagggaatactgtaaacatgacccacttatatttatcacagtgaaaggcaaaattattcactcagaagtaatataaattacctctttaaaaagtaaccagaatttgtcctttttggttttatacattcacaaacatatacatttttcttgagtctcaaggtattttatatttttagtcagaaaaaataatttttcatttcagttttccataaactgttacacaaaatataaacctaacgtgtatttttcaggactgcgtgatcgtgcactttgtgtggtaagaggtttgagtagtcctatatgtcacctagggaacagacattatagcttcctagcaaatgaatattcatgccttgtttttgatacctcctggcagcttccatgtcaccacttgttcatacctgcccagagctagttttagacatggcaaaatagaaatcatctgtaatttattagctaacaatgtaaaaccatcttttaaagccttcagactgtcaagacgacatgagcagctcaccatatgataaaaatacataaatttgacattccctcttccataaacctttgtttgtagatttaatgttgaacagtacttttccataaagttctagtcacttctgttggcctgagccaccagattatgatgttgccagaattcactcaatttgaataaagatgaacagtatttgttttcttgtttccatgaattatatcagtattctaaaacatcgcttcagaaagagaactgtttatttctgcaggcttcctgtccttttgtggtatggttttttggccttattttcactggcttttccttctccaaactttgaggcgtgatttcattcattgaagaatcaatacatattttgtttcaaaatgtttgaaacaaaagacatagatggtagacttttattaaaacatatatggatgtggaaagcacatatattaatgcagtcatcccttttcaggtgggaagagagcaaaccagttgattttttaattcatccttagtacacagagaatatacttttcctcaagtaatatacctgtttgaagctttaagagagatgtttttggtaactatttcattttcccaaagaagtttgctattcttgtgttaattgtgtatacctgattgttttttcctggaggtttttgttgttgttgtttagttttgggtttttttttttttaagaggggcaagtgttttctgaaatgatgcatattttaagactcgattcatattgccactgtgctatccttgaactaccaataatttttataaaatatctagtttttactacttttatataaactttactttccagatgaagagctgagcctgattcaaatggtttttctgctttatacttctttttagttcattggtttttatagtagaggttttctatttttttttttttttttttactacatttatatgtctgatacatatacggctttggagacaatcaagtaacaactgaaaatgtgaaagtaaccatatctgacaaaattcccttgaatttttatcctttgcttgcaacatttaagactcaaagtcactggtatattggattaagttttttcctgttaatgcaattatagaaatacatcggagacacaacaaatgtggccattacaggtttcataaaattacactgacttggctgttacttgatcttaggaaacagcacagtttaagatattgtgaattctgacttatactttattaaatgctgtaaatctaaatagatcctgttggatgtgatgggtctagtccagtttatttaagttcatgtttcactgtttgcactttgcattgaacaatgggtttattcgctgatgtaaacggttcgagtgaagaattaatgcagtaagtatgacaacacatacacacttgcctctccccatctccagaagaggggagcagagtccgagcttatctaaatatgaatgtggccacaaagctgtggaaggtgacaaagcttaaacacctttgccctggctctgcattgtcacctagagagcaagaggtctatagaaacatcatgtcacatgaaacgattctctgctttttggttctgaacttgaagtccctaaactgcaaaatctaagagttgggtggttattaaaatgcttttaaaaagtcaactgtggcaccaattctaatgtaatccaacttgtgactgtttttttttgttttgttttgtttttgtgtgtgtgtgtgtggcactgggaaaagtggaaacaaacatgtattgaaatacatattggaaataaaaatggtttgagcgtcagtgatattctcccagaatgtacttatcttacctcggcatgtactgtagtcactcagtatttgtatatgttgctagaatttagattgtaaaatagtgaaattttaatgtgttcatttgtttttaatgtatatatgtcttgctcagattatttggtttaaataaaacaaccttgaggtttgtagcttttccttaaaaaaaaaaaaaaaaaaaaatcaaaaaaaaacttgtttgggccgacctggacccctcgaggaaaaaggtttctcaacaacacttggcgtggggggcgggggcacccagaatagggtttagggagaacggtgtggccaatggggttggtccccgaagagacaatcccgcgggccacgaggaccaaggggccttggttgcctcaccccaaattaaaaaatcggcgcccgggggggacacccgcggcgcagtttcttggacacaacactccacaagagtggaggctatggagcgggaccaataacgtggagcttcataacaaagcaaggggatgtcacaagcgacaggagcgctcgagaattcaaaaatttaaggcacccgaggagtaggtagacagagagctgactagacgacgcacagagaagaagctacatagcacagccacgagacaacgatgaaatagaatcgaacgaacgaaacacgagcaagactacgaaggcacggacgaagttaactcagagataaaatagaaggagagaagaagacagcgagaaagaaaagagaatacgcgagcgaccaacggaaacggaatagaagcagacacgtagagaagacaacgagcgaacagcaaacgagcgatacgaacaagcacaagaagcacgagagaagaaaatcagccagaggcagaggaacacagaccgagcgcgacagaggcaataacagcaagaagacagaagagaagaggaaaagcaatgagagcgacggaaagcagggagagaagaagaagagagagaaagcggacagaacaagaaagaagaggagaagaagaacaggaaggaagagact

SEQ ID NO: 463703 - DNA, 3907 bp, Homo sapiens
tggcattactcttcagttctcaccatttttacccttctgcaaagtctcttgtttttatttaatggtctctttggcttgccgtcacaatgaaggttggtggaaaggaatgaagcagtttcttcctgcaaaagcagtggaccatgaggaaaccccagttcgctatagcagcagcgaagttaatcacctgagtccaagagaagtcaccacagtgctgcaggctgactctgcagagtatgctcagccactggtaggaggaattgttggtacacttcatcaaagatctacctttaaaccagaagaaggaaaagaagcaggctatgcagacctagatccttacaactcaccagggcaggaagtttatcatgcctatgctgaaccactcccaattacggggcctgagtatgcaaccccaatcatcatggacatgtcagggcaccccacaacttcagttggtcagccctccacatccactttcaaggctacggggaaccaacctcccccactagtgggaacttacaatacacttctctccaggactgacagctgctcctcagcccaggcccagtatgataccccgaaagctgggaagccaggtctacctgccccagacgaattggtgtaccaggtgccacagagcacacaagaagtatcaggagcaggaagggatggggaatgtgatgtttttaaagaaatcctttgaagatgatgctgctttttacaaagcatcgttttaaagcacatggcctttttttttttaattattagtggtagtaatatatagaatgtattacataactgtcactgaagtggttggggaaaatgtggtgactgaggtacaggaaactactaatcttgccatctggctttaaggtgttatggtggcacagttacgtgctcgccgtgttaaatttcaaatgtccgtgttggatactactgtagaacactatttttaatacagaaaaagctccctataatgcacttcagagaaattaaaaatcacagagtatttattaccaatgctgcaggtacattaatgaactcgagatggctctgtaagcctgactggcaataacgcacggtactgttcttgaaatacctaatggcttgaaattctagtctgtttgtgaaagatgggtactatcatgatttcctcttctattcctatattcttttctggattttttttaataattagtgatataagcattgtttttattgcagccatatccacttatccatcttaagatctgtagctgggattttctgacttgtaatgagcagggggattgctttttcactttgtgacactctttagagctttaatgcttcacagtatatggcctggtctcatccttgcgtgttccacttgaggccctttggtgtcttgccccattcttgtgtttataaaatgtttgagtatttctgatgagtgatgcttgccttagtctcatgaattcagatcccttcatgtcctttaagtatgctcctcaatgtgtaaacaggaacaactttatgatttgaaagctttaaaggagattcttctcccacccccaactttatttgcaatgggatttttcctaggagagttatgaaaagttgaaggcttctaagggaatactgtaaacatgacccacttatatttatcacagtgaaaggcaaaattattcactcagaagtaatataaattacctctttaaaaagtaaccagaatttgtcctttttggttttatacattcacaaacatatacatttttcttgagtctcaaggtattttatatttttagtcagaaaaaataatttttcatttcagttttccataaactgttacacaaaatataaacctaacgtgtatttttcaggactgcgtgatcgtgcactttgtgtggtaagaggtttgagtagtcctatatgtcacctagggaacagacattatagcttcctagcaaatgaatattcatgccttgtttttgatacctcctggcagcttccatgtcaccacttgttcatacctgcccagagctagttttagacatggcaaaatagaaatcatctgtaatttattagctaacaatgtaaaaccatcttttaaagccttcagactgtcaagacgacatgagcagctcaccatatgataaaaatacataaatttgacattccctcttccataaacctttgtttgtagatttaatgttgaacagtacttttccataaagttctagtcacttctgttggcctgagccaccagattatgatgttgccagaattcactcaatttgaataaagatgaacagtatttgttttcttgtttccatgaattatatcagtattctaaaacatcgcttcagaaagagaactgtttatttctgcaggcttcctgtccttttgtggtatggttttttggccttattttcactggcttttccttctccaaactttgaggcgtgatttcattcattgaagaatcaatacatattttgtttcaaaatgtttgaaacaaaagacatagatggtagacttttattaaaacatatatggatgtggaaagcacatatattaatgcagtcatcccttttcaggtgggaagagagcaaaccagttgattttttaattcatccttagtacacagagaatatacttttcctcaagtaatatacctgtttgaagctttaagagagatgtttttggtaactatttcattttcccaaagaagtttgctattcttgtgttaattgtgtatacctgattgttttttcctggaggtttttgttgttgttgtttagttttgggtttttttttttttaagaggggcaagtgttttctgaaatgatgcatattttaagactcgattcatattgccactgtgctatccttgaactaccaataatttttataaaatatctagtttttactacttttatataaactttactttccagatgaagagctgagcctgattcaaatggtttttctgctttatacttctttttagttcattggtttttatagtagaggttttctatttttttttttttttttttactacatttatatgtctgatacatatacggctttggagacaatcaagtaacaactgaaaatgtgaaagtaaccatatctgacaaaattcccttgaatttttatcctttgcttgcaacatttaagactcaaagtcactggtatattggattaagttttttcctgttaatgcaattatagaaatacatcggagacacaacaaatgtggccattacaggtttcataaaattacactgacttggctgttacttgatcttaggaaacagcacagtttaagatattgtgaattctgacttatactttattaaatgctgtaaatctaaatagatcctgttggatgtgatgggtctagtccagtttatttaagttcatgtttcactgtttgcactttgcattgaacaatgggtttattcgctgatgtaaacggttcgagtgaagaattaatgcagtaagtatgacaacacatacacacttgcctctccccatctccagaagaggggagcagagtccgagcttatctaaatatgaatgtggccacaaagctgtggaaggtgacaaagcttaaacacctttgccctggctctgcattgtcacctagagagcaagaggtctatagaaacatcatgtcacatgaaacgattctctgctttttggttctgaacttgaagtccctaaactgcaaaatctaagagttgggtggttattaaaatgcttttaaaaagtcaactgtggcaccaattctaatgtaatccaacttgtgactgtttttttttgttttgttttgtttttgtgtgtgtgtgtgtggcactgggaaaagtggaaacaaacatgtattgaaatacatattggaaataaaaatggtttgagcgtc

SEQ ID NO: 463704 - DNA, 3346 bp, Homo sapiens
tggcattactcttcagttctcaccatttttacccttctgcaaagtctcttgtttttatttaatggtctctttggcttgccgtcacaatgaaggttggtggaaaggaatgaagcagtttcttcctgcaaaagcagtggaccatgaggaaaccccagttcgctatagcagcagcgaagttaatcacctgagtccaagagaagtcaccacagtgctgcaggctgactctgcagagtatgctcagccactggtaggaggaattgttggtacacttcatcaaagatctacctttaaaccagaagaaggaaaagaagcaggctatgcagacctagatccttacaactcaccagggcaggaagtttatcatgcctatgctgaaccactcccaattacggggcctgagtatgcaaccccaatcatcatggacatgtcagggcaccccacaacttcagttggtcagccctccacatccactttcaaggctacggggaaccaacctcccccactagtgggaacttacaatacacttctctccaggactgacagctgctcctcagcccaggcccagtatgataccccgaaagctgggaagccaggtctacctgccccagacgaattggtgtaccaggtgccacagagcacacaagaagtatcaggagcaggaagggatggggaatgtgatgtttttaaagaaatcctttgaagatgatgctgctttttacaaagcatcgttttaaagcacatggcctttttttttttaattattagtggtagtaatatatagaatgtattacataactgtcactgaagtggttggggaaaatgtggtgactgaggtacaggaaactactaatcttgccatctggctttaaggtgttatggtggcacagttacgtgctcgccgtgttaaatttcaaatgtccgtgttggatactactgtagaacactatttttaatacagaaaaagctccctataatgcacttcagagaaattaaaaatcacagagtatttattaccaatgctgcaggtacattaatgaactcgagatggctctgtaagcctgactggcaataacgcacggtactgttcttgaaatacctaatggcttgaaattctagtctgtttgtgaaagatgggtactatcatgatttcctcttctattcctatattcttttctggattttttttaataattagtgatataagcattgtttttattgcagccatatccacttatccatcttaagatctgtagctgggattttctgacttgtaatgagcagggggattgctttttcactttgtgacactctttagagctttaatgcttcacagtatatggcctggtctcatccttgcgtgttccacttgaggccctttggtgtcttgccccattcttgtgtttataaaatgtttgagtatttctgatgagtgatgcttgccttagtctcatgaattcagatcccttcatgtcctttaagtatgctcctcaatgtgtaaacaggaacaactttatgatttgaaagctttaaaggagattcttctcccacccccaactttatttgcaatgggatttttcctaggagagttatgaaaagttgaaggcttctaagggaatactgtaaacatgacccacttatatttatcacagtgaaaggcaaaattattcactcagaagtaatataaattacctctttaaaaagtaaccagaatttgtcctttttggttttatacattcacaaacatatacatttttcttgagtctcaaggtattttatatttttagtcagaaaaaataatttttcatttcagttttccataaactgttacacaaaatataaacctaacgtgtatttttcaggactgcgtgatcgtgcactttgtgtggtaagaggtttgagtagtcctatatgtcacctagggaacagacattatagcttcctagcaaatgaatattcatgccttgtttttgatacctcctggcagcttccatgtcaccacttgttcatacctgcccagagctagttttagacatggcaaaatagaaatcatctgtaatttattagctaacaatgtaaaaccatcttttaaagccttcagactgtcaagacgacatgagcagctcaccatatgataaaaatacataaatttgacattccctcttccataaacctttgtttgtagatttaatgttgaacagtacttttccataaagttctagtcacttctgttggcctgagccaccagattatgatgttgccagaattcactcaatttgaataaagatgaacagtatttgttttcttgtttccatgaattatatcagtattctaaaacatcgcttcagaaagagaactgtttatttctgcaggcttcctgtccttttgtggtatggttttttggccttattttcactggcttttccttctccaaactttgaggcgtgatttcattcattgaagaatcaatacatattttgtttcaaaatgtttgaaacaaaagacatagatggtagacttttattaaaacatatatggatgtggaaagcacatatattaatgcagtcatcccttttcaggtgggaagagagcaaaccagttgattttttaattcatccttagtacacagagaatatacttttcctcaagtaatatacctgtttgaagctttaagagagatgtttttggtaactatttcattttcccaaagaagtttgctattcttgtgttaattgtgtatacctgattgttttttcctggaggtttttgttgttgttgtttagttttgggtttttttttttttaagaggggcaagtgttttctgaaatgatgcatattttaagactcgattcatattgccactgtgctatccttgaactaccaataatttttataaaatatctagtttttactacttttatataaactttactttccagatgaagagctgagcctgattcaaatggtttttctgctttatacttctttttagttcattggtttttatagtagaggttttctatttttttttttttttttttactacatttatatgtctgatacatatacggctttggagacaatcaagtaacaactgaaaatgtgaaagtaaccatatctgacaaaattcccttgaatttttatcctttgcttgcaacatttaagactcaaagtcactggtatattggattaagttttttcctgttaatgcaattatagaaatacatcggagacacaacaaatgtggccattacaggtttcataaaattacactgacttggctgttacttgatcttaggaaacagcacagtttaagatattgtgaatagccgggtcctctggtcagcct

SEQ ID NO: 463705 - DNA, 4808 bp, Homo sapiens
ttgggagtacggtaacggttgaagaactacctattgggtactatgcttattacctggtgttataccacagaaatgctgcgtatcaatggtgctacatataaatccctgaatttaaaactacgcgaagaagaagaagactgggaatgctttggggactgtgatacaggacacagatttgacacttgtaaaagagagcgaaatgaaatggaagaagagtggattagaaaagtccatcagatcctccgctggcctgatcagggtgtggaccttggccacatcagtcttatagagcttcttcatagtcagtttgatcttgtgcttgttggccttgacatcctcaatgagcacaactgtgttgttagcttcgctcttcatggcagaatcagtggtcagggggaacttgatgatggcatagtggtcatactggtttctcctggtgctcttctgagatatttgggctgctttggagcctcagtgtcctgggccaccagaaggctcaaggaactgaaacaaagggaatttgctcgaaatgtagcatctaaatccaggaaagatgaaagaaaacaggaaaaggcactccaacgcctgcacaagctggctgagctaagaaaggaaactgtatgtgctcctggaagtggccccatgttcaaatcaacaactgttactgtgagagaaaactgtaatgaaatttcccaacgagttgttgtggattcagttaataaccagcaagatttcaaatatactttgattcatagtgaagagaatactaaagatgctaccactgttgctgaagatccagaaagtgcaaataattatacagcaaaaaataaccaagttggggatcaagcccaggggattcacagacacaaaatcggcttttcttttgcatttccaaagaaagcgtccgtgaagctagagtcctcagctgcagccttctctgaatacagtgatgatgcctcagtgggaaaaggatttagcagaaaaagtagatttgtccccagtgcttgtcatcttcaacaatcttcaccaacagatgtgcttttgagttctgaggagaaaactaactcttttcatccaccagaggcaatgtgcagagacaaagaaactgttcaaactcaagagataaaagaagtctctagtgaaaaagatgcattattattaccttcattttgcaagtttcaacttcagttatcttctgatgcagataattgtcaaaattcagtcccattagcagatcaaataccactagagagtgttgttattaatgaagacatacctgttagtggtaacagttttgagttgttaggaaataaatccacagttcttgacatgtctaatgattgcatatctgtgcaagctaccacagaggaaaatgttaagcataacgaggcatccacaactgaggttgaaaataaaaatggtcccgagacattggccccttcaaatactgaagaggttaacataactatacataagaaaacaaatttctgcaaaagacaatgtgagccatttgtacctgtccttaacaaacacagatctacagttcttcagtggccatcagaaatgctggtttatacaactacgaaaccatcaatttcctatagctgtaatcctctatgttttgacttcaagtctactaaagtaaataataatctagataaaaataagccagacttaaaagatctttgttctcagcagaagcaggaagacatttgcatgggaccactttcagattacaaggatgtatctacagaaggactcactgattatgaaattggaagtagcaaaaataaatgcagccaagtcactcctcttttggctgatgatattctctccagtagttgtgattctggaaaaaatgagaacacaggtcagaggtataaaaacatttcctgtaagatcagagaaacagaaaagtataattttactaaaagtcaaataaaacaggacactctagatgaaaaatacaacaaaataaggttgaaagagacccatgaatactggttccataaaagtagaagaaagaaaaaaagaaaaaagttatgtcagcatcatcatatggagaaaaccaaagaatcagaaactcgctgcaaaatggaagcagagaatagttacactgaaaatgctgggaaatatctattggaaccaatttcagaaaagcagtatttagctgcagagcaattattagactcacatcagttacttgataaaaggcccaaatcagaatccatatccttaagtgacaatgaagaaatgtgtaaaacatggaatactgaatacaacacttatgatactatcagttctaaaaaccactgtaaaaagaacacaatacttttaaatggacaatcaaatgcaacaatgatacattctgggaaacataatttaacatattctagaacttactgttgttggaaaaccaaaatgtcaagctgtagtcaggatcacagaagcttagttcttcaaaatgatatgaaacacatgagtcagaatcaggctgttaaaagaggttacaattctgtcatgaatgaatcagaaagattctatcgaaaacgtagacaacattcacattcttattcttcagatgaaagtttaaatcgacagaatcatttaccagaagaatttttgaggccaccaagtacttcagttgctccctgcaagcctaaaaagaaacggaggcgaaaaagaggcagattccaccccggatttgaaactttagaactcaaagaaaatacagattatcccgtgaaagacaattcttccttaaatcctctggataggttaataagtgaagacaaaaaagagaaaatgaaaccacaagaagttgcaaaaatcgaaaggaactcagaacaaacaaaccaattaagaaacaaactgtctttccaccctaacaatctccttccttctgaaaccaatggtgaaactgagcatttagaaatggagaccacttctggtgaattgtcagatgtttccaatgatcccaccacatctgtctgtgtagctagtgccccaacaaaagaagcaattgacaataccctgcttgaacacaaagaaagaagtgagaatataaatcttaatgaaaagcaaattccttttcaggtgcctaatattgaaaggaactttagacagtcacagcctaaatcctatctttgccattatgaactggctgaggcccttccacaaggaaagatgaatgagacaccaactgagtggctgcgttataattcaggaatccttaacacacaaccaccattaccattcaaagaagcacatgtcagtggtcatacttttgtaacagctgagcaaatcctggctccattagctttaccagagcaagcattattgatcccactagaaaaccatgacaaattcaaaaatgtaccatgtgaggtctaccagcacattctgcagccaaacatgctggccaacaaggttaaatttacctttcctccagctgccctcccaccccctagcacacctctgcagcctttgcctttgcagcagtccttatgttctacctctgtaaccactatccatcacactgttttgcagcagcacgctgcagctgctgcagctgcagctgcagccgcagctgcaggaacctttaaagtgcttcagccacaccaacagtttctttcccaaatcccagctctcaccagaacctcattacctcagctctcagtaggaccagtaggaccgaggctttgtcctgggaaccagccaacttttgttgctcctcctcagatgccaatcattccagcttccaatcaaggaaatcaggccaataggctgaagaacaacaatgagcagagcaaccagacagttcacattcccctcgagaacaagactagaccctatgctccttcctagctcctgttggcactgtattgtgctctgcagaatgtaactgctgcctggggtttgctcctgttgtgttttctaattgatccatcgtcttgctagtgcctaagcttgcaacccagacactgtgtcttgattattctagttgaacttgttgcaaccagcttctgtaaccgagtaaattatgtttcttctggatgcttattgacttacattgcacattatcctccttttgaataattccccttatatttcttgactgaggttacctaagttacaacattttaaagtcaaggagactttagtttttaaaaatccaacatttaaggtgccttaatatggaagcccatgttttctgtgcatctctgaaaatagctatgcttcaaattaatgctttgagttttgactaatctgcttaccacattcaacttgttttttaatctaatgattttgcaagtgactattacttcaacttatgactgttggcagagaatcaatcttcacattaaaatgataagcctcaaacagattatagtttttattaaatggctttcattcccagaacagttgtactgaaataaaacaatgatagaaatattaataagttttgagatgtgaaatcttttattttctatcctgcattacaacttttcagaccatgacctttgtgagcccatacaatttcttaggtagtgtgaagcataatgtaatattttaaataattttacacactagcaattataattgcattttatagtacctaaggattaattatgtgcttgccaatcctctgtgctaatatataacactgtcttgacactatcttttaaaattgctaaacaaatataatgtaacattattattccatatagaaaagctttgcctaaacatgttagcatagaaaagactctacagcaatgcatttgtatataaataaatgtagtactgtt

SEQ ID NO: 463706 - DNA, 4457 bp, Homo sapiens
gccggactcctctttctcccggaagcggagcaccgagccggcaaaggcttgggtgtgagacagcagcggtggcagacaccgcagaagcaaagagcagtgaggctcctgcattcgggtggagcaccatggacgaagctggcagctctgcgagcggcgggggcttccgcccgggcgtggacagcctggacgaaccgcccaacagccgcatcttccttgtgatcagcaagtacacacctgagtcggtgctgagggagcgcttctcgccttttggcgacatccaggacatctgggtggtgcgggacaagcacaccaaggagtccaagggcattgctttcgtcaagttcgcccgcagctcacaggcctgcagggccatggaggagatgcatggccagtgcctcggccccaacgacaccaagcccatcaaggttttcattgctcagtcccgatcatctggaagtcaccgagatgttgaagatgaagaacttacaagaatctttgttatgataccaaagtcctacacagaagaagatctgcgggaaaaatttaaggtgtatggagatatcgagtattgcagcattattaagaataaagtgactggagaaagtaaaggtttgggctacgtacgatacttaaaaccatcacaagctgcccaagcaatagaaaactgtgatcgaagttttagagcaatcttggctgaacctaaaaataaagcatctgaatcctctgaacaagattattatagtaatatgaggcaagaagctttgggacatgaacctagagtaaatatgtttccatttgaacaacaatctgaatttcaagttttgacaagaatgatagccgaggccaggaagcaatctccaaacgcttgtcagttgtatcaagagttcctttcactgaagaacagcttttcagcatttttgatatagtaccaggattggaatattgtgaagttcaacgagatccttattcaaattatggtcatggagtggttcagtattttaatgtagcatcagctatttatgcaaaatacaaattacatggatttcagtaccctcctgggaaccgaataggtgtttccttcattgatgatggaagtaatgcaacagagtaagtaccattccaggagtgtctaaagccgagctttgagtgtacatgattgataggacttgaagaataaaaatagaaacaattgacctctcaggtgagaaagtcacacaaaacaagctactgttaaaagactgaatatttttagttttctgtaaattatcagttattttttccagtctccttagaaaaatggcaacacagatggtagctgcacagcttgcatcaatggtgtggaataacccaagtcagcaacaatttatgcaatttggaggaagctctggatcacagttgcctcaaatccagacagatgttgtacttccatcatgcaaaaaaaaagctcctgctgaaactcctgtgaaagaaagactttttattgtgtttaatcctcatcctttacctttagacgtattagaagatatattctgtcgttttggtaacctgatcgaagtttaccttgtgtcaggaaaaaatgtggggtatgccaagtatgccgatagaataagtgctaatgatgccattgccactctacatggaaagattctgaatggggtgagacttaaagttatgctggcagattcgccaagagaagaatctaacaaacggcaaagaacttactgattcttgagaaacagtagctcaagaacacatggatcctgggaactgaagtggccctgaagctgcactatgttggaggtttccttgactaagagaaccacatgcggcattcagctcagtaggggagtcataaaagatctcgcctctgaccagaagagtatgaatgacaaaggtgacataaccagcacagaaagatgtcttagcctctgcacatcagctgatttagaatacttatgtagatagcggttggggtcgggggggtgcggaatgttcttttcagcttctttgccctgagaactttgatcttattgcaaggaagtcccttaccctcttctaccctagatctgatggacctcctgggatttcctggggaaataaaatgagtctaacacctttgaccacctgctggatattatatcagcacttacttaagtaagctgtggaagagctgaaagcagtattcagagtctgacagttctctgcaattggcctagataaactcattgtgaaataagtaactaaatgggcaaaagatttgaacaagcacttcacaaaagaagaccaagaagagggcagggttttttgtttggggagttttatttagttttgttttggggttgttttgttttggcaggggacaggagtagtggatagattcattttgtaaagaaatattaaaatattctttttaatttgatagttaatataagcttaagaatcttttaaaactcagaatgttcagccgtattagtcatcaatgaactgctcattaaaactacaataagctaccctaacagtggtatgaacagcaagaattaaaatgttgacaataccaagtactggtgacagtgtgaagcaacaagaactgctgatgcaaattggctcaaccgcttgggaaaatgtttgacagtatctactaaagttgaacatatgtataccctcgactcagcaattccacttctaagcatatatccaacaaagatgtgtacatatatgtaccaaaagacacatacaaaaacattcttggtattattcatagtagccccaaagtggaaacaaccccaatgtccatgaacagaatgcatatgacactctatagcaaggaaatgagctaacttgctacacttataatgatttgaaggaatctcacaaacataatgttgaacaaaagcaaccagccaacaaaagatgtgctgtaggattcccagttacagagttcaaaaacaagcaaaacatatctttgagcagaatggaatgggggagttcacaaagggagttatggtgtgctggtggtcttgtttttcttgaccaggatggggataactgatcatttttgagctgtactctatggagtatgcattttttatttatcttatacttcaattaaagtttttctttcttagtgaataaagcaaaaatcagcatgaggctggtgaaacagacagttctgcagaatgagagaagaacaatgtcctgaagcatttagaaagaaggactttgttcttccagtgcttatagaacaaaaaatattagaaaatatctgcttttgctccccctatggtgcagcagggtattatgatggcaagagggcaggaaaataagagtgagaaaagaaagggagaagctaaattaatatttgagtcagaaatagtaaatagtcatagcactaaagaaaattgaatccatgatgaacagtgaatactgaactacttttcagaatcctgtgggttctcatgagtccacaaagcgaagatggagggaagttcccccactttttgttcattatccagatcagaactgctttcatcaatgttatatattgtgctttaaaagctttcttttaaaggattctctgcagcttaaataagttaggatgaacaaaaagcaccagagcaaaagataaaaagcaccctccgacaaatatagtaagagaaaaggtgcagatcaaaaaggctgattacagagatttatcctttgactaatagatgttcccaataaacaataactcgttttaatagaagaaacatggttgatctaaaaaattttaaaagtcacaagactgaagatcctcttctacacattttaaatgccatctggaatggagcaatgtctgtagttttgtagcccaagatttctctactcatccaaattgtaaaggtaacaggcattctgtgatatacaatgtactgctcatttgccctttctggaaaaaaattaatcaccacactcccaaaatgaatcaaaattaagaataaaagaagaaggaaagaaaggccagtcggtgagtattgaaatcatcactgaaactattagaataatgaaggtaattgtaaatttcatttttaaaaaaaagttttattatatgacttatctattccgaaatttttcagtgggatttataaccctaggttaagttaatgaaggccaagaaggaatggcagtttattttttgggggggatggaggtgggtgaggggtaaaatccttctcttttgtaaagaaatattaaaattcattctttttttactttgataattaaatgtaagattaagaatcttttgaagtctgttaaggtgcttaataataaaattaataacagaatgtctcctcttcaaattattgaacaatacaaaagtgaaattgtgtgtatgacaaaagtaaaaaaaaaaaaaaagcacgtaagaccaaaactgtttaaactttaaattctaaaaacaaaatgaaattatttccttc

SEQ ID NO: 463707 - DNA, 2922 bp, Homo sapiens
ctagaaagaatttctactaaatagaaattcagtagaatcccagtaaggggtaggattttaaaaaatggctgactccaattctgcattggaacatgctgttaataaaacaagatgacaccttagcctcccatcttctgacactccttattaacttatgtatgagaaggctatactgttaatttgagacagctattgagagtcttgtcataataggcttctttctgcattccttcactagtggccctgaagctgcactatgttggaggtttccttgactaagagaaccacatgcggcattcagctcagtaggggagtcataaaagatctcgcctctgaccagaagagtatgaatgacaaaggtgacataaccagcacagaaagatgtcttagcctctgcacatcagctgatttagaatacttatgtagatagcggttggggtcgggggggtgcggaatgttcttttcagcttctttgccctgagaactttgatcttattgcaaggaagtcccttaccctcttctaccctagatctgatggacctcctgggatttcctggggaaataaaatgagtctaacacctttgaccacctgctggatattatatcagcacttacttaagtaagctgtggaagagctgaaagcagtattcagagtctgacagttctctgcaattggcctagataaactcattgtgaaataagtaactaaatgggcaaaagatttgaacaagcacttcacaaaagaagaccaagaagagggcagggttttttgtttggggagttttatttagttttgttttggggttgttttgttttggcaggggacaggagtagtggatagattcattttgtaaagaaatattaaaatattctttttaatttgatagttaatataagcttaagaatcttttaaaactcagaatgttcagccgtattagtcatcaatgaactgctcattaaaactacaataagctaccctaacagtggtatgaacagcaagaattaaaatgttgacaataccaagtactggtgacagtgtgaagcaacaagaactgctgatgcaaattggctcaaccgcttgggaaaatgtttgacagtatctactaaagttgaacatatgtataccctcgactcagcaattccacttctaagcatatatccaacaaagatgtgtacatatatgtaccaaaagacacatacaaaaacattcttggtattattcatagtagccccaaagtggaaacaaccccaatgtccatgaacagaatgcatatgacactctatagcaaggaaatgagctaacttgctacacttataatgatttgaaggaatctcacaaacataatgttgaacaaaagcaaccagccaacaaaagatgtgctgtaggattcccagttacagagttcaaaaacaagcaaaacatatctttgagcagaatggaatgggggagttcacaaagggagttatggtgtgctggtggtcttgtttttcttgaccaggatggggataactgatcatttttgagctgtactctatggagtatgcattttttatttatcttatacttcaattaaagtttttctttcttagtgaataaagcaaaaatcagcatgaggctggtgaaacagacagttctgcagaatgagagaagaacaatgtcctgaagcatttagaaagaaggactttgttcttccagtgcttatagaacaaaaaatattagaaaatatctgcttttgctccccctatggtgcagcagggtattatgatggcaagagggcaggaaaataagagtgagaaaagaaagggagaagctaaattaatatttgagtcagaaatagtaaatagtcatagcactaaagaaaattgaatccatgatgaacagtgaatactgaactacttttcagaatcctgtgggttctcatgagtccacaaagcgaagatggagggaagttcccccactttttgttcattatccagatcagaactgctttcatcaatgttatatattgtgctttaaaagctttcttttaaaggattctctgcagcttaaataagttaggatgaacaaaaagcaccagagcaaaagataaaaagcaccctccgacaaatatagtaagagaaaaggtgcagatcaaaaaggctgattacagagatttatcctttgactaatagatgttcccaataaacaataactcgttttaatagaagaaacatggttgatctaaaaaattttaaaagtcacaagactgaagatcctcttctacacattttaaatgccatctggaatggagcaatgtctgtagttttgtagcccaagatttctctactcatccaaattgtaaaggtaacaggcattctgtgatatacaatgtactgctcatttgccctttctggaaaaaaattaatcaccacactcccaaaatgaatcaaaattaagaataaaagaagaaggaaagaaaggccagtcggtgagtattgaaatcatcactgaaactattagaataatgaaggtaattgtaaatttcatttttaaaaaaaagttttattatatgacttatctattccgaaatttttcagtgggatttataaccctaggttaagttaatgaaggccaagaaggaatggcagtttattttttgggggggatggaggtgggtgaggggtaaaatccttctcttttgtaaagaaatattaaaattcattctttttttactttgataattaaatgtaagattaagaatcttttgaagtctgttaaggtgcttaataataaaattaataacagaatgtctcctcttcaaattattgaacaatacaaaagtgaaattgtgtgtatgacaaaagtaaaaaaaaaaaaaaagcacgtaagaccaaaactgtttaaactttaaattctaaaaacaaaatgaaattatttccttc

SEQ ID NO: 463708 - DNA, 2804 bp, Homo sapiens
gacagagcgagactccgtctcaaacaaacaaaaacaaataaaacaagatgacaccttagcctcccatcttctgacactccttattaacttatgtatgagaaggctatactgttaatttgagacagctattgagagtcttgtcataataggcttctttctgcattccttcactagtggccctgaagctgcactatgttggaggtttccttgactaagagaaccacatgcggcattcagctcagtaggggagtcatcacagaaagatgtcttagcctctgcacatcagctgatttagaatacttatgtagatagcggttggggtcgggggggtgcggaatgttcttttcagcttctttgccctgagaactttgatcttattgcaaggaagtcccttaccctcttctaccctagatctgatggacctcctgggatttcctggggaaataaaatgagtctaacacctttgaccacctgctggatattatatcagcacttacttaagtaagctgtggaagagctgaaagcagtattcagagtctgacagttctctgcaattggcctagataaactcattgtgaaataagtaactaaatgggcaaaagatttgaacaagcacttcacaaaagaagaccaagaagagggcagggttttttgtttggggagttttatttagttttgttttggggttgttttgttttggcaggggacaggagtagtggatagattcattttgtaaagaaatattaaaatattctttttaatttgatagttaatataagcttaagaatcttttaaaactcagaatgttcagccgtattagtcatcaatgaactgctcattaaaactacaataagctaccctaacagtggtatgaacagcaagaattaaaatgttgacaataccaagtactggtgacagtgtgaagcaacaagaactgctgatgcaaattggctcaaccgcttgggaaaatgtttgacagtatctactaaagttgaacatatgtataccctcgactcagcaattccacttctaagcatatatccaacaaagatgtgtacatatatgtaccaaaagacacatacaaaaacattcttggtattattcatagtagccccaaagtggaaacaaccccaatgtccatgaacagaatgcatatgacactctatagcaaggaaatgagctaacttgctacacttataatgatttgaaggaatctcacaaacataatgttgaacaaaagcaaccagccaacaaaagatgtgctgtaggattcccagttacagagttcaaaaacaagcaaaacatatctttgagcagaatggaatgggggagttcacaaagggagttatggtgtgctggtggtcttgtttttcttgaccaggatggggataactgatcatttttgagctgtactctatggagtatgcattttttatttatcttatacttcaattaaagtttttctttcttagtgaataaagcaaaaatcagcatgaggctggtgaaacagacagttctgcagaatgagagaagaacaatgtcctgaagcatttagaaagaaggactttgttcttccagtgcttatagaacaaaaaatattagaaaatatctgcttttgctccccctatggtgcagcagggtattatgatggcaagagggcaggaaaataagagtgagaaaagaaagggagaagctaaattaatatttgagtcagaaatagtaaatagtcatagcactaaagaaaattgaatccatgatgaacagtgaatactgaactacttttcagaatcctgtgggttctcatgagtccacaaagcgaagatggagggaagttcccccactttttgttcattatccagatcagaactgctttcatcaatgttatatattgtgctttaaaagctttcttttaaaggattctctgcagcttaaataagttaggatgaacaaaaagcaccagagcaaaagataaaaagcaccctccgacaaatatagtaagagaaaaggtgcagatcaaaaaggctgattacagagatttatcctttgactaatagatgttcccaataaacaataactcgttttaatagaagaaacatggttgatctaaaaaattttaaaagtcacaagactgaagatcctcttctacacattttaaatgccatctggaatggagcaatgtctgtagttttgtagcccaagatttctctactcatccaaattgtaaaggtaacaggcattctgtgatatacaatgtactgctcatttgccctttctggaaaaaaattaatcaccacactcccaaaatgaatcaaaattaagaataaaagaagaaggaaagaaaggccagtcggtgagtattgaaatcatcactgaaactattagaataatgaaggtaattgtaaatttcatttttaaaaaaaagttttattatatgacttatctattccgaaatttttcagtgggatttataaccctaggttaagttaatgaaggccaagaaggaatggcagtttattttttgggggggatggaggtgggtgaggggtaaaatccttctcttttgtaaagaaatattaaaattcattctttttttactttgataattaaatgtaagattaagaatcttttgaagtctgttaaggtgcttaataataaaattaataacagaatgtctcctcttcaaattattgaacaatacaaaagtgaaattgtgtgtatgacaaaagtaaaaaaaaaaaaaaagcacgtaagaccaaaactgtttaaactttaaattctaaaaacaaaatgaaattatttccttc

SEQ ID NO: 463709 - DNA, 1993 bp, Homo sapiens
gccggactcctctttctcccggaagcggagcaccgagccggcaaaggcttgggtgtgagacagcagcggtggcagacaccgcagaagcaaagagcagtgaggctcctgcattcgggtggagcaccatggacgaagctggcagctctgcgagcggcgggggcttccgcccgggcgtggacagcctggacgaaccgcccaacagccgcatcttccttgtgatcagcaagtacacacctgagtcggtgctgagggagcgcttctcgccttttggcgacatccaggacatctgggtggtgcgggacaagcacaccaaggagtccaagggcattgctttcgtcaagttcgcccgcagctcacaggcctgcagggccatggaggagatgcatggccagtgcctcggccccaacgacaccaagcccatcaaggttttcattgctcagtcccgatcatctggaagtcaccgagatgttgaagatgaagaacttacaagaatctttgttatgataccaaagtcctacacagaagaagatctgcgggaaaaatttaaggtgtatggagatatcgagtattgcagcattattaagaataaagtgactggagaaagtaaaggtttgggctacgtacgatacttaaaaccatcacaagctgcccaagcaatagaaaactgtgatcgaagttttagagcaatcttggctgaacctaaaaataaagcatctgaatcctctgaacaagattattatagtaatatgaggcaagaagctttgggacatgaacctagagtaaatatgtttccatttgaacaacaatctgaatttcaagttttgacaagaatgatagccgaggccaggaagcaatctccaaacgcttgtcagttgtatcaagagttcctttcactgaagaacagcttttcagcatttttgatatagtaccaggattggaatattgtgaagttcaacgagatccttattcaaattatggtcatggagtggttcagtattttaatgtagcatcagctatttatgcaaaatacaaattacatggatttcagtaccctcctgggaaccgaataggtgtttccttcattgatgatggaagtaatgcaacagagtaagtaccattccaggagtgtctaaagccgagctttgagtgtacatgattgataggacttgaagaataaaaatagaaacaattgacctctcaggtgagaaagtcacacaaaacaagctactgttaaaagactgaatatttttagttttctgtaaattatcagttattttttccagtctccttagaaaaatggcaacacagatggtagctgcacagcttgcatcaatggtgtggaataacccaagtcagcaacaatttatgcaatttggaggaagctctggatcacagttgcctcaaatccagacagatgttgtacttccatcatgcaaaaaaaaagctcctgctgaaactcctgtgaaagaaagactttttattgtgtttaatcctcatcctttacctttagacgtattagaagatatattctgtcgttttggtaacctgatcgaagtttaccttgtgtcaggaaaaaatgtggggtatgccaagtatgccgatagaataagtgctaatgatgccattgccactctacatggaaagattctgaatggggtgagacttaaagttatgctggcagattcgccaagagaagaatctaacaaacggcaaagaacttactgattcttgagaacaaagactaaataatgacataatcctcagctgactgactgaaaatgtgactggacgcattccctgtggacagttgacagctttttttttttccatatacctgatagtctgtgtacagcattgttttgtctgggaagcagggattgctgacatgtatttttgaatccatacattaatgctaaaacgaatatagtagttgttccttagagcaatatgttgttacgtgtagcagaaataaagttttctttgcttaactaaa

SEQ ID NO: 463710 - DNA, 4417 bp, Homo sapiens
gccggactcctctttctcccggaagcggagcaccgagccggcaaaggcttgggtgtgagacagcagcggtggcagacaccgcagaagcaaagagcagtgaggctcctgcattcgggtggagcaccatggacgaagctggcagctctgcgagcggcgggggcttccgcccgggcgtggacagcctggacgaaccgcccaacagccgcatcttccttgtgatcagcaagtacacacctgagtcggtgctgagggagcgcttctcgccttttggcgacatccaggacatctgggtggtgcgggacaagcacaccaaggagtccaagggcattgctttcgtcaagttcgcccgcagctcacaggcctgcagggccatggaggagatgcatggccagtgcctcggccccaacgacaccaagcccatcaaggttttcattgctcagtcccgatcatctggaagtcaccgagatgttgaagatgaagaacttacaagaatctttgttatgataccaaagtcctacacagaagaagatctgcgggaaaaatttaaggtgtatggagatatcgagtattgcagcattattaagaataaagtgactggagaaagtaaaggtttgggctacgtacgatacttaaaaccatcacaagctgcccaagcaatagaaaactgtgatcgaagttttagagcaatcttggctgaacctaaaaataaagcatctgaatcctctgaacaagattattatagtaatatgaggcaagaagctttgggacatgaacctagagtaaatatgtttccatttgaacaacaatctgaatttcaagttttgacaagaatgatagccgaggccaggaagcaatctccaaacgcttgtcagttgtatcaagagttcctttcactgaagaacagcttttcagcatttttgatatagtaccaggattggaatattgtgaagttcaacgagatccttattcaaattatggtcatggagtggttcagtattttaatgtagcatcagctatttatgcaaaatacaaattacatggatttcagtaccctcctgggaaccgaataggtgtttccttcattgatgatggaagtaatgcaacagagtaagtaccattccaggagtgtctaaagccgagctttgagtgtacatgattgataggacttgaagaataaaaatagaaacaattgacctctcaggtgagaaagtcacacaaaacaagctactgttaaaagactgaatatttttagttttctgtaaattatcagttattttttccagtctccttagaaaaatggcaacacagatggtagctgcacagcttgcatcaatggtgtggaataacccaagtcagcaacaatttatgcaatttggaggaagctctggatcacagttgcctcaaatccagacagatgttgtacttccatcatgcaaaaaaaaagctcctgctgaaactcctgtgaaagaaagactttttattgtgtttaatcctcatcctttacctttagacgtattagaagatatattctgtcgttttggtaacctgatcgaagtttaccttgtgtcaggaaaaaatgtggggtatgccaagtatgccgatagaataagtgctaatgatgccattgccactctacatggaaagattctgaatggggtgagacttaaagttatgctggcagattcgccaagagaagaatctaacaaacggcaaagaacttactgattcttgagtggccctgaagctgcactatgttggaggtttccttgactaagagaaccacatgcggcattcagctcagtaggggagtcataaaagatctcgcctctgaccagaagagtatgaatgacaaaggtgacataaccagcacagaaagatgtcttagcctctgcacatcagctgatttagaatacttatgtagatagcggttggggtcgggggggtgcggaatgttcttttcagcttctttgccctgagaactttgatcttattgcaaggaagtcccttaccctcttctaccctagatctgatggacctcctgggatttcctggggaaataaaatgagtctaacacctttgaccacctgctggatattatatcagcacttacttaagtaagctgtggaagagctgaaagcagtattcagagtctgacagttctctgcaattggcctagataaactcattgtgaaataagtaactaaatgggcaaaagatttgaacaagcacttcacaaaagaagaccaagaagagggcagggttttttgtttggggagttttatttagttttgttttggggttgttttgttttggcaggggacaggagtagtggatagattcattttgtaaagaaatattaaaatattctttttaatttgatagttaatataagcttaagaatcttttaaaactcagaatgttcagccgtattagtcatcaatgaactgctcattaaaactacaataagctaccctaacagtggtatgaacagcaagaattaaaatgttgacaataccaagtactggtgacagtgtgaagcaacaagaactgctgatgcaaattggctcaaccgcttgggaaaatgtttgacagtatctactaaagttgaacatatgtataccctcgactcagcaattccacttctaagcatatatccaacaaagatgtgtacatatatgtaccaaaagacacatacaaaaacattcttggtattattcatagtagccccaaagtggaaacaaccccaatgtccatgaacagaatgcatatgacactctatagcaaggaaatgagctaacttgctacacttataatgatttgaaggaatctcacaaacataatgttgaacaaaagcaaccagccaacaaaagatgtgctgtaggattcccagttacagagttcaaaaacaagcaaaacatatctttgagcagaatggaatgggggagttcacaaagggagttatggtgtgctggtggtcttgtttttcttgaccaggatggggataactgatcatttttgagctgtactctatggagtatgcattttttatttatcttatacttcaattaaagtttttctttcttagtgaataaagcaaaaatcagcatgaggctggtgaaacagacagttctgcagaatgagagaagaacaatgtcctgaagcatttagaaagaaggactttgttcttccagtgcttatagaacaaaaaatattagaaaatatctgcttttgctccccctatggtgcagcagggtattatgatggcaagagggcaggaaaataagagtgagaaaagaaagggagaagctaaattaatatttgagtcagaaatagtaaatagtcatagcactaaagaaaattgaatccatgatgaacagtgaatactgaactacttttcagaatcctgtgggttctcatgagtccacaaagcgaagatggagggaagttcccccactttttgttcattatccagatcagaactgctttcatcaatgttatatattgtgctttaaaagctttcttttaaaggattctctgcagcttaaataagttaggatgaacaaaaagcaccagagcaaaagataaaaagcaccctccgacaaatatagtaagagaaaaggtgcagatcaaaaaggctgattacagagatttatcctttgactaatagatgttcccaataaacaataactcgttttaatagaagaaacatggttgatctaaaaaattttaaaagtcacaagactgaagatcctcttctacacattttaaatgccatctggaatggagcaatgtctgtagttttgtagcccaagatttctctactcatccaaattgtaaaggtaacaggcattctgtgatatacaatgtactgctcatttgccctttctggaaaaaaattaatcaccacactcccaaaatgaatcaaaattaagaataaaagaagaaggaaagaaaggccagtcggtgagtattgaaatcatcactgaaactattagaataatgaaggtaattgtaaatttcatttttaaaaaaaagttttattatatgacttatctattccgaaatttttcagtgggatttataaccctaggttaagttaatgaaggccaagaaggaatggcagtttattttttgggggggatggaggtgggtgaggggtaaaatccttctcttttgtaaagaaatattaaaattcattctttttttactttgataattaaatgtaagattaagaatcttttgaagtctgttaaggtgcttaataataaaattaataacagaatgtctcctcttcaaattattgaacaatacaaaagtgaaattgtgtgtatgacaaaagtaaaaaaaaaaaaaaagcacgtaagaccaaaactgtttaaactttaaattctaaaaacaaaatgaaattatttccttc

SEQ ID NO: 463711 - DNA, 2119 bp, Homo sapiens
gccggactcctctttctcccggaagcggagcaccgagccggcaaaggcttgggtgtgagacagcagcggtggcagacaccgcagaagcaaagagcagtgaggctcctgcattcgggtggagcaccatggacgaagctggcagctctgcgagcggcgggggcttccgcccgggcgtggacagcctggacgaaccgcccaacagccgcatcttccttgtgatcagcaagtacacacctgagtcggtgctgagggagcgcttctcgccttttggcgacatccaggacatctgggtggtgcgggacaagcacaccaaggagtccaagggcattgctttcgtcaagttcgcccgcagctcacaggcctgcagggccatggaggagatgcatggccagtgcctcggccccaacgacaccaagcccatcaaggttttcattgctcagtcccgatcatctggaagtcaccgagatgttgaagatgaagaacttacaagaatctttgttatgataccaaagtcctacacagaagaagatctgcgggaaaaatttaaggtgtatggagatatcgagtattgcagcattattaagaataaagtgactggagaaagtaaaggtttgggctacgtacgatacttaaaaccatcacaagctgcccaagcaatagaaaactgtgatcgaagttttagagcaatcttggctgaacctaaaaataaagcatctgaatcctctgaacaagattattatagtaatatgaggcaagaagctttgggacatgaacctagagtaaatatgtttccatttgaacaacaatctgaatttcaagttttgacaagaatgatagccgaggccaggaagcaatctccaaacgcttgtcagttgtatcaagagttcctttcactgaagaacagcttttcagcatttttgatatagtaccaggattggaatattgtgaagttcaacgagatccttattcaaattatggtcatggagtggttcagtattttaatgtagcatcagctatttatgcaaaatacaaattacatggatttcagtaccctcctgggaaccgaataggtgtttccttcattgatgatggaagtaatgcaacagagtaagtaccattccaggagtgtctaaagccgagctttgagtgtacatgattgataggacttgaagaataaaaatagaaacaattgacctctcaggtgagaaagtcacacaaaacaagctactgttaaaagactgaatatttttagttttctgtaaattatcagttattttttccagtctccttagaaaaatggcaacacagatggtagctgcacagcttgcatcaatggtgtggaataacccaagtcagcaacaatttatgcaatttggaggaagctctggatcacagttgcctcaaatccagacagatgttgtacttccatcatgcaaaaaaaaagctcctgctgaaactcctgtgaaagaaagactttttattgtgtttaatcctcatcctttacctttagacgtattagaagatatattctgtcgttttggtaacctgatcgaagtttaccttgtgtcaggaaaaaatgtggggtatgccaagtatgccgatagaataagtgctaatgatgccattgccactctacatggaaagattctgaatggggtgagacttaaagttatgctggcagattcgccaagagaagaatctaacaaacggcaaagaacttactgattcttgagaacaaagactaaataatgacataatcctcagctgactgactgaaaatgtgactggacgcattccctgtggacagttgacagctttttttttttccatatacctgatagtctgtgtacagcattgttttgtctgggaagcagggattgctgacatgtatttttgaatccatacattaatgctaaaacgaatatagtagttgttccttagagcaatatgttgttacgtgtagcagaaataaagttttctttgcttaactaaaaaaaaaaaaaaaacaaaaaaaacccggccctttttcgggcggaaacagaggtttaacggcccagtgcaaggtttctgcaccgtttgtaaaggggaacaccgcccaaggagggaatcgaactcgaga

SEQ ID NO: 463712 - DNA, 831 bp, Homo sapiens
ctttgttggtgtattaaataaacatattaccttattttaagtttcgataaaatactgtggaagactttgccaaattttatatgattgtgacaagttttttggggtaggtgcacttttttgtttgtttctttaatttttaaaaggctgcaaacacagctcatgaaggctggtttcttttatctctgaggtatgggcctgggagtatgtgagtcatgcctaggaaatagaagcaactgatccaagatataacattgaaagtagttgaattctattttgagatgggtctgataaccacaatgtaattctctttctatttgaggaaaatataaattttagtatttcagagcatcagattttttgttaattcacaacactttccctctagaaattcagcacctgcatcgcccttcttagtaagtttggttttatttgggggcagctatgattaagcagataacattgggtatattgaaataaaggaacaattcctaacattttaggaatactacaacagctatttcctttcctttcaggtgatgattttcatacttgtgttgtgttctttctacagaacaaagactaaataatgacataatcctcagctgactgactgaaaatgtgactggacgcattccctgtggacagttgacagctttttttttttccatatacctgatagtctgtgtacagcattgttttgtctgggaagcagggattgctgacatgtatttttgaatccatacattaatgctaaaacgaatatagtagttgttccttagagcaatatgttgttacgtgtagcagaaataaagttttctttgcttaactaaa

SEQ ID NO: 463713 - DNA, 711 bp, Homo sapiens
tctgaacaagattattatagtaatatgaggcaagaagctttgggacatgaacctagagtaaatatgtttccatttggtaagtaggcaacctttacttttaatagtataatgtagtatatgcaatctaatttgggttttaaagaatactctgttattgggcatctataaatttcacctagtgaataaaaatcttaaatgtagtttttttattcctaaaatgtggattatgactcctaaagttcttaatatttaacacttattttgtttaactgatttctaattatagttttctctgttaagttacgcattcctcatattagaaactattaccactgccacttttttgggtgagcttctgcctctatatagctgaccaaaaacttaaaaagacatatgtagagatcctctccgtatgagtcctaaaattttgttccagaactactgctactttaaaattagggctacagaaaggagaggaatggtaaaagtagaagctctaatagaaaaaggggaaaatgggtaatgaaagtaaggcctgtgaatgttatttgacgtaaacattcaggtaaaatacttaccatatttttcagttttgcatactaaacttctttctgtgaaattagactatgcatttcttcttatatttctgcattaaaggtaggggagtggggagagttgtctcttcttgtcattagtcccatcggtagttct

SEQ ID NO: 463714 - DNA, 838 bp, Homo sapiens
gccggactcctctttctcccggaagcggagcaccgagccggcaaaggcttgggtgtgagacagcagcggtggcagacaccgcagaagcaaagagcagtgaggctcctgcattcgggtggagcaccatggacgaagctggcagctctgcgagcggcgggggcttccgcccgggcgtggacagcctggacgaaccgcccaacagccgcatcttccttgtgatcagcaagtacacacctgagtcggtgctgagggagcgcttctcgccttttggcgacatccaggacatctgggtggtgcgggacaagcacaccaaggagtccaagggcattgctttcgtcaagttcgcccgcagctcacaggcctgcagggccatggaggagatgcatggccagtgcctcggccccaacgacaccaagcccatcaaggtgcgggtgcccgggtcggggtgccctcgggggaaggagtgggcctcttggacctcccttcacctgctgctctgccggggtgagggaggagtggaacatccgttcccggcagctgaccagacagcacctggcttggggacaggggctgctttgaggagaggctcccctcccacgaagctgcgccgggttgcagggaaggggacgggatgcggagtgtttgccccacgagagcggacccggcagccgcggccaccgggtgacagaacagcagtggctgggcttcccctctccctcgccctcactaatccaccagctcttgagttcactgcaaactcgtcctagcctactttgagtacttttctgaccttcctctctcagatgcccagatttccatatataaaaaacggaaaaac

SEQ ID NO: 463715 - DNA, 1817 bp, Homo sapiens
gccggactcctctttctcccggaagcggagcaccgagccggcaaaggcttgggtgtgagacagcagcggtggcagacaccgcagaagcaaagagcagtgaggctcctgcattcgggtggagcaccatggacgaagctggcagctctgcgagcggcgggggcttccgcccgggcgtggacagcctggacgaaccgcccaacagccgcatcttccttgtgatcagcaagtacacacctgagtcggtgctgagggagcgcttctcgccttttggcgacatccaggacatctgggtggtgcgggacaagcacaccaaggagtccaagggcattgctttcgtcaagttcgcccgcagctcacaggcctgcagggccatggaggagatgcatggccagtgcctcggccccaacgacaccaagcccatcaaggttttcattgctcagtcccgatcatctggaagtcaccgagatgttgaagatgaagaacttacaagaatctttgttatgataccaaagtcctacacagaagaagatctgcgggaaaaatttaaggtgtatggagatatcgagtattgcagcattattaagaataaagtgactggagaaagtaaaggtttgggctacgtacgatacttaaaaccatcacaagctgcccaagcaatagaaaactgtgatcgaagttttagagcaatcttggctgaacctaaaaataaagcatctgaatcctctgaacaagattattatagtaatatgaggcaagaagctttgggacatgaacctagagtaaatatgtttccatttgaacaacaatctgaatttcaagttttgacaagaatgatagccgaggccaggaagcaatctccaaacgcttgtcagttgtatcaagagttcctttcactgaagaacagcttttcagcatttttgatatagtaccaggattggaatattgtgaagttcaacgagatccttattcaaattatggtcatggagtggttcagtattttaatgtagcatcagctatttatgcaaaatacaaattacatggatttcagtaccctcctgggaaccgaataggtgtttccttcattgatgatggaagtaatgcaacagatctccttagaaaaatggcaacacagatggtagctgcacagcttgcatcaatggtgtggaataacccaagtcagcaacaatttatgcaatttggaggaagctctggatcacagttgcctcaaatccagacagatgttgtacttccatcatgcaaaaaaaaagctcctgctgaaactcctgtgaaagaaagactttttattgtgtttaatcctcatcctttacctttagacgtattagaagatatattctgtcgttttggtaacctgatcgaagtttaccttgtgtcaggaaaaaatgtggggtatgccaagtatgccgatagaataagtgctaatgatgccattgccactctacatggaaagattctgaatggggtgagacttaaagttatgctggcagattcgccaagagaagaatctaacaaacggcaaagaacttactgattcttgagaacaaagactaaataatgacataatcctcagctgactgactgaaaatgtgactggacgcattccctgtggacagttgacagctttttttttttccatatacctgatagtctgtgtacagcattgttttgtctgggaagcagggattgctgacatgtatttttgaatccatacattaatgctaaaacgaatatagtagttgttccttagagcaatatgttgttacgtgtagcagaaataaagttttctttgcttaactaaa

SEQ ID NO: 463716 - DNA, 2286 bp, Homo sapiens
gccggactcctctttctcccggaagcggagcaccgagccggcaaaggcttgggtgtgagacagcagcggtggcagacaccgcagaagcaaagagcagtgaggctcctgcattcgggtggagcaccatggacgaagctggcagctctgcgagcggcgggggcttccgcccgggcgtggacagcctggacgaaccgcccaacagccgcatcttccttgtgatcagcaagtacacacctgagtcggtgctgagggagcgcttctcgccttttggcgacatccaggacatctgggtggtgcgggacaagcacaccaaggagtccaagggcattgctttcgtcaagttcgcccgcagctcacaggcctgcagggccatggaggagatgcatggccagtgcctcggccccaacgacaccaagcccatcaaggttttcattgctcagtcccgatcatctggaagtcaccgagatgttgaagatgaagaacttacaagaatctttgttatgataccaaagtcctacacagaagaagatctgcgggaaaaatttaaggtgtatggagatatcgagtattgcagcattattaagaataaagtgactggagaaagtaaaggtttgggctacgtacgatacttaaaaccatcacaagctgcccaagcaatagaaaactgtgatcgaagttttagagcaatcttggctgaacctaaaaataaagcatctgaatcctctgaacaagattattatagtaatatgaggcaagaagctttgggacatgaacctagagtaaatatgtttccatttgaacaacaatctgaatttcaagttttgacaagaatgatagccgaggccaggaagcaatctccaaacgcttgtcagttgtatcaagagttcctttcactgaagaacagcttttcagcatttttgatatagtaccaggattggaatattgtgaagttcaacgagatccttattcaaattatggtcatggagtggttcagtattttaatgtagcatcagctatttatgcaaaatacaaattacatggatttcagtaccctcctgggaaccgaataggtgtttccttcattgatgatggaagtaatgcaacagagtaagtaccattccaggagtgtctaaagccgagctttgagtgtacatgattgataggacttgaagaataaaaatagaaacaattgacctctcaggtgagaaagtcacacaaaacaagctactgttaaaagactgaatatttttagttttctgtaaattatcagttattttttccagtctccttagaaaaatggcaacacagatggtagctgcacagcttgcatcaatggtgtggaataacccaagtcagcaacaatttatgcaatttggaggaagctctggatcacagttgcctcaaatccagacagatgttgtacttccatcatgcaaaaaaaaagctcctgctgaaactcctgtgaaagaaagactttttattgtgtttaatcctcatcctttacctttagacgtattagaagatatattctgtcgttttggtaacctgatcgaagtttaccttgtgtcaggaaaaaatgtggggtatgccaagtatgccgatagaataagtgctaatgatgccattgccactctacatggaaagattctgaatggggtgagacttaaagttatgctggcagattcgccaagagaagaatctaacaaacggcaaagaacttactgattcttgaggtaagccctttttaatctgaattttaaaacatattgagtaaatagtatatgaggaatatgtgtaagtactttataaacttttctttttagtgatttagaagttgtcagttaaaagagctttgcaactatttaaactttaaaaattgttgacatttactgaagaatgtttttgcccttctgtaaaataaaatcacatttcaatttagaaagataaataattgttttttgtttgtgaaatcttcgattttaagaattcaactttttattatgtgcttatataaacttttaagttgtccggtgctagaataaggattgctttaaaaaaaaattgaaatacttctaaagatttttaacttgaaaaattggtgtcttgagttatgaattgaggtaatttataacagtcgtttataaagataatgttttgacttctctctaatgaaatgcctaaaaagcaatatcaaataatatatcatttttggaccttttgaacctaaatgttggtgttttctggacttgtatttgtgagtttgtgcattaaaacaatacattcaga

SEQ ID NO: 463717 - DNA, 1218 bp, Homo sapiens
gcagagataaggtaagggaacagcctatatgatttggcaaaactctctgagggacattattatcattgtcaccatccgtctgttccatagaaatcagaaaatgttgcctaagagtgttgtgttggaatatatttatcttacaggttctgatttatctgcctatgtctctagctcttccggatcttctctagccccttcaagtctcaacttgaggctctctggtatttcctcaaaccatggagctttgtccccagccagcttccaggtccaggcctggcctacaaagaaggccatgactcaccacctcctcgttcctagaagattccctcctcggatctggaagaaaggcaagatggtgttgaggacattggtgcagaggcatgagggagtgagggccacctctgctacttagtgagtggtttggggcatcacttaacctcttggagcctcagggttttcactggtaaaagactgggaatggagattgtgaggattaatacgaagtggatgaggaggaccagagaaaatgtgtcattgcctggagtctcccctgtactctcttgttattggctgaaatgtgtacctccaaaatttatttattgaagccctaacctcagtatctgagaatgaaagtgtatctagaaacatggcctttaagagagtcatctgggaagctttagacaaatcctgatgcccagatccaattgcagaccaattatctgaatttctgggggaaggaacaaagccttacttttcttgtcaaaactctccaggtgattcctgtgtctatccaaagttgagaacactggtctattagataatgggagtttgtcccagctctacaggtctggggataatgctgatggctgcatttggggaagaggaacagagaagccagcttgagcaacatcttctgagtcactggccaagaaatgcttccccacctatccttcaggtaggagagtggacactagtcaaaaaggcacaagtatttccaattcaatttccctgcacatggctgcaagagacaaatgtcaccgattgagtctgagcttcacacatcccaacttaaagctcattaaaaagctcccaaaaaatgaggacttcaagcttggagttccctctgaaagccatgccggatctaaagttcagatcttacaacatgcaggcaccagactagtcatctgacatgcatttttctatttaattcccacaaaa

SEQ ID NO: 463718 - DNA, 737 bp, Homo sapiens
actccagtgtgctttttgggctcacagtttggttagttctcttcatcatctaggactaaccttttttaactatcatcatggtgacaggtaagagaatgtgatggctagaaccacagacagattcagaggattcttctgtgaccaggccctgttcctctgccagctctcccgctaactgactatgtaaccttgaggcaagtcacttcccctttctagccctcagttttccggttattaaaatgaagagattgaactggataatcttcaggtttccgttaagtcaaaatggaccatatgattcatctaaaaatgttctaagacaggaagcccgtttcttcacaactctcagtagctttggagattttcctatgaattatccattaccaaaaaatgacacccccattcccactatccacttctctggagcgtcctggcagcagacggaaagctcattagcagggcgggagccttggcagacacccactttcaggctgccaaagggcaaggacaagctcaaggcagaacaagaagaatattccgtcactgaacgtgggaagagagtgttcaaggagtgggcattcagccagactcggaggtcaggggtgactgaccggaagatgatcatgagatttagtgatgagctggtcactggtgctttttctcataggagtctcagtggcataaagagttaggaagtaagattctaggtcattgaggaggaggaggaggaggaagag

SEQ ID NO: 463719 - DNA, 993 bp, Homo sapiens
gcacagtgatacaaataatgccactaagggaaagagaacagaaacgaactgtggctgcaccatctgtcttcatcttcccgccatctgatgagcagttgaaatctggaactgcctctgttgtgtgcctgctgaataacttctatcccagagaggccaaagtacagtggaaggtggataacgccctccaatcgggtaactcccaggagagtgtcacagagcaggacagcaaggacagcacctacagcctcagcagcaccctgacgctgagcaaagcagactacgagaaacacaaagtctacgcctgcgaagtcacccatcagggcctgagctcgcccgtcacaaagagcttcaacaggggagatcagtactgggaaagtggggaaggacagtcatggagaaactacataaggaagcaccttgcccttctgcctcttgagaatgttgatgagtatcaaatctttcaaactttggaggtttgagtaggggtgagactcagtaatgtcccttccaatgacatgaacttgctcactcatccctgggggccaaattgaacaatcaaaggcaggcataatccagttatgaattcaaaccttcttctcagaagataacactctgaagtgaaacccacccataacctaagcaagtgaagacaggtgctgcaggtggaattgtgtccttcaaaaagtgggccctaaatccaatgactggtgtccttataagaagaaggagattggagatgcagtgacacataggaagaaagccacatgaccaaggaggcagagaccagagggatgcagctgagagccaaagagcaccaaggattgctgggagccaccagaagctggagaggtgtgggatggtttctccccgagaacctgcagaagacactaactctgcctgtgccttgaattcagatttctgtctccagacctatgacagaataaacttctgttgttttacggctcttagtttgtggtactttgttagggcaga

SEQ ID NO: 463720 - DNA, 940 bp, Homo sapiens
gcctcttacctacccacacctttaaaaaatttcctcctctttctccaatacccactcttttccttttaaatattgagatccccagaccctcttcaggaaagggacccatatgttgaggatgtgctgcgtcctgggctggcctggggcacagggccaggcagcttttgtcgcgtccacatgcctgctctattcttctccaggactcagcagctggctccaagcagcacagcccttaaccacccgcggagggagtggcccctgcccccaaatagttgcacacttgagcaggccttttgtctgcttagaagacattccaactgcccataagcagttggccttcgcacaaaggagggtgtccatggaggagggcatggccatcaagaacagctggttttctaagaggcttccgagatttgaaaaacggtggctaatgatgacaacagcaacagcactgagcacagaaaactccacaggcctgggctcggctcatcgcacagcctccatctctggatgccctgattcaaggagattcaaaacccgtgtcactgctgccatcttcctagaatccctttaaatcctcatggatttgctgacattgggagcatcctgaaagagtccccatgctagggtggctgcagtaacaggttctccccactccagaaaaaatcaaatcagattgtgaatttattccctgacattaacacacggcattacaggagcatgtacatcacatggtcaatttattggcatgaggattatgtcatcggggaataaatgggaaattctcaaggtactttgctccagtaatcaggactttatttatctctaagctaaaagaggggattgacttctttaatgatgatcagaaaatgcttttaggaagattcctttcctattaaacaatttcttaaagttgcagtaaatgttgtgtggcttgtct

SEQ ID NO: 463721 - DNA, 958 bp, Homo sapiens
gcctcttacctacccacacctttaaaaaatttcctcctctttctccaatacccactcttttccttttaaatattgagatccccagaccctcttcaggaaagggacccatatgttgaggatgtgctgcgtcctgggctggcctggggcacagggccaggcagcttttgtcgcgtccacatgcctgctctattcttctccaggactcagcagctggctccaagcagcacagcccttaaccacccgcggagggagtggcccctgcccccaaatagttgcacacttgagcaggccttttgtctgcttagaagacattccaactgcccataagcagttggccttcgcacaaaggagggtgtccatggaggagggcatggccatcaagaacagctggttttctaagaggcttccgagatttgaaaaacggtggctaatgatgacaacagcaacagcactgagcacagaaaactccacaggcctgggctcggctcatcgcacagcctccatctctggatgccctgattcaaggagattcaaaacccgtgtcactgctgccatcttcctagaatccctttaaatcctcatggatttgctgacattgggagcatcctgaaagagtccccatgctagggtggctgcagtaacaggtacaatgagaaatgatggttctccccactccagaaaaaatcaaatcagattgtgaatttattccctgacattaacacacggcattacaggagcatgtacatcacatggtcaatttattggcatgaggattatgtcatcggggaataaatgggaaattctcaaggtactttgctccagtaatcaggactttatttatctctaagctaaaagaggggattgacttctttaatgatgatcagaaaatgcttttaggaagattcctttcctattaaacaatttcttaaagttgcagtaaatgttgtgtggcttgtct

SEQ ID NO: 463722 - DNA, 5199 bp, Homo sapiens
cggccatcttggctccaccctcgtagcaaatgtggagagtgtcctccaggtgtaggtagagtttcatatagtagcctaaaatgggtgaaaagagagttcatcctcagaaaactaaagaaaatgtctgctttgtgaatcttgatgtgaacaaggatgaatgcagcacagagcacctgcaacagaaactggtcaacgtttcaccagatcttccaaaacttatcagttccatgaatgtccaacaaccaaaagaaaatgaaattgttgtcctaagtgggttagcctctggaaatctccaggcagattttgaagtttcacagtgcccttggctgccagatatctgcttggtccaatgtgcaagagggaacagaccaaacagtaccaactgcatcatctttgaaatcaacaaatttctgattggtctggaactggtgcaggagcgacagctccacctggaaacaaacatcttgaaactggaggatgacacgaactgttccttatcttcaatcgaggaagactttctcaccgcttctgagcacttggaggaggaaagcgaggtggatgaatctaggaacgattatgaaaatataaatgtctcagccaatgttttggaaagtaaacagctaaagggagccacccaggtggaatggaattgcaacaaggaaaagtggctttatgctttggaagacaaatacatcaacaaatatcccacaccattgattaaaacagaacgatctccagaaaacctaacaaagaacacagccttgcagagtctagatccctcagccaagccatcacagtggaaaagagaagctgtggggaatgggagacaagccacacattattatcattcagaagcttttaaaggtcaaatggaaaaatcacaggcactgtatattccaaaagatgcttatttctccatgatggataaagatgtaccttctgcatgtgctgtggcagagcagagaagcaacctaaacccaggagaccatgaagacacaagaaacgctctccctcctagacaagatggagaagtcaccactggcaagtatgctacaaatttagcagaatccgtgctgcaggatgcatttattagattatctcaatctcagtccacattaccccaggaatctgcagtcagtgtttctgtaggaagttctctgcttcccagttgctattccacaaaagatacagtggtttctcggtcatggaatgagctccccaaaatcgtcgttgttcagagtccagatggcagtgatgctgccccacagccaggcatctcctcctggcctgagatggaagtctctgttgaaacctcaagcatcctctctggagagaactccagcagacaaccccagagtgctctagaagtggcgttagcttgtgcagccactgtgattggaactatttccagtccacaggccacagaaagactcaaaatggagcaagtggtctcgaactttcccccagggagcagtggtgcactgcaaactcaagcaccccaaggactcaaggaaccttccatcaatgagtactcctttccatctgctttgtgtggcatgactcaggtggccagtgccgtggctgtctgtggtctgggtgaaagagaagaggtgacatgctcagtggctccaagtggtagcctcccgcctgcagctgaggcttctgaagccatgcccccactttgtggtttagcaagcatggagcttggcaaggaagccattgccaagggattgctcaaggaggctgctctggttttaacaaggcctaatacctacagcagcattggagactttctggactccatgaacaggagaatcatggaaactgcttcaaagtctcagaccctgtgctcagaaaatgtcgtcaggaatgaactggcacataccctgtccaatgttatcctgaggcattccattgatgaagttcaccacaaaaatatgataatcgaccccaatgacaacaggcattcatctgaaattctggacaccttaatggaaagtacaaatcaactgcttttagatgtgatatgcttcacgttcaagaagatgagtcatattgtacggcttggtgaatgtcctgctgtcctttctaaggagaccatcagaaggagggagacagaaccaagctgccagccatctgatccgggtgctagtcaagcttggacaaaagccactgaatcctccagcagctctccacttagcaattcacacaacacgagtcttgtcatcaacaatcttgtggatggcatgtattcaaaacaagacaagggtggagtgaggccaggcctcttcaagaaccccacgctgcagtcacaattatcacgtagtcacagagtgcccgattcttcaactgctacaacatcctccaaggaaatatatctgaaaggaatagcaggagaggatacaaaaagccctcatcacagtgagaatgaatgcagagcctcttccgaaggacaaaggtccccaacggtcagccagtccagaagtggttcccaggaggctgaggagagtatccacccaaacacccaagaaaagtacaactgtgccacatctcgcatcaacgaagttcaagtcaacctgtccttgttaggggatgacctgctgcttcctgctcaatccacgcttcaaacaaagcatccagacatctactgcattacagactttgcggaagaattagcagacacggtcgtctccatggcaactgaaattgcagcgatttgccttgacaactccagtggaaaacaaccctggttttgtgcatggaaaagagggagtgagtttctgatgacacccaacgtaccctgccgatccttgaagaggaagaaagagagccaggggagcgggaccgctgtgaggaaacacaagcctccccggctcagtgagatcaagaggaagacggacgagcaccctgagcttaaagaaaagctgatgaacagggttgtggatgagtccatgaaccttgaagatgtcccagattctgtcaatctttttgccaatgaagtggcagccaagatcatgaacctaacggagttctctatggtggacggcatgtggcaggcgcagggctatccccggaatcggttactgagtggcgacaggtggagccggctgaaggcctccagctgcgaaagcattcctgaggaagactccgaggccagggcctatgtcaacagcctgggcttaatgagcacgctgagccagccggtcagcagggccagctctgtctccaagcagtcgagctgtgagagcatcaccgatgagttttccaggttcatggtgaaccagatggaaaatgaagggagaggatttgagttactgctggattactatgctggcaagaacgccagcagcattctgaactcagccatgcaacaggcgtgccggaaaagtgaccacctcagtgtgaggcctagctgtccctctaagcagtccagcacagagagcatcactgaggagttctacaggtacatgctgagggacatcgaaagagacagcagagaaagtgcctcctccagacggagcagccaggattggacagccggcctgctgtctccttctctgcgatccccagtgtgccacagacagtcgtccatgccagacagcagatccccatgctccaggctgacagtgaatgtgcccatcaaagccaactctttagatggctttgctcagaactgcccacaagatttcctaagcgtgcagccggtcagtagcgcgtcctcatccggtctctgcaaatctgactcttgcttgtatcggagaggtgggactgaccacatcaccaacatgttaattcatgaaacgtgggctagctccattgaggctctcatgcgcaagaacaaaatcattgtggatgatgcagaggaagctgacactgagcctgtttctggtggctctccctcgcaagcagagaagtgtgcaaatagattagctgcgagcaggatgtgcagtgggccaactctgcttgttcaggagtctctcgattgcccgaggaaagactctgttaccgaatgtaaacagcccccagtgtcatctttgagcaaaactgcttctcttacaaaccacagccctttagattctaaaaaagaaacttcctcgtgccaggaccctgtaccaataaaccacaaaaggcgatcactttgctcgagggaagtgcctttgattcagattgaaacagatcagagagaagcctgtgctggggaacctgaacccttcctttccaaaagcagcctcctagaggaagcagaagggcattcgaatgacaaaaacatcccagatgtggtgagaggtggagacacagccgtgagcgcttgtcaaatccataggtgagtgaatcgtctcagactacatagggtgcatgtgactggagtttgcgtcttaatcagtgtttagtctaaattttagacataaaggatttgattggtgcaagaactaaattttcaagaccaaaaaaaaaaaaaatgagttaatgagtgcagcacaccaacatggcacatgtatacatatgtaacaaacatgcacgttgtgcacatgtgccctaaaatttaaagtgtaataaaaaaaaaatgatctcctaggttaatatgcatttatgatagagagttgaaagtaaatctcttcttaaaatctccaaaactaactaaactcatctatataaccaaagaagtaagatatcattcctcccattaaaattaatctcctacggtttcctaccttttaaaattcattcatggcaatttttaagcaaataataatattaatagtatatgatgcaataatattaataataaatgatgcaacttattcatttgaaaacagtcaaataaatattagttttggcatttgacattaaatattttggcatcatttttctctcctctcatttttcttctccatagagtctctcctttcaagttttgctttctgtttttgttttttgtctttttctaaagatcttgccaaggacactgtgtcctagaagggctgccctttagatgcctggtataattctagcagtgtaaatgcaaagcaacactgaagtattgttatttaaacagctttttccagaaaattatgacatagttgacaatccattttgaatttgacgcaaggtaataatttctctgaggctgcttaaagaactctccattccttttacaccttatattttctgtagaaaatttataagattcttgaatat

SEQ ID NO: 463723 - DNA, 1991 bp, Homo sapiens
ttcggtaataatctgaaattcttaaaaagaaaatagattatcccggaaaacagtcctctgacactagagacatttaaacagagactggagagccattggcttcgcgagggtggttgaatgaggtggctttgaggaccctctgtgctctgtgagccctaactctccgttttattttagtttctagatgtcgtgcagctggttcatcggaagtcctggaaagtgggtgatatcttccatgcagttgtccagtactgcaaaatgcatgaggagcagaaggatgggagactgagtctctttgactggctcttggaactgggataataaggcagtctgccgtatagatcattccttccctttattccaacttagattacagtggtttgttctaaatgctctaaacattctcaaaacatcacatcacattagcagaactataaaaaaaaatctgctactcagatccactgcatacagaattcaatggggcccaaattagaatgcttataatgagacccaatctccaggaaaacaacactcacataagtttaatcatataaaatgatttgtaatgtctctaattagatgaatcaactagaaacaaactcagtggtcaaaataatttttaagagtattccgtaacctatattttacttttctgattatattaaggggctgccagcccggagaaatacttaagatatgggtgagaaatccccagacttttatacaaaagatttccactttcaaatcaatgtcagtagacattgataaaagtatagcagcatcctctactgaggtgatttcatttattccctgcagcccactgataaatatctcacttctcccaaatagtatgtggactcccagctaagcagaaaactattgtcattcaactgaagaagaggaagataaaagattgtcttgtttccatcactgtattacttgtgtaacatgattacataattcttatcctaagagaaagctttcatatttaaaaaaaagtcttttcagataaaatctgcttgtgtcttgaataatatgaaatacaaactttcactttattttattgtaaattataaagagattattgtcttaaataatatattgagttagcttcaagcttcctaaaatatgaagagattgttgtctaaagtcacatattgacattgagctcagtggcctgtttcatcacgtatgtgctgctacctgtacagcagacatgccgctccagtgacatttataatgacagaagcagggtaatggtcttgtgtttgacatgatcagttaggatcatagactttccctgactcgtagatattagccttgaattgggggaaaagaagactttgacacattttagttattttaataacagagatttactcttttgaaaaataaaggtatctaatgtctccctaataagtcttctttccttccaactaaatgacctacacggacttttattttcttgatcaaagaggtgtttattaaggacttctggataactatacttttactctatttttaaagatcacaaagtaattttaaatgtgaacaggttcccataccatgaatgctggcctcaccttctctatcatccacattttgaaatgcaaagaaagctcccttgtaagccatacttccttccccactcccatcctaggatacttgcccagtgctcattaggcatttcttattcagatagtccaaatttaggttattatgcttaatttgacacattaactaaatgcccagttttaaaatatatccatcaattcacgctgaaatgtgcttctttgtgctatcaaatggaatagaatacacttattttttaaacaatcccagaatactgtgtgtagacttttgttgtgctcaaataaatgtttacttatcttacaaagctcaaatactggattgtaaccatgtgatgaagttatctatgttgtacctaacattgcaaattaatcaataaatctctgttgtcagattgttga

SEQ ID NO: 463724 - DNA, 4915 bp, Homo sapiens
cggccatcttggctccaccctcgtagcaaatgtggagagtgtcctccaggtgtaggtagagtttcatatagtagcctaaaatgggtgaaaagagagttcatcctcagaaaactaaagaaaatgtctgctttgtgaatcttgatgtgaacaaggatgaatgcagcacagagcacctgcaacagaaactggtcaacgtttcaccagatcttccaaaacttatcagttccatgaatgtccaacaaccaaaagaaaatgaaattgttgtcctaagtgggttagcctctggaaatctccaggcagattttgaagtttcacagtgcccttggctgccagatatctgcttggtccaatgtgcaagagggaacagaccaaacagtaccaactgcatcatctttgaaatcaacaaatttctgattggtctggaactggtgcaggagcgacagctccacctggaaacaaacatcttgaaactggaggatgacacgaactgttccttatcttcaatcgaggaagactttctcaccgcttctgagcacttggaggaggaaagcgaggtggatgaatctaggaacgattatgaaaatataaatgtctcagccaatgttttggaaagtaaacagctaaagggagccacccaggtggaatggaattgcaacaaggaaaagtggctttatgctttggaagacaaatacatcaacaaatatcccacaccattgattaaaacagaacgatctccagaaaacctaacaaagaacacagccttgcagagtctagatccctcagccaagccatcacagtggaaaagagaagctgtggggaatgggagacaagccacacattattatcattcagaagcttttaaaggtcaaatggaaaaatcacaggcactgtatattccaaaagatgcttatttctccatgatggataaagatgtaccttctgcatgtgctgtggcagagcagagaagcaacctaaacccaggagaccatgaagacacaagaaacgctctccctcctagacaagatggagaagtcaccactggcaagtatgctacaaatttagcagaatccgtgctgcaggatgcatttattagattatctcaatctcagtccacattaccccaggaatctgcagtcagtgtttctgtaggaagttctctgcttcccagttgctattccacaaaagatacagtggtttctcggtcatggaatgagctccccaaaatcgtcgttgttcagagtccagatggcagtgatgctgccccacagccaggcatctcctcctggcctgagatggaagtctctgttgaaacctcaagcatcctctctggagagaactccagcagacaaccccagagtgctctagaagtggcgttagcttgtgcagccactgtgattggaactatttccagtccacaggccacagaaagactcaaaatggagcaagtggtctcgaactttcccccagggagcagtggtgcactgcaaactcaagcaccccaaggactcaaggaaccttccatcaatgagtactcctttccatctgctttgtgtggcatgactcaggtggccagtgccgtggctgtctgtggtctgggtgaaagagaagaggtgacatgctcagtggctccaagtggtagcctcccgcctgcagctgaggcttctgaagccatgcccccactttgtggtttagcaagcatggagcttggcaaggaagccattgccaagggattgctcaaggaggctgctctggttttaacaaggcctaatacctacagcagcattggagactttctggactccatgaacaggagaatcatggaaactgcttcaaagtctcagaccctgtgctcagaaaatgtcgtcaggaatgaactggcacataccctgtccaatgttatcctgaggcattccattgatgaagttcaccacaaaaatatgataatcgaccccaatgacaacaggcattcatctgaaattctggacaccttaatggaaagtacaaatcaactgcttttagatgtgatatgcttcacgttcaagaagatgagtcatattgtacggcttggtgaatgtcctgctgtcctttctaaggagaccatcagaaggagggagacagaaccaagctgccagccatctgatccgggtgctagtcaagcttggacaaaagccactgaatcctccagcagctctccacttagcaattcacacaacacgagtcttgtcatcaacaatcttgtggatggcatgtattcaaaacaagacaagggtggagtgaggccaggcctcttcaagaaccccacgctgcagtcacaattatcacgtagtcacagagtgcccgattcttcaactgctacaacatcctccaaggaaatatatctgaaaggaatagcaggagaggatacaaaaagccctcatcacagtgagaatgaatgcagagcctcttccgaaggacaaaggtccccaacggtcagccagtccagaagtggttcccaggaggctgaggagagtatccacccaaacacccaagaaaagtacaactgtgccacatctcgcatcaacgaagttcaagtcaacctgtccttgttaggggatgacctgctgcttcctgctcaatccacgcttcaaacaaagcatccagacatctactgcattacagactttgcggaagaattagcagacacggtcgtctccatggcaactgaaattgcagcgatttgccttgacaactccagtggaaaacaaccctggttttgtgcatggaaaagagggagtgagtttctgatgacacccaacgtaccctgccgatccttgaagaggaagaaagagagccaggggagcgggaccgctgtgaggaaacacaagcctccccggctcagtgagatcaagaggaagacggacgagcaccctgagcttaaagaaaagctgatgaacagggttgtggatgagtccatgaaccttgaagatgtcccagattctgtcaatctttttgccaatgaagtggcagccaagatcatgaacctaacggagttctctatggtggacggcatgtggcaggcgcagggctatccccggaatcggttactgagtggcgacaggtggagccggctgaaggcctccagctgcgaaagcattcctgaggaagactccgaggccagggcctatgtcaacagcctgggcttaatgagcacgctgagccagccggtcagcagggccagctctgtctccaagcagtcgagctgtgagagcatcaccgatgagttttccaggttcatggtgaaccagatggaaaatgaagggagaggatttgagttactgctggattactatgctggcaagaacgccagcagcattctgaactcagccatgcaacaggcgtgccggaaaagtgaccacctcagtgtgaggcctagctgtccctctaagcagtccagcacagagagcatcactgaggagttctacaggtacatgctgagggacatcgaaagagacagcagagaaagtgcctcctccagacggagcagccaggattggacagccggcctgctgtctccttctctgcgatccccagtgtgccacagacagtcgtccatgccagacagcagatccccatgctccaggctgacagtgaatgtgcccatcaaagccaactctttagatggctttgctcagaactgcccacaagatttcctaagcgtgcagccggtcagtagcgcgtcctcatccggtctctgcaaatctgactcttgcttgtatcggagaggtgggactgaccacatcaccaacatgttaattcatgaaacgtgggctagctccattgaggctctcatgcgcaagaacaaaatcattgtggatgatgcagaggaagctgacactgagcctgtttctggtggctctccctcgcaagcagagaagtgtgcaaatagattagctgcgagcaggatgtgcagtgggccaactctgcttgttcaggagtctctcgattgcccgaggaaagactctgttaccgaatgtaaacagcccccagtgtcatctttgagcaaaactgcttctcttacaaaccacagccctttagattctaaaaaagaaacttcctcgtgccaggaccctgtaccaataaaccacaaaaggcgatcactttgctcgagggaagtgcctttgattcagattgaaacagatcagagagaagcctgtgctggggaacctgaacccttcctttccaaaagcagcctcctagaggaagcagaagggcattcgaatgacaaaaacatcccagatgtggtgagaggtggagacacagccgtgagcgcttgtcaaatccatagtgacagccttgataccagagatgtaccagaggctgaagcctccacagaagccagagcccccgatgaggcccccaaccctccaagcagcagcgaggagagcacaggcagctggacccagcttgccaatgaggaagacaacccagatgacacaagtagctttctccagctcagtgagcgatccatgagtgaattagtagaagaaaagaagattcttaaaggacagtcagaaagcacagaggcacctgcatctggaccgcctacgggaacagccagcccccagaggagcctgctggtgatcaactttgacctggagccagagtgtccagatgccgagctccgagccactctgcagtggatagctgcctctgaactggggattcccaccatctactttaagaaatctcaggaaaacagaattgaaaaggtatcatgtaccaggtttggaaaacaagaaagctttgtgttttcatcaccactggaaactcagtaaatgctcagtaaacccctgtccatttgaattatttgatcctgactgttcttgatcttaaaattgcggctagaacattgaaatcttccacctgtgtaaatata

SEQ ID NO: 463725 - DNA, 6661 bp, Homo sapiens
cggccatcttggctccaccctcgtagcaaatgtggagagtgtcctccaggtgtaggtagagtttcatatagtagcctaaaatgggtgaaaagagagttcatcctcagaaaactaaagaaaatgtctgctttgtgaatcttgatgtgaacaaggatgaatgcagcacagagcacctgcaacagaaactggtcaacgtttcaccagatcttccaaaacttatcagttccatgaatgtccaacaaccaaaagaaaatgaaattgttgtcctaagtgggttagcctctggaaatctccaggcagattttgaagtttcacagtgcccttggctgccagatatctgcttggtccaatgtgcaagagggaacagaccaaacagtaccaactgcatcatctttgaaatcaacaaatttctgattggtctggaactggtgcaggagcgacagctccacctggaaacaaacatcttgaaactggaggatgacacgaactgttccttatcttcaatcgaggaagactttctcaccgcttctgagcacttggaggaggaaagcgaggtggatgaatctaggaacgattatgaaaatataaatgtctcagccaatgttttggaaagtaaacagctaaagggagccacccaggtggaatggaattgcaacaaggaaaagtggctttatgctttggaagacaaatacatcaacaaatatcccacaccattgattaaaacagaacgatctccagaaaacctaacaaagaacacagccttgcagagtctagatccctcagccaagccatcacagtggaaaagagaagctgtggggaatgggagacaagccacacattattatcattcagaagcttttaaaggtcaaatggaaaaatcacaggcactgtatattccaaaagatgcttatttctccatgatggataaagatgtaccttctgcatgtgctgtggcagagcagagaagcaacctaaacccaggagaccatgaagacacaagaaacgctctccctcctagacaagatggagaagtcaccactggcaagtatgctacaaatttagcagaatccgtgctgcaggatgcatttattagattatctcaatctcagtccacattaccccaggaatctgcagtcagtgtttctgtaggaagttctctgcttcccagttgctattccacaaaagatacagtggtttctcggtcatggaatgagctccccaaaatcgtcgttgttcagagtccagatggcagtgatgctgccccacagccaggcatctcctcctggcctgagatggaagtctctgttgaaacctcaagcatcctctctggagagaactccagcagacaaccccagagtgctctagaagtggcgttagcttgtgcagccactgtgattggaactatttccagtccacaggccacagaaagactcaaaatggagcaagtggtctcgaactttcccccagggagcagtggtgcactgcaaactcaagcaccccaaggactcaaggaaccttccatcaatgagtactcctttccatctgctttgtgtggcatgactcaggtggccagtgccgtggctgtctgtggtctgggtgaaagagaagaggtgacatgctcagtggctccaagtggtagcctcccgcctgcagctgaggcttctgaagccatgcccccactttgtggtttagcaagcatggagcttggcaaggaagccattgccaagggattgctcaaggaggctgctctggttttaacaaggcctaatacctacagcagcattggagactttctggactccatgaacaggagaatcatggaaactgcttcaaagtctcagaccctgtgctcagaaaatgtcgtcaggaatgaactggcacataccctgtccaatgttatcctgaggcattccattgatgaagttcaccacaaaaatatgataatcgaccccaatgacaacaggcattcatctgaaattctggacaccttaatggaaagtacaaatcaactgcttttagatgtgatatgcttcacgttcaagaagatgagtcatattgtacggcttggtgaatgtcctgctgtcctttctaaggagaccatcagaaggagggagacagaaccaagctgccagccatctgatccgggtgctagtcaagcttggacaaaagccactgaatcctccagcagctctccacttagcaattcacacaacacgagtcttgtcatcaacaatcttgtggatggcatgtattcaaaacaagacaagggtggagtgaggccaggcctcttcaagaaccccacgctgcagtcacaattatcacgtagtcacagagtgcccgattcttcaactgctacaacatcctccaaggaaatatatctgaaaggaatagcaggagaggatacaaaaagccctcatcacagtgagaatgaatgcagagcctcttccgaaggacaaaggtccccaacggtcagccagtccagaagtggttcccaggaggctgaggagagtatccacccaaacacccaagaaaagtacaactgtgccacatctcgcatcaacgaagttcaagtcaacctgtccttgttaggggatgacctgctgcttcctgctcaatccacgcttcaaacaaagcatccagacatctactgcattacagactttgcggaagaattagcagacacggtcgtctccatggcaactgaaattgcagcgatttgccttgacaactccagtggaaaacaaccctggttttgtgcatggaaaagagggagtgagtttctgatgacacccaacgtaccctgccgatccttgaagaggaagaaagagagccaggggagcgggaccgctgtgaggaaacacaagcctccccggctcagtgagatcaagaggaagacggacgagcaccctgagcttaaagaaaagctgatgaacagggttgtggatgagtccatgaaccttgaagatgtcccagattctgtcaatctttttgccaatgaagtggcagccaagatcatgaacctaacggagttctctatggtggacggcatgtggcaggcgcagggctatccccggaatcggttactgagtggcgacaggtggagccggctgaaggcctccagctgcgaaagcattcctgaggaagactccgaggccagggcctatgtcaacagcctgggcttaatgagcacgctgagccagccggtcagcagggccagctctgtctccaagcagtcgagctgtgagagcatcaccgatgagttttccaggttcatggtgaaccagatggaaaatgaagggagaggatttgagttactgctggattactatgctggcaagaacgccagcagcattctgaactcagccatgcaacaggcgtgccggaaaagtgaccacctcagtgtgaggcctagctgtccctctaagcagtccagcacagagagcatcactgaggagttctacaggtacatgctgagggacatcgaaagagacagcagagaaagtgcctcctccagacggagcagccaggattggacagccggcctgctgtctccttctctgcgatccccagtgtgccacagacagtcgtccatgccagacagcagatccccatgctccaggctgacagtgaatgtgcccatcaaagccaactctttagatggctttgctcagaactgcccacaagatttcctaagcgtgcagccggtcagtagcgcgtcctcatccggtctctgcaaatctgactcttgcttgtatcggagaggtgggactgaccacatcaccaacatgttaattcatgaaacgtgggctagctccattgaggctctcatgcgcaagaacaaaatcattgtggatgatgcagaggaagctgacactgagcctgtttctggtggctctccctcgcaagcagagaagtgtgcaaatagattagctgcgagcaggatgtgcagtgggccaactctgcttgttcaggagtctctcgattgcccgaggaaagactctgttaccgaatgtaaacagcccccagtgtcatctttgagcaaaactgcttctcttacaaaccacagccctttagattctaaaaaagaaacttcctcgtgccaggaccctgtaccaataaaccacaaaaggcgatcactttgctcgagggaagtgcctttgattcagattgaaacagatcagagagaagcctgtgctggggaacctgaacccttcctttccaaaagcagcctcctagaggaagcagaagggcattcgaatgacaaaaacatcccagatgtggtgagaggtggagacacagccgtgagcgcttgtcaaatccatagtgacagccttgataccagagatgtaccagaggctgaagcctccacagaagccagagcccccgatgaggcccccaaccctccaagcagcagcgaggagagcacaggcagctggacccagcttgccaatgaggaagacaacccagatgacacaagtagctttctccagctcagtgagcgatccatgagtgaattagtagaagaaaagaagattcttaaaggacagtcagaaagcacagaggcacctgcatctggaccgcctacgggaacagccagcccccagaggagcctgctggtgatcaactttgacctggagccagagtgtccagatgccgagctccgagccactctgcagtggatagctgcctctgaactggggattcccaccatctactttaagaaatctcaggaaaacagaattgaaaagtttctagatgtcgtgcagctggttcatcggaagtcctggaaagtgggtgatatcttccatgcagttgtccagtactgcaaaatgcatgaggagcagaaggatgggagactgagtctctttgactggctcttggaactgggataataaggcagtctgccgtatagatcattccttccctttattccaacttagattacagtggtttgttctaaatgctctaaacattctcaaaacatcacatcacattagcagaactataaaaaaaaatctgctactcagatccactgcatacagaataagtcagaggaaaagcaaaatataggtctgtccaaattcatacaacttgtgggtgagttccaaagagcttggattagaagggctggacaaagagagaattcaatggggcccaaattagaatgcttataatgagacccaatctccaggaaaacaacactcacataagtttaatcatataaaatgatttgtaatgtctctaattagatgaatcaactagaaacaaactcagtggtcaaaataatttttaagagtattccgtaacctatattttacttttctgattatattaaggggctgccagcccggagaaatacttaagatatgggtgagaaatccccagacttttatacaaaagatttccactttcaaatcaatgtcagtagacattgataaaagtatagcagcatcctctactgaggtgatttcatttattccctgcagcccactgataaatatctcacttctcccaaatagtatgtggactcccagctaagcagaaaactattgtcattcaactgaagaagaggaagataaaagattgtcttgtttccatcactgtattacttgtgtaacatgattacataattcttatcctaagagaaagctttcatatttaaaaaaaagtcttttcagataaaatctgcttgtgtcttgaataatatgaaatacaaactttcactttattttattgtaaattataaagagattattgtcttaaataatatattgagttagcttcaagcttcctaaaatatgaagagattgttgtctaaagtcacatattgacattgagctcagtggcctgtttcatcacgtatgtgctgctacctgtacagcagacatgccgctccagtgacatttataatgacagaagcagggtaatggtcttgtgtttgacatgatcagttaggatcatagactttccctgactcgtagatattagccttgaattgggggaaaagaagactttgacacattttagttattttaataacagagatttactcttttgaaaaataaaggtatctaatgtctccctaataagtcttctttccttccaactaaatgacctacacggacttttattttcttgatcaaagaggtgtttattaaggacttctggataactatacttttactctatttttaaagatcacaaagtaattttaaatgtgaacaggttcccataccatgaatgctggcctcaccttctctatcatccacattttgaaatgcaaagaaagctcccttgtaagccatacttccttccccactcccatcctaggatacttgcccagtgctcattaggcatttcttattcagatagtccaaatttaggttattatgcttaatttgacacattaactaaatgcccagttttaaaatatatccatcaattcacgctgaaatgtgcttctttgtgctatcaaatggaatagaatacacttattttttaaacaatcccagaatactgtgtgtagacttttgttgtgctcaaataaatgtttacttatcttacaaagctcaaatactggattgtaaccatgtgatgaagttatctatgttgtacctaacattgcaaattaatcaataaatctctgttgtcagattgttga

SEQ ID NO: 463726 - DNA, 1586 bp, Homo sapiens
gcagtctctggagagtgccctccttctgagctaggctgaggtgatgcgaggtttgtctttccctgcctagtgtgtttcatttaccataatgtcctccaggttccacagtgttgccacggatgacctgatttcagtacccgtgtctggctgtagagtatctggtcgtgactggatactgcagtttctggatctcatcctctgggggtggacaggtaggttgattccttatcttggctattgcgactggttccgcagtcagcgtgggaaggcagatgtgtcttccttttctgaggaacctcctgcctctgtagtgtgcgtaccaatttacctgttaacagttgtggataagagagctctcctctttggaaattcacagcagcattttgtggtttcccttcttttaagatacatgaaggtctttgttatactcattccaccgagagagacacagtatctgagtcttgttctgattttcatttttgtcatgattagtgattgaactgatgtccggaagtttgatggctgaagagtataccgttgtgcatatatccttcaattcctgcattttttaatctgtagaaagacaagtaggttgattccccatcttagttattgtccagagtacttcatgaaacatgagagggagatacctccttaagagaacagaccctcccagtcttcagtgcactctaaatactggctaattctggccaatggaaggcatctgtggaagagaaaagcctcaggtcatgtgctatctgtctttattcactgtgacatattaggtaatggtcacagccactcaccatggccccagtttttaataacatgaccctgcttttgtgttccagtaacttgtgttgttttcccagtcctaagtatgatagaaacttcctgctgctgctaatctctgggttccatttaaaatccttccatcacgtgaatactatgctgtgtactaaatttttccataattaaatacttagaattatttttgcctacttattttgccccttagtgatatgttttaaaaacacttaaaatgtgttacaatatatttagaaaaggtagggaatgacatttttactttcatcagcatttatgctagcatttatggagcaatgctatctaaagtatttttagtaatttaaacgttatataatacatatgcttttgattcctttgttactatgtaaataaatatatttgtgatattcagtaaatagtattgaatacatgtttcatgtatataatataaagttatgattttttttaaacagtacatcatatttgcttgttggctttatgataacttagaaataatattctggattaactgtgtgactcatgagagagtttgtgcaactatgtttccaaatttacttgattttcaagacttacactagaactgtgcgaacaagggaccaagtcatctaaattctttaccaaagcctgtgttgagaaaggtatttcctagtttttcttgtaggacttgtatagtttgcggtcttctgctgaaatctttcattcaccttgagttagtttttgcatcttgtgagaggaaacctgaagccaattatgttatg

SEQ ID NO: 463727 - DNA, 1336 bp, Homo sapiens
tgttggtattttttctattgtgggctccagaggcactgctaaaggttttaaaaaccattctaagtcacctgcatgccttttgatgccacaccatccatggccaccttagaagaaagattagtcccagagagcaacagcctggtgcagactgtggtcatccgtgggaatgttcctcctgcatcggcgggacctgcattgccccagtgtgtggccacgtgctcctctgggctcatacagatgtctgtactcagaggacgccactgtgccatcctctttggaccatatgtacttccttggactgggtccttccttcctgacatggatatcatggttacttgcagccctgatgactacccgaaaggcactggggtggacatcgaggacaaagcagtcaatctgacagcttcttgcactcaggtgctcagagtcaaggaaggtgacgccggcccaccgaggcttggattcggcttatgtggaggaggggcaggggtggtggtgaagctgcaacttggagaacaaacagaaacagcaataggccagtcacaaggaaatgcactcagacaattttgcaataatccggttgagaactgtgtctatgaaaccagctgcatctgtctcatagagtgcatgttcctatattacttcacccagccgaacatctgctggtgccatcctgaggggtgctagaagctcccgtgtactctgcaggcttctacctccgagagaccaagacctgcctctggactttgcctccaaaggtttaaagcagtttttgcctgcatgtcctagacgttcagtagaaaaagatctcctcgtgctccagcacctttggggaaaccagaggctccacaatgctcagcagtttaatttactgcaggtcttctcaacatctttaattcacaatatatattgtgaatctgcaagaaggggtaagagggtgaatagtccatttcccacacccatttgaccacggaacttcctccacttctggccttggtagaggctcctcccctggggaagaggaagcacagctaagggcccagcctcgcctggaggagatgctgaagggcagccaagcttggtctcctagactttaggggtaggcgggtggttcgggataaggatcagcaatgtctggatttgcctagggcagtccgagctcacacaggttgccccagtataattataataaactccctcttttttctctccaaagggtcctggtttggggcatcaattctatgatcctggccatagtcaccgcagacctagggtcccgccacttggcattttgaagcccaaagagcagctcattgttagactctgcccctgccca

SEQ ID NO: 463728 - DNA, 2403 bp, Homo sapiens
ttgtaaaaacatccttttccgagatggttgacagagccaagctaagaagaaatggtttatattttcaagtaacacattcatttgggaactcctacacagaggatgaccataaggataatttcttgtacagtaaaatgtttttccttcggaccttccacacaaatccgcttatgtggaagccccaggaacctctcaaggcccagcttcagcctcaccttccctgtggtcttcttcaagcagacccataccaagctctctgtgctttggaaactgccagtgaggtgaagtggggaggcatcggagcgacagccacgttgtatgcctgctgcacgagccagaccgcaggacaatactcaatgagaggcaccaacatccatcctggctgagctgatgatggtgagaggccacagagccatgaaaatgacttggagcagcctccatgtattcctcagggttgaatcattgtgtgcaccacagagcatttgctttgtaaaaaagctaacactgtgaaaaatggggtaggcacttcctgttttgaccaggaacaaatgcaaaccagaccctgctcctctcaccaggcagagcttgctctttcaattcagagatatcttcaaggacccaattatgctgtggtgcggaatggagcatgtatgtaactgaggttcctgccaaagacatcatctcctggctgaatggcaagactggccaggacaccaggaaactgagactgattggacacacaagaatgtgagctggttccctcggcatagtctcagctctgagacgtctcttctccatcctagccctctggagatgtttgaggagccaactgttcacctgtcttgtctaccaagctcaaagttccttgttttacctgttcactgacttcttactgttgggaaacttccctcaaaacaaaggctgcctcctctttattagcccctgtgttctcagagagaaagatcttttagtctcattttagacactttcagtccttctacatgcagtggggcccccaacacttatacagtttctttcatcctgaccacagctgtgagggcagttgggccttggtggctcagtggtggccaattctgaacgcagtggacacgtgactgcctgggtttaaaactgacttcactgacaagtctccaacaagcactcaagtacccagaggaagagtgaaggcatgaactctaacctgttgtctacccaaatgggtctgctcttgtcagatctgtagacctcagaaggcattttcaggagtcttcgtgtattagtccattttcatactgctatgaagaaatacccaagactaggtaatttataaagaaaaagagatttaatggactcacagttccatatggctggggaggcctcaaaatcatggcagaaggtgaaggaggagcaaaggcacatcttacatggcagcaggcaagagagcatgtgcagggaaactgccctttataaaaccatcagatcttaagagacttactcactatcatgagaacagcatggaaacaacccactcccatgattcaattatctcccactgagtccctcccatgacgtgtggggattatgggagctacaattcaggatgagatttgtgtggggacacagttaagccacatcaccttaccttattgggaaaggtactgctgtttttctgtttgttccatggccttcagtatataattaaaaaaaattgtggaggcagcatcttgcccaggattagaactgtaggggagaaagatcatccttgggccagggtgagggtaagcagaatgaaggccctgggcataacttgaacacccgaggaacttgaacccaaggctggcacaaaagccagaaggtgttactctccaccagctcagggattgtgaagatctctgtgcagactccactctgcggttggacagcatccctgagacatgcattttggaaattgtgatcaaccagaatccagaacacgctgtgcttaatggagtgaactgcctgtgaagcgcaggtgtgaggggcggatgataagtgacagtgccggtgcccccagcgcccttttacctgatggctcacccggcctacagctgcgcccttccctttgaatcgtcttgggtaacgggtgctgctttggaaatgcctggaaggtcatgtcctttgtctggggatggcttccagctgtggttgactgatagcagggggcacagaaggccagacacaacttgcctcaggtgggccgactctgagggtttgttcggcctccacgtggacttcagctgagcctgcatctttgcttggcttttcccactggcctattctgcttccctctccttaagggttctcccaggagaactcccttaataaatcacttgcacaaggatccctgtcttagcctttgcttct

SEQ ID NO: 463729 - DNA, 439 bp, Homo sapiens
cacagagccatgaaaatgacttggagcagcctccatgtattcctcagggttgaatcattgtgtgcaccacagagcatttgctttgtaaaaaagctaacactgtgaaaaatggggtaggcacttcctgttttgaccaggaacaaatgcaaaccagaccctgctcctctcaccaggcagagcttgctctttcaattcagagatatcttcaaggacccaattatgctgtggtgcggaatggagcatgtatgtaactgaggttcctgccaaagacatcatctcctggctgaatggcaagactggccaggacaccaggaaactgagactgattggacacacaagaatgtgagctggtgagacagtgggacacaggactaagcaaattatgtttctcttctgccttctgttctttgtcactaatgtaacaatagagtaataatac

SEQ ID NO: 463730 - DNA, 769 bp, Homo sapiens
taaaggggcagtgatgtgctggctttgtgtccgctgctctacgtgctagttggtgcatgcctgcctttcctggggatgagggctgcctccttcggttcaccagctgccgtgtgctatatcgtgccaatgataatgaagatcccccagaagacccccagaactttgcttcacctccacactcctctcaagaatcctttgggatggaccggacaagtggggcagtcagtgttgactcagtcccttcttacagtgctcatacgcggcccgtctggaaacctactacaaattatacttcaaattggatatcacggttgatcatgtgtttacttccaaatccacgtcagatggaaatctggcattgcaaatgtgacttgctatctgcttcagagtctgccaatactctatcatccttccaagtgttctctattttcccagtacctgagcgacttgatctgaagtcaattacagaactgttgagcctgaactcctatgggcctgtctaccattcataacccaaaaccccttaatcttcccccagtcgactcctttgctaaggccaagtctacaacgtgatcaacactgccctctgggcttctccttctcctcaccccatgggtggagatttgctagccttaagggtattaaagaacagatgttcaccttcctccttccagcctgtttccccttcaaatttctgtagaacaagctggagttgttctgtcctattaccccaacagagacgttataaatttcaaccaagttccaggac

SEQ ID NO: 463731 - DNA, 953 bp, Homo sapiens
gcaccgtggatttttgtcaggctcaaatttaaagcacaagaggccagatacacagtgacgctgaaagatctggtatgagctctcttcaaagaagatcaataaccatggtgtcctcaaattcttcattcatatcttctaactggcttcgggatgacatcatcacatcttcaaagatgggctcagcatcttcctccattagaccccgactggttgttgatgagcgtgaattttttgagatcatgcccaattatgccaagaacatcattgttggttttgcaagaatgaatgggaggactgttggaattgttggcaaccaacctaaggtggcctcaggatgcttggatattaattcatctgtgaaaggggctcgttttgtcagattctgtgatgcattcaatattccactcatcacttttgttgatgtccctggctttctacctggcacagcacaggaatacgggggcatcatccggcatggtgccaagcttctctacgcatttgctgaggcaactgtacccaaagtcacagtcatcaccaggaaggcctatggaggtgcctatgatgtcatgagctctaagcacctttgtggtgataccaactatgcctggcccaccgcagagattgcagtcatgggagcaaagggcgctgtggagatcatcttcaaagggcatgagaatgtggaagctgctcaggcagagtacatcgagaagtttgccaaccctttccctgcagcagtgcgagggtttgtggatgacatcatccaaccttcttccacacgtgcccgaatctgctgtgacctggatgtcttggccagcaagaaggtacaacgtccttggagaaaacatgcaaatattccattgtaaacaaatcaaaggaaaagaaaccaagaactgaattactgtctgcccattcacatcccattcctgccttttgcaatcatgaaacctgggaat

SEQ ID NO: 463732 - DNA, 923 bp, Homo sapiens
  misc_feature (19)..(19): n is a, c, g, or t
ttgatgttgatgccttgtntaatctccgggatttcttcaactacctgcccctgagcagtcaggacccggctcccgtccgtaagtgccacgatcccagtgaccttctggttcctgagcttaacacaattgtccctttggaatcaaccaaagcctacaacatggtgtacatcatacactctgttgttgatgagcgtgaattttttgagatcatgcccaattatgccaagaacatcattgttggttttgcaagaatgaatgggaggactgttggaattgttggcaaccaacctaaggtggcctcaggatgcttggatattaattcatctgtgaaaggggctcgttttgtcagattctgtgatgcattcaatattccactcatcacttttgttgatgtccctggctttctacctggcacagcacaggaatacgggggcatcatccggcatggtgccaagcttctctacgcatttgctgaggcaactgtacccaaagtcacagtcatcaccaggaaggcctatggaggtgcctatgatgtcatgagctctaagcacctttgtggtgataccaactatgcctggcccaccgcagagattgcagtcatgggagcaaagggcgctgtggagatcatcttcaaagggcatgagaatgtggaagctgctcaggcagagtacatcgagaagtttgccaaccctttccctgcagcagtgcgagggtttgtggatgacatcatccaaccttcttccacacgtgcccgaatctgctgtgacctggatgtcttggccagcaagaaggtacaacgtccttggagaaaacatgcaaatattccattgtaaacaaatcaaaggaaaagaaaccaagaactgaattactgtctgcccattcacatcccattcctgccttttgcaatcatgaaacctgggaat

SEQ ID NO: 463733 - DNA, 1827 bp, Homo sapiens
gccaaggaggtctccgaggcttccaaagagagcagtgttaactccacaccaggggacaaaggaccagggatcaagggcaaggcgagctccatgtgggccaaagagggtcagggtacaaagaagccctggaggtttctgcagacgatgcggctggggcggagcccgtcttacctgagcagcccccagcaaggcagccagcccagcgagtccagcggtggcgactccagagggtgagctgagggcaagctcagagcccagggtgagtcatttcctgtctccatggattgatggaccctgagagaggtggtccctccaggctcggcaaggccacaggtgtcaaaagcatcaaagcacagaacatcagtcacggtcactacgtgggtgaggtggtctcatatggttatcaggacattttcctgatgacaaatctgaatacatttcatacatatcatttttttgtgaagtgtctgatttctgtacatttttgttggattattggcctggttcttatggttacctattggttctctatgtattctggggaccagcccggtgtggtgtggtacacgtatcttcttccagtttgcatcttgccttatttctatttatttatttattttgagatggagttttgctcttcttgctcaggctggagtgcagtggtgtgatctcagctcaccgcaacctccgcctcccaggttcaagcgattctcttgtctcagcctcccgagtagctgggattacaggcatgtgccaccacacccggctaattttttgtatttttagtagagacggggttttgccatgttgggcaggctggtctcaaactcctgacctcaggtgatccgcccgcctcagcctcccaaagtgctgggattacaggcatgagccactacacctggccaccttatttctgttcactattgtcttttgaagaacaggaattcttaattttagtgaagccaaatttaccaatctttaattttataattgtgtggccacgccttgtggtgaagaccagccaccactggggcatgctgctgcgccacgcacaggctgctgttaacgttgcccaccatgacgccctgctggctacatccatctggagggtggattatcagaaaggcatcgtatgggccagcagcgccctgcaggcagccggctctctcatcttccctgccaaaacctgtgggttgcaggaaccacagctgtacttcacggagccccagcagctcctggatgtcttccgagagctggaggagcagaacctgtcgctgatccagaacagccaggagacggagaagaccctggaggagctgagccacaccctgaaacacacccagatccgcatcactgggagccaagttggggaaacagcccacacccgtccgtggccctggcctggtccaggttgtctgaaaagctccgagcgaagctccgtttgtgggccggatcctggagagagggtggtggagctgggggtgggcagggcccaggcacccgtgcccaccctgaagcagcccatggctagagccaggcctctccaaggaccttctgccctaggcgccttctgctgctgccaagctcctgggaggcccttggagtggctggaggtccacagcgaccctgaccccccagttcatagcagcactaacatgcttcacacaggcaccgaaagcagtcatttgctcagaagggcctggaagctgctgctgcttcatatttcgtagaccactgagcgggtgttcgcggcacagaactggggaaggccaagccacctgtgggctgctgtgaagtgtgtcccctgctgttgttcagcagcataac

SEQ ID NO: 463734 - DNA, 782 bp, Homo sapiens
aagtggagatgatggagcaggtacatggctgaaaacctgtttatccatgtgtttctcactccccttcccccttctatctctcctaattatggagtccaggccactatctccactggtccagatcactgtcctagcattctaaatgaactgtcagctcctatttgtgtcttccagcagtttacactctacttaatagcaggagtgaccctgttgaaacacaagcgagtttgtgtcacctctctgctcaaaccatccagcggctcttcattcttttcagagaaaatcccaattccttatggtgaccacaaggttccacccctcagccttcagcatgagaacagggacatcagcctgctttgcccatggaactgtctccagagcctacaacaatgctcagcctatgagaggtgtctcctagaagactttccatttcaacaagcctcatttatatgcaactggcaatttctctaaacagaagaaaaggggagattttgccaatcaattggcttcaccatcccccagccccaaagtgtgtttaagaacatttgcctgtgcatgcatgtgttttcctttgcatcccacaagaggaagggtctcgctctgtggcccaggctggagagtatggtgcaatcaaggctcactgccccatgttcaagccatcctcccacctcagcctcccagatagctgggactagagacacacatcaccacgcatggctctgggttacttcaataagtatttttcaataaatatttcttcaataaatatttaataacacaaa

SEQ ID NO: 463735 - DNA, 1111 bp, Homo sapiens
gacacaactttctgaccagcatcttttggaaatggagtactgctgtggaagtagaaagggaattttcctatcattagggacctacagtgtgatgccaaagctggaagcctttatacatatctctactgccttttcaaatggtaacctgaagcacatcgatgaagttgtttatccgtgccctgtggagccaaaaaaaaaatcgtcgattcccttgagtaattggtcaaataaagggatcaaggtagccaataaagagaggcggaaagtgagtgtgaggtggtgtcctacaaagcggacactgggctcacacacagcgcacacagggtttacagcaggtccactcggcagtaatacaggagatgggctgtgcgttcagcagttggtttcaccacctggtactgattctcttgccaccaagctctccagtgcatcctggactgtgcgtattttgtcagactggatatccaactgcaacgtgaaaaatggctgcaaagtggcagattcttttgcactctgctggtggtacattgtcgggaaagcaaccaatgcctggctacaggatcccctgaaactggaacaagcccttctttgacttcaacctgcttttcagaaaccaggggagatatagcgggaggggaatacttagcttccacataggccaccggccaggaggaagagggcttagaatcgtgaaagagactggtccaggacctgggctggctgacaggaagggtgcctgatgcagagcccgtgccgtcagcaggaggtagtttatccccagcttgtgtgccacacagaactgttccactgcatggaggaagctcaactgaagatcgaggagtcacaaagaactgattgaattcatcagggctaaaatctccaaaaatatactgcgggctgtggagggccatggctgccggtttcaatgggactcggcgctcctccggctgctcacgctgcctcccccgccgccgccatcttctcccccgcacatacacccatctatgactatttcaataactcctataacagatggaatttttgcaagttttagaataacaaataacattaaaaatccttatgaataaacattaatttacctaaatgcagg

SEQ ID NO: 463736 - DNA, 810 bp, Homo sapiens
gcttcatggaagaaatgatatttgaagtaggcacaagaagtatgtttaatatgcacaactattatgacaaggcctgggagaagttactgtttggagtttgtttttttcatgcccttgtgcaagagagaaagaaatttggtcctcttggttggaatattccatatggatttaatgaatctgacttgcgcatcagtatccgacaactgcagttatttatcaatgaatatgatacaattccatttgaagctatatcttacctgactggggagtgtaattatggaggaagagtgacagacgattgggacagacgtcttctattaaccatgctggctgacttttataatctgtacatagttgaaaaccctcattataagttttctcccagtggaaactattttgcacctcctaaaggcacttatgaggactacattgaattcattaagaaacttccatttactcaacaccctgagatatttggattacatgaaaacgttgacatctccaaggatcttcaacaaacaaaaaccctctttgagtccttgctcctcacccagggaggctccaaacagacaggagcctcaggaagtactgatcagattctgttagaaattaccaaagatatcctcaacaagctccctagtgatttcgacattgaaatggcactacggaagtatcctgtgagatatgaagaaagcatgaatactgtgttagtacaagaaatggaaagatttaacaagtaaggatctatatccccagtgattcagaaggcaactgtcttcttatattaataagaaaaataaaatagtgttg

SEQ ID NO: 463737 - DNA, 3186 bp, Homo sapiens
ccgggtgcctgccctccttgcaggccacagtagacaggccagtgcacaggctggggcagctgactggctggctgcaggggggcagctggacggcaccctccttggtctcccagtctgctcacgctgctgtggccccccaagggtgccaagacgctgtccctgcctgcagtgcccactctgctctccactgagctgcagacaggactgccaaagtcccgggagaccagtttgagagaatgcttttagattttccagattgccaggagtaaatcagcttttaggacttggaaagcccacacgacgtggtcaccttcctcacatgcgtcacggtggcctgcaccatccacagctggtgacaagacatttcaaagaaagtattaaattcattcacgagtgccggctccgcggtgagagctgccttgtacactgcctggccggggtctccaggagcgtgacactggtgatcgcatacatcatgaccgtcactgactttggctgggaggatgccctgcacaccgtgcgtgctgggagatcctgtgccaaccccaacgtgggcttccagagacagctccaggagtttgagaagcatgaggtccatcagtatcggcagtggctgaaggaagaatatggagagagccctttgcaggatgcagaagaagccaaaaacattctgggtaaatataaggagcaagggcgcacagagccccagcccggcgccaggcggtggagcagttttccggcactggctccgctgacctacgataattatacgacggagacctaacgcaagcgacctgctgccttccttcccactgcttgtcttcagtgtgcccggctgggcaggggtgcggtggtggtggccgatgaggacaggaaagggagatagccagggcgaggtggggcgagggctccttcccccaagcaacaccgcccagccctgctccaggcccctgcactccgcccacccctaccctggctgcacctgagcttgctgcccccggggatgttgcccagtggctgtgcactgctctgtgcacgtgcgtgtgtgtgagtgcacttgtgtgtgggtgactaagtggatgcatgtgtgtgcctgtgtgagtgagggtatgtgcacctaagtgtgtacatgtgtgtatgttgtgaaagtgtctgtgcacatgaatgtttgtgtgtgtgtgaactctttcttactgctggaagtcacagaattcatattgctgcccgggttggtgtggccacctttccctttgtccaagactccacatggaaggcatttgagctcgacctccgaaaagctacccagcaaagagcagtctgtgcctctgagcagaccgtgagaactcaggggacgagtggctaagagcatggcctctcccagaacccacccagggtggtgtggtgggggcaacaggggccagactcctctagagggagggtggctctggggccctggaaaacgtgagagactgccctgagctggtccagtgggccagcactttataccaactcagcatttaagggaagtatcttagattgcctccatctcaatgtgaatgcaccaggctgagggttccctagcgccttgagtcaaggccacttttcagcccatcgagccctgagttctacttggtgtttgttctctggagctgattgcacttgagctctgtggtgggcaggcgcactttagcctaagttgggtgccccagggcaccccctcctctctgctccttgccagcttcattcactcccagcctctcgctgtcctcactttgcaggggctcctcctcaacatttgcatgcacctgcaagaattgggaagaaagagcatttattaggcactgtagcaatttgcattttaaaatgcctgagcatttattaagcttcttggtattcacttgggtttgataattgatctgagctacctcattgaatgtttttggaaaggtgttttttggtatgcaagtcagctttgcctcacagttgaaaatgttcggtcatgattgcttttgaaaccaaaggggaaggtaccgatatcattgagctatttaaagttgccagtttgggctccagtaatgctttctggtgggtaaaattccacattcaggccacgagagcatctacagtttgtactctggggctgcaggcatcctgggacgctgtacgcaattcagtggtctagtcctttataccgactcagattccttaagcatgcagagtcactcgaatgaaaaaacatactcgacctctccctaaaaagatgttgcaacccagtttctctgaattccaccacaaaaagagaccctgaataagaagagcagttttcctgtgcatatagagggtgtgtcaaaggtgagctttttggggaccgggaaaaacaaagttgcctgattccgcgcaggtgcacaggccccggatgtacacccggaaaggggagtgtggctgtagaatcatccatccgtctacagctaaaacaatttgccaataaagtacatgtttttcctaagccaaaaataaatacgttaacagaaaaatgatttaggatatagcttgaatgcttaaatatgtgcacctttacaaacctctcagtgtattcttggagttcttgaaatgttgttttaatatttgttgccagtaatgttctttcttcacagccgctccaggaattatgaagttctgggcctttctcagaagactgtaatgtacctgaagtttttgaaatattgcaaacccacagagtttaggctggtgctgccaaaaagaaaagcaacatagagtttaagtatccagtagtgatttgtaaacttgtttttcatttgaagctgaatatatacgtagtcatgtttatgttgagaactaaggatattctttagcaagagaaaatattttccccttatccccactgctgtggaggtttctgtacctcgcttggatgcctgtaaggatcccgggagccttgccgcactgccttgtgggtggcttggcgctcgtgattgcttcctgtgaacgcctcccaaggacgagcccagtgtagttgtgtggcgtgaactctgcccgtgtgttctcaaattccccagcttgggaaatagcccttggtgtgggttttatctctggtttgtgttctccgtggtggaattgaccgaaagctctatgttttcgttaataaagggcaacttagccaagttt

SEQ ID NO: 463738 - DNA, 8139 bp, Homo sapiens
caaaatgtgctttgaggtaggaagggacctcctgtagagcggctttggcatgaggtcgacccgccctggggtggctccttttccctgtgttggcttggggccactgccccttcatgtttggctcacatggtccagaagcatcagggctcttttaacccagaatagtcaagccttggtttccttacccctgcagttttccagagcagctaaaaaacatccaagctggcaaaccattcttcctactccaaacattaggagcttttaccagtaagcaaggggtgggaagcttttcctttcttgaagatgctgccagcgtagtttcccttgtagctgccatcctgggtgcatgacttgcaaaactgatatgtgagtgacaataagccagatggcctttgcaaaagctctgcttattttgatttttgtggttccttacaaaaggcgaagtgagcattgatctttgttggtgctgttgtagctcaacggcaacatcactgtgttgtttcctcattttatttttcctaaaacctttacccattatctgcagattttcacatctaagcaaaataggttcatatgagtccagttacctagacaattaataaaaaagagcaaaatgttgagtgactatgtcataggttacttattgttaagttacagctttgtaagcagcttgctttgtaaatttttcatcccctgatggatgctgattttagaaggtgagagacgtgttagaaggatgtgaatatcgttttatttattggccataattaagtgcctttgggctttttgggtacagggttaaactacagctcaacatttaaatcaaatccaaccataaaattctcttaagtacaaaaaaaccagatgaccaacctcagggagaacccaagaaaaggtgggctttcccagcattgctgtgcagcattctgagaatacagcttgatttttctacatctttgcatgggcaacagtggtactgggtcctgtctcttgggacaagtttcactgtgattttaaatttttgtttcaacttggattcttcacgattgaccgtcaagttgaaatcctggttttgactttcactactgtgggatgtgcacaggaagttttccaccaaattttccacgtcgttcccctggcttgtttaatgagagcttggatttcagttttactccaacacctaaatagcctgggtctctaccagcatgccactagggttttacttcatttcagcctcctgtgggcattggacacccggcactctgtgagggtaacatgaaagataggcccttttcttacccaagctgatgtctgaagtacccgttttcacatgactcggaattaggaattgccgtcagataacactgggctcttctcactcaccctttgcacttggagtttttgttttactgtttccttaacctgtcacagtcccttaattagaatgtattgctagaggacagggtgcgttgtccaactttgtgcgcattttatagaaacacacaaaatcaccagacaaagcagctgtagtgtgaactcatccagatgcgatactgaaattccccagaggggcatcttcattgttttctttctttgttccagaagcaaaggccgataatgaaccgagctgttcgccggcagctcaagaactgttgacaaggctgggatttttactgggagaagggatcccaagtgccacacacataaccattgaagacaaaaatgaaaccatgtgcacagctctgagtcaaggcatcagtccttgctccacactaacaagcagcaccgcatctcctagcaccgatagcccctgctcaaccttgaatagctgtgtcagcaagacggcagccaacaaaagtccctgtgagaccattagcagccctagttccaccctggaaagcaaggacagtggaattataggtaagaagcacactgctcggtaacataatggctcgaatctcatcaaccagagcattcaccaggcacttcctcagagggttttagcatggtctgtgaaggtcagtctgccagcgcctgctctgttctttgcaggcagcactgactccatgtgtagctgagagagtggagcattggcttttacattccttgatgtttactttataacagtcagctcatttgttaaaaaaaaaaaaaaaaggaattccagatcagatctggcctgtgaaacaaaaatcattgctcttctatattcagttccatttgttgggcatcaggtcccactggggcacacagcagagcaatgaaattcctgcatattaagacgtcgtcttatcccaatctcaaggtggtggcctaccactactgccaggctgacaacacgtacacttgcctggtgcccgagtttgtgcacagcatcgcagctttgctctgccggtcccatcagctggccgcctacagagaccttctgataaaggagccccaactacagagcatgctgagcctccgatcctgtgtgcaggacccggtggcagctttcaagaggggagtgctggagccactcacaaacctgagaaatgatgacttcccagacaacaaagacatccacagtgacctgcacgcctacgtccagcacagggtgcacagcagccaggacatcctcagcaacatctccctgaacggcaaggccgatgccacactcattggaaaagtgagcagccacctggtgctgcggagcctcggctcctacctgtacctcaagctcaccctggaccttttccagaggggccacttggtcattaagagtgccagctacaaggtggtgcccgtgtctctctctgagctctatttgcttcagtgcaacatgaagttcatgacccagtccgcctttgagagggcacttccgattctcaacgtggccctcgcatccctccaccccatgacagacgagcagatctttcaggctattaatgctggccacatccagggggagcagggatgggaagactttcagcagaggatggacgccctctcctgcttcctcattaagaggcgagacaaaacccgcatgttctgccacccgtccttcagggagtggcttgtatggagagcagacggggaaaacacggccttcctgtgtgagcccaggaacgggcacgcgctcttggcattcatgttctcgcgtcaggagggcaagttgaaccgccagcagaccatggagcttggccaccacatcctgaaggcgcacattttcaaggcattctttgtgtgtgaccccgtgccttctgcaggtatctgcaccctctgcggcagacccactttcagagtgaccctgcagggcctcagtaagaagacgggaatttcttcaagccatctccaagccctgtggatcggctacagcaccgaggggctgtccgccgccctggcctctctcaggaatctctatactcccaacgtgaagtctcaccttggccacgaggaagttgtcactctgctcctggaatttggtgcctgcctggacggaacgtcagagaacggcatgactgccctctgttacgcagcagctgctggccacatgaagctggtgtgtctgctgaccaagaagggagtgagagtggaccacttggataagaagggccagtgtgcgcttgtccacagtgccctacggggccacggtgacattctccagtacctgctgacttgtgagtggtcgccgggtcctccccagccaggcaccctgaggaagagccacgccctgcagcaggcgctgaccgcggcggccagcatgggccacagctcggtggtccagtgcttgctggggatggagaaggaacatgaagtagaagtcaatggcaccgacacattgtggggagaaacaggtccacaagaccaggactgcctgctgcccacgcttactccctcactttccggtgacgaggccccagatagaacgcagagctcaggtgatccacgggagagatgtggctacctctctgtgacatgtgaagagacatgtagtgttctgctgattgactatgccactttcttgaagcttgctaatgatgatgatgatggttgtttggattgtttgcagcccggggtgcggctccctggcatggggaccacaccttttgaaggcctgttcttgtgttgccccattttcagcctgagagccctgactgccgccgcaggaagagggaagctggaggtctgtgagctgctgctggggcatggagctgctattgttagactgctgttggaacgcggctgtgatgtgaacctaagtgacaagcaaggccggacgcccctcatggtggctgcttgtgaagggcacttgagcaccgtggaattcctcctttcaaaagacaaagagggtctgtcagcattaagctgggcttgtctgaaaggtcacagggcagtggtccagtatctggttgaagaaggagctgcaatagaccagacagacaagaatggccgcacacccttggacctggctgccttctatggcgatgccgagactgtgctgtacctggtggagaagggagccgtgatcgagcatgtggaccacagcgggatgcggcccttggacagagccatcggctgccggaacacatctgtagtggtggcgctactcagaaagggagccaagttaggaatgcacttgggtttcgtttccttggcctcagtaatgagaagcaaatgcagtctgctcctctgcagcttcccaacactgttgctgctggcactgccgtccccggattcaggagagtccaacccaagcctattgtggtgggcctgccttctgactttggcatggcagaggaatttgcttccaaggctctcgaattgaagcccaagtcctatgaagccttttatgccagagcaagagcgaagagaaatagcaggcaattcgtggcagctctggctgacctgcaagaggctgtgaaactctgtcccaccaatcaggaagtcaagaggcttctggcccgcgtagaagaggagtgcaaacaactccagaggagtcaacagcaaaaacagcagggcccgctaccagctccactcaacgactccgagaacgaagaggacaccccaacccctggcttaagtgaccactttcactctgaggagactgaagaggaagaaacttctccccaggaagaatctgtttccccaactcccaggtcccagccatcctcatctgtcccttcctcatacatccgaaaccttcaagaagggttacagtccaaaggaaggccggtatcgccacagagcagggcaggaatcggcaagtccctgagagagcctgtggcccagccagggctgctcctgcagccctccaagcaggcccagatcgtgaaaaccagccagcacctgggctctggccagtcggcagtgagaaatggcagtatgaaagttcagatctcttctcagaaccctcctccaagtcccatgccagggagaatcgctgccactcctgctgggagcagaacccagcatttagagggaacaggtactttcactacaagagctggttgtggccactttggggatcggctgggccccagccagaatgtccgcctgcagtgtggtgagaatggccctgcacaccctttaccaagtaagacgaaaaccacagagaggcttctgtctcattcctccgtggctgtggacgcagcccctccaaaccaaggtgggctggcgacctgcagcgacgtgcgacacccagcttccctcaccagctcaggctcttctggttctccatccagcagcataaagatgtcaagttcaaccagtagtttgacttcgagcagcagtttttcagatggcttcaaggtccaaggaccagatactagaattaaagacaaggttgtaacccacgttcagagcggtacagctgagcacagaccccgcaacacgccgttcatgggcatcatggataagactgcgaggttccaacagcagagcaatcctccaagccgcagctggcactgtccggcaccagaggggctgctgacaaacacgtcttctgcagctggcctgcagtctgctaacactgagaagccctctctcatgcaagtgggaggatataataaccaagccaaaacctgttctgtttctaccctgagtgcaagtgtccacaatggggcacaagtgaaggagctagaagaaagcaagtgccaaattccagtccactctcaagagaacaggataactaagactgtttctcatctgtaccaggaaagtatctccaaacagcagcctcatattagtaatgaagcccacaggagccacctcactgcagccaaaccaaagcgatcatttatagagtcaaatgtgtgaaccttaagaaagccccatttgtggaatttggaaacgtgtgttgactcctggtggtaaattaaatagtttttttcatcagaaaaattattttttagccattttttttctttggggtggatctgatgccattgatatatctaaaatgtgggataaaacttctttaatagctagaaatcaccataaataagaatgctaaacagaattgaaaattatatcaacttaaaattttaagacagcccagaagacattaatgactctcacttatgaaattgtttggcttttgccactttcctccttgcctttgctatatggtagaatcacagaacttacttagagaataaatatgtctattgttcaagagtaacaggtttaactcatgaccaagtgatgtacatccaagtgatgtattctggaaacgatggaattttacagttacagttccattgagtcaaatcccattttatatatacataaaaattaagttctgagtgagttctagctaaatataagtgcgactgtaaacgcagccaatttttttaagcagaatatgagaacacctaagtattctcttcatagcagttcctataaagggattaaacacttatttctgtgttatggttcttattcatatatttttatagcacctttttttggaacctatatttgtgcttgaaggtgtttttgatatttggaaacagtataagccatttggagtcatgattggtggtcaagtggattcaagctaaaatactaagaccagcattcttagtggcgcttataaattagctctcacctggtttccaaactgcttttaacaatggtagtgctcctggaacaatccttccaagctcctctaaggacaatatttaattcagatactaaaggtaagactggttgttacttttgttttgttgtacaattagtactttatagtcacatgttgtatatattaaatagcccagttttattcagacttgtaaatagaactatttcaatgtagttaatctaaaaacaaaaaagaaaaccccagtcacgatttgcatgttctctgtaagcttcatccatgctggttattgcactgaatgatatattattagggcatgttaacagtataccagtaacagcactttatctcatttatatgaacacctttgaggtgctacttaagtccaagctctgatgtattattcatttgtaaagataaggtacaggaatgaaccttggtttaaaggtatttttatatgaaaatggtgtgttattggaagatgttaaaatgctaatttgagagaagtaggagtgtatctgttttatatgttgggatgtgaaatttattttctaaaattgaggagaaggaagttatatatttgcagaatgttttaaagtgaattgttgtaatgaagttcctgtgaacatcattatggttttgtacaaataggaacctctgatgtcattcttcaacgtttgttcctgtgtgtacaattgtactttgtatgaacagctttatcatttttataggctttccatgagttttgctgtaactactatggcttatttattttctttaatatttgtgaaagtcttactcctttgttagttttgtttctgcacaactactgtacttttccatatggaataaagactattaatagaatgtgttttgcactaaatgagtcaatggataagtagagaacagcctgatgacagctatctctgttgcttttaatctttgttaccctagagggaatagtgaaaagcatattttatattaacactacaaaatgcttatttaatttcgttttataatttcagaataagggtgacagctgctagaaattccacaat

SEQ ID NO: 463739 - DNA, 4921 bp, Homo sapiens
caaaatgtgctttgaggtaggaagggacctcctgtagagcggctttggcatgaggtcgacccgccctggggtggctccttttccctgtgttggcttggggccactgccccttcatgtttggctcacatggtccagaagcatcagggctcttttaacccagaatagtcaagccttggtttccttacccctgcagttttccagagcagctaaaaaacatccaagctggcaaaccattcttcctactccaaacattaggagcttttaccagtaagcaaggggtgggaagcttttcctttcttgaagatgctgccagcgtagtttcccttgtagctgccatcctgggtgcatgacttgcaaaactgatatgtgagtgacaataagccagatggcctttgcaaaagctctgcttattttgatttttgtggttccttacaaaaggcgaagtgagcattgatctttgttggtgctgttgtagctcaacggcaacatcactgtgttgtttcctcattttatttttcctaaaacctttacccattatctgcagattttcacatctaagcaaaataggttcatatgagtccagttacctagacaattaataaaaaagagcaaaatgttgagtgactatgtcataggttacttattgttaagttacagctttgtaagcagcttgctttgtaaatttttcatcccctgatggatgctgattttagaaggtgagagacgtgttagaaggatgtgaatatcgttttatttattggccataattaagtgcctttgggctttttgggtacagggttaaactacagctcaacatttaaatcaaatccaaccataaaattctcttaagtacaaaaaaaccagatgaccaacctcagggagaacccaagaaaaggtgggctttcccagcattgctgtgcagcattctgagaatacagcttgatttttctacatctttgcatgggcaacagtggtactgggtcctgtctcttgggacaagtttcactgtgattttaaatttttgtttcaacttggattcttcacgattgaccgtcaagttgaaatcctggttttgactttcactactgtgggatgtgcacaggaagttttccaccaaattttccacgtcgttcccctggcttgtttaatgagagcttggatttcagttttactccaacacctaaatagcctgggtctctaccagcatgccactagggttttacttcatttcagcctcctgtgggcattggacacccggcactctgtgagggtaacatgaaagataggcccttttcttacccaagctgatgtctgaagtacccgttttcacatgactcggaattaggaattgccgtcagataacactgggctcttctcactcaccctttgcacttggagtttttgttttactgtttccttaacctgtcacagtcccttaattagaatgtattgctagaggacagggtgcgttgtccaactttgtgcgcattttatagaaacacacaaaatcaccagacaaagcagctgtagtgtgaactcatccagatgcgatactgaaattccccagaggggcatcttcattgttttctttctttgttccagaagcaaaggccgataatgaaccgagctgttcgccggcagctcaagaactgttgacaaggctgggatttttactgggagaagggatcccaagtgccacacacataaccattgaagacaaaaatgaaaccatgtgcacagctctgagtcaaggcatcagtccttgctccacactaacaagcagcaccgcatctcctagcaccgatagcccctgctcaaccttgaatagctgtgtcagcaagacggcagccaacaaaagtccctgtgagaccattagcagccctagttccaccctggaaagcaaggacagtggaattataggtaagaagcacactgctcggtaacataatggctcgaatctcatcaaccagagcattcaccaggcacttcctcagagggttttagcatggtctgtgaaggtcagtctgccagcgcctgctctgttctttgcaggcagcactgactccatgtgtagctgagagagtggagcattggcttttacattccttgatgtttactttataacagtcagctcatttgttaaaaaaaaaaaaaaaaggaattccagatcagatctggcctgtgaaacaaaaatcattgctcttctatattcagttccatttgttgggcatcaggtcccactggggcacacagcagagcaatgaaattcctgcatattaagacgtcgtcttatcccaatctcaaggtggtggcctaccactactgccaggctgacaacacgtacacttgcctggtgcccgagtttgtgcacagcatcgcagctttgctctgccggtcccatcagctggccgcctacagagaccttctgataaaggagccccaactacagagcatgctgagcctccgatcctgtgtgcaggacccggtggcagctttcaagaggggagtgctggagccactcacaaacctgagaaatgagcagaaaattcctgaagaagaatacattattttgatagatggcttaaatgaagctgagtttcataaacctgattatggagatacgctttcttcatttattaccaaaattatttctaaatttcctgcctggttgaagttgattgtgactgtaagagcaaattttcaggaaatcataagtgcgctgccatttgtcaagctttccttagatgacttcccagacaacaaagacatccacagtgacctgcacgcctacgtccagcacagggtgcacagcagccaggacatcctcagcaacatctccctgaacggcaaggccgatgccacactcattggaaaagtgagcagccacctggtgctgcggagcctcggctcctacctgtacctcaagctcaccctggaccttttccagaggggccacttggtcattaagagtgccagctacaaggtggtgcccgtgtctctctctgagctctatttgcttcagtgcaacatgaagttcatgacccagtccgcctttgagagggcacttccgattctcaacgtggccctcgcatccctccaccccatgacagacgagcagatctttcaggctattaatgctggccacatccagggggagcagggatgggaagactttcagcagaggatggacgccctctcctgcttcctcattaagaggcgagacaaaacccgcatgttctgccacccgtccttcagggagtggcttgtatggagagcagacggggaaaacacggccttcctgtgtgagcccagtgactcctggtggtaaattaaatagtttttttcatcagaaaaattattttttagccattttttttctttggggtggatctgatgccattgatatatctaaaatgtgggataaaacttctttaatagctagaaatcaccataaataagaatgctaaacagaattgaaaattatatcaacttaaaattttaagacagcccagaagacattaatgactctcacttatgaaattgtttggcttttgccactttcctccttgcctttgctatatggtagaatcacagaacttacttagagaataaatatgtctattgttcaagagtaacaggtttaactcatgaccaagtgatgtacatccaagtgatgtattctggaaacgatggaattttacagttacagttccattgagtcaaatcccattttatatatacataaaaattaagttctgagtgagttctagctaaatataagtgcgactgtaaacgcagccaatttttttaagcagaatatgagaacacctaagtattctcttcatagcagttcctataaagggattaaacacttatttctgtgttatggttcttattcatatatttttatagcacctttttttggaacctatatttgtgcttgaaggtgtttttgatatttggaaacagtataagccatttggagtcatgattggtggtcaagtggattcaagctaaaatactaagaccagcattcttagtggcgcttataaattagctctcacctggtttccaaactgcttttaacaatggtagtgctcctggaacaatccttccaagctcctctaaggacaatatttaattcagatactaaaggtaagactggttgttacttttgttttgttgtacaattagtactttatagtcacatgttgtatatattaaatagcccagttttattcagacttgtaaatagaactatttcaatgtagttaatctaaaaacaaaaaagaaaaccccagtcacgatttgcatgttctctgtaagcttcatccatgctggttattgcactgaatgatatattattagggcatgttaacagtataccagtaacagcactttatctcatttatatgaacacctttgaggtgctacttaagtccaagctctgatgtattattcatttgtaaagataaggtacaggaatgaaccttggtttaaaggtatttttatatgaaaatggtgtgttattggaagatgttaaaatgctaatttgagagaagtaggagtgtatctgttttatatgttgggatgtgaaatttattttctaaaattgaggagaaggaagttatatatttgcagaatgttttaaagtgaattgttgtaatgaagttcctgtgaacatcattatggttttgtacaaataggaacctctgatgtcattcttcaacgtttgttcctgtgtgtacaattgtactttgtatgaacagctttatcatttttataggctttccatgagttttgctgtaactactatggcttatttattttctttaatatttgtgaaagtcttactcctttgttagttttgtttctgcacaactactgtacttttccatatggaataaagactattaataga

SEQ ID NO: 463740 - DNA, 8359 bp, Homo sapiens
caaaatgtgctttgaggtaggaagggacctcctgtagagcggctttggcatgaggtcgacccgccctggggtggctccttttccctgtgttggcttggggccactgccccttcatgtttggctcacatggtccagaagcatcagggctcttttaacccagaatagtcaagccttggtttccttacccctgcagttttccagagcagctaaaaaacatccaagctggcaaaccattcttcctactccaaacattaggagcttttaccagtaagcaaggggtgggaagcttttcctttcttgaagatgctgccagcgtagtttcccttgtagctgccatcctgggtgcatgacttgcaaaactgatatgtgagtgacaataagccagatggcctttgcaaaagctctgcttattttgatttttgtggttccttacaaaaggcgaagtgagcattgatctttgttggtgctgttgtagctcaacggcaacatcactgtgttgtttcctcattttatttttcctaaaacctttacccattatctgcagattttcacatctaagcaaaataggttcatatgagtccagttacctagacaattaataaaaaagagcaaaatgttgagtgactatgtcataggttacttattgttaagttacagctttgtaagcagcttgctttgtaaatttttcatcccctgatggatgctgattttagaaggtgagagacgtgttagaaggatgtgaatatcgttttatttattggccataattaagtgcctttgggctttttgggtacagggttaaactacagctcaacatttaaatcaaatccaaccataaaattctcttaagtacaaaaaaaccagatgaccaacctcagggagaacccaagaaaaggtgggctttcccagcattgctgtgcagcattctgagaatacagcttgatttttctacatctttgcatgggcaacagtggtactgggtcctgtctcttgggacaagtttcactgtgattttaaatttttgtttcaacttggattcttcacgattgaccgtcaagttgaaatcctggttttgactttcactactgtgggatgtgcacaggaagttttccaccaaattttccacgtcgttcccctggcttgtttaatgagagcttggatttcagttttactccaacacctaaatagcctgggtctctaccagcatgccactagggttttacttcatttcagcctcctgtgggcattggacacccggcactctgtgagggtaacatgaaagataggcccttttcttacccaagctgatgtctgaagtacccgttttcacatgactcggaattaggaattgccgtcagataacactgggctcttctcactcaccctttgcacttggagtttttgttttactgtttccttaacctgtcacagtcccttaattagaatgtattgctagaggacagggtgcgttgtccaactttgtgcgcattttatagaaacacacaaaatcaccagacaaagcagctgtagtgtgaactcatccagatgcgatactgaaattccccagaggggcatcttcattgttttctttctttgttccagaagcaaaggccgataatgaaccgagctgttcgccggcagctcaagaactgttgacaaggctgggatttttactgggagaagggatcccaagtgccacacacataaccattgaagacaaaaatgaaaccatgtgcacagctctgagtcaaggcatcagtccttgctccacactaacaagcagcaccgcatctcctagcaccgatagcccctgctcaaccttgaatagctgtgtcagcaagacggcagccaacaaaagtccctgtgagaccattagcagccctagttccaccctggaaagcaaggacagtggaattataggtaagaagcacactgctcggtaacataatggctcgaatctcatcaaccagagcattcaccaggcacttcctcagagggttttagcatggtctgtgaaggtcagtctgccagcgcctgctctgttctttgcaggcagcactgactccatgtgtagctgagagagtggagcattggcttttacattccttgatgtttactttataacagtcagctcatttgttaaaaaaaaaaaaaaaaggaattccagatcagatctggcctgtgaaacaaaaatcattgctcttctatattcagttccatttgttgggcatcaggtcccactggggcacacagcagagcaatgaaattcctgcatattaagacgtcgtcttatcccaatctcaaggtggtggcctaccactactgccaggctgacaacacgtacacttgcctggtgcccgagtttgtgcacagcatcgcagctttgctctgccggtcccatcagctggccgcctacagagaccttctgataaaggagccccaactacagagcatgctgagcctccgatcctgtgtgcaggacccggtggcagctttcaagaggggagtgctggagccactcacaaacctgagaaatgagcagaaaattcctgaagaagaatacattattttgatagatggcttaaatgaagctgagtttcataaacctgattatggagatacgctttcttcatttattaccaaaattatttctaaatttcctgcctggttgaagttgattgtgactgtaagagcaaattttcaggaaatcataagtgcgctgccatttgtcaagctttccttagatgacttcccagacaacaaagacatccacagtgacctgcacgcctacgtccagcacagggtgcacagcagccaggacatcctcagcaacatctccctgaacggcaaggccgatgccacactcattggaaaagtgagcagccacctggtgctgcggagcctcggctcctacctgtacctcaagctcaccctggaccttttccagaggggccacttggtcattaagagtgccagctacaaggtggtgcccgtgtctctctctgagctctatttgcttcagtgcaacatgaagttcatgacccagtccgcctttgagagggcacttccgattctcaacgtggccctcgcatccctccaccccatgacagacgagcagatctttcaggctattaatgctggccacatccagggggagcagggatgggaagactttcagcagaggatggacgccctctcctgcttcctcattaagaggcgagacaaaacccgcatgttctgccacccgtccttcagggagtggcttgtatggagagcagacggggaaaacacggccttcctgtgtgagcccaggaacgggcacgcgctcttggcattcatgttctcgcgtcaggagggcaagttgaaccgccagcagaccatggagcttggccaccacatcctgaaggcgcacattttcaaggcattctttgtgtgtgaccccgtgccttctgcaggtatctgcaccctctgcggcagacccactttcagagtgaccctgcagggcctcagtaagaagacgggaatttcttcaagccatctccaagccctgtggatcggctacagcaccgaggggctgtccgccgccctggcctctctcaggaatctctatactcccaacgtgaaggtgagccgtctcctgattttgggaggggccaacgtgaactacaggacagaagtgttaaataatgccccaatcctgtgcgtccagtctcaccttggccacgaggaagttgtcactctgctcctggaatttggtgcctgcctggacggaacgtcagagaacggcatgactgccctctgttacgcagcagctgctggccacatgaagctggtgtgtctgctgaccaagaagggagtgagagtggaccacttggataagaagggccagtgtgcgcttgtccacagtgccctacggggccacggtgacattctccagtacctgctgacttgtgagtggtcgccgggtcctccccagccaggcaccctgaggaagagccacgccctgcagcaggcgctgaccgcggcggccagcatgggccacagctcggtggtccagtgcttgctggggatggagaaggaacatgaagtagaagtcaatggcaccgacacattgtggggagaaacaggtccacaagaccaggactgcctgctgcccacgcttactccctcactttccggtgacgaggccccagatagaacgcagagctcaggtgatccacgggagagatgtggctacctctctgtgacatgtgaagagacatgtagtgttctgctgattgactatgccactttcttgaagcttgctaatgatgatgatgatggttgtttggattgtttgcagcccggggtgcggctccctggcatggggaccacaccttttgaaggcctgttcttgtgttgccccattttcagcctgagagccctgactgccgccgcaggaagagggaagctggaggtctgtgagctgctgctggggcatggagctgctgtgtcgcggacaaacaggagaggggttccacctttgttttgtgcagcacgccaggggcattggcagattgttagactgctgttggaacgcggctgtgatgtgaacctaagtgacaagcaaggccggacgcccctcatggtggctgcttgtgaagggcacttgagcaccgtggaattcctcctttcaaaaggtgcagccctttcttctctagacaaagagggtctgtcagcattaagctgggcttgtctgaaaggtcacagggcagtggtccagtatctggttgaagaaggagctgcaatagaccagacagacaagaatggccgcacacccttggacctggctgccttctatggcgatgccgagactgtgctgtacctggtggagaagggagccgtgatcgagcatgtggaccacagcgggatgcggcccttggacagagccatcggctgccggaacacatctgtagtggtggcgctactcagaaagggagccaagttaggaaatgctgcttgggcgatggccacttccaaacctgatatcttgattatacttttacagaaattaatggaggaaggaaatgtgatgtacaaaaaagggaaaatgaaagaggcagcccagaggtaccagtatgccttaagaaagtttcctcgagaaggattcggagaggacatgagacccttcaatgaattaagggtttccctctatctcaatttgtcgcgatgccgaagaaaaaccaatgactttggcatggcagaggaatttgcttccaaggctctcgaattgaagcccaagtcctatgaagccttttatgccagagcaagagcgaagagaaatagcaggcaattcgtggcagctctggctgacctgcaagaggctgtgaaactctgtcccaccaatcaggaagtcaagaggcttctggcccgcgtagaagaggagtgcaaacaactccagaggagtcaacagcaaaaacagcagggcccgctaccagctccactcaacgactccgagaacgaagaggacaccccaacccctggcttaagtgaccactttcactctgaggagactgaagaggaagaaacttctccccaggaagaatctgtttccccaactcccaggtcccagccatcctcatctgtcccttcctcatacatccgaaaccttcaagaagggttacagtccaaaggaaggccggtatcgccacagagcagggcaggaatcggcaagtccctgagagagcctgtggcccagccagggctgctcctgcagccctccaagcaggcccagatcgtgaaaaccagccagcacctgggctctggccagtcggcagtgagaaatggcagtatgaaagttcagatctcttctcagaaccctcctccaagtcccatgccagggagaatcgctgccactcctgctgggagcagaacccagcatttagagggaacaggtactttcactacaagagctggttgtggccactttggggatcggctgggccccagccagaatgtccgcctgcagtgtggtgagaatggccctgcacaccctttaccaagtaagacgaaaaccacagagaggcttctgtctcattcctccgtggctgtggacgcagcccctccaaaccaaggtgggctggcgacctgcagcgacgtgcgacacccagcttccctcaccagctcaggctcttctggttctccatccagcagcataaagatgtcaagttcaaccagtagtttgacttcgagcagcagtttttcagatggcttcaaggtccaaggaccagatactagaattaaagacaaggttgtaacccacgttcagagcggtacagctgagcacagaccccgcaacacgccgttcatgggcatcatggataagactgcgaggttccaacagcagagcaatcctccaagccgcagctggcactgtccggcaccagaggggctgctgacaaacacgtcttctgcagctggcctgcagtctgctaacactgagaagccctctctcatgcaagtgggaggatataataaccaagccaaaacctgttctgtttctaccctgagtgcaagtgtccacaatggggcacaagtgaaggagctagaagaaagcaagtgccaaattccagtccactctcaagagaacaggataactaagactgtttctcatctgtaccaggaaagtatctccaaacagcagcctcatattagtaatgaagcccacaggagccacctcactgcagccaaaccaaagcgatcatttatagagtcaaatgtgtgaaccttaagaaagccccatttgtggaatttggaaacgtgtgttgactcctggtggtaaattaaatagtttttttcatcagaaaaattattttttagccattttttttctttggggtggatctgatgccattgatatatctaaaatgtgggataaaacttctttaatagctagaaatcaccataaataagaatgctaaacagaattgaaaattatatcaatttggcttttgccactttcctccttgcctttgctatatggtagaatcacagaacttacttagagaataaatatgtctattgttcaagagtaacaggtttaactcatgaccaagtgatgtacatccaagtgatgtattctggaaacgatggaattttacagttacagttccattgagtcaaatcccattttatatatacataaaaattaagttctgagtgagttctagctaaatataagtgcgactgtaaacgcagccaatttttttaagcagaatatgagaacacctaagtattctcttcatagcagttcctataaagggattaaacacttatttctgtgttatggttcttattcatatatttttatagcacctttttttggaacctatatttgtgcttgaaggtgtttttgatatttggaaacagtataagccatttggagtcatgattggtggtcaagtggattcaagctaaaatactaagaccagcattcttagtggcgcttataaattagctctcacctggtttccaaactgcttttaacaatggtagtgctcctggaacaatccttccaagctcctctaaggacaatatttaattcagatactaaaggtaagactggttgttacttttgttttgttgtacaattagtactttatagtcacatgttgtatatattaaatagcccagttttattcagacttgtaaatagaactatttcaatgtagttaatctaaaaacaaaaaagaaaaccccagtcacgatttgcatgttctctgtaagcttcatccatgctggttattgcactgaatgatatattattagggcatgttaacagtataccagtaacagcactttatctcatttatatgaacacctttgaggtgctacttaagtccaagctctgatgtattattcatttgtaaagataaggtacaggaatgaaccttggtttaaaggtatttttatatgaaaatggtgtgttattggaagatgttaaaatgctaatttgagagaagtaggagtgtatctgttttatatgttgggatgtgaaatttattttctaaaattgaggagaaggaagttatatatttgcagaatgttttaaagtgaattgttgtaatgaagttcctgtgaacatcattatggttttgtacaaataggaacctctgatgtcattcttcaacgtttgttcctgtgtgtacaattgtactttgtatgaacagctttatcatttttataggctttccatgagttttgctgtaactactatggcttatttattttctttaatatttgtgaaagtcttactcctttgttagttttgtttctgcacaactactgtacttttccatatggaataaagactattaataga

SEQ ID NO: 463741 - DNA, 7567 bp, Homo sapiens
agcggaggctttgctgtggcagctgctggagcggcggccgcctcgggagccggaggagaggcagccgcggagcgccgagctggcctcgccccgaggcccggccctgggtgtggggaaccgcgctgaggagctggaaactttcccggcaggagctgactgctgggcaggaacgtctctcaggagaaagagtggaagagaaaattgtgaactaaggccccctgcccccttttcctggtgcatgtgaagttatcaaaaacagaaacaagtgttgaaaatgttaaaggctgtgctgaagaagagccgagagggaggaaagggaggcaagaaggaagcaggaagtgactttggtccagagacttctccagtcctgcaccttgaccacagtgctgactctcctgtgagcagtcttcccacagcagaggacacctatagggtgagcttggccaaaggtgtctcgatgtctctgccttcctcacctttgctgcctcgacagtctcacttggtgcaatcaagagtgaacaaaaaatccccaggtcccgtcaggaagcccaagtatgtggaaagccccagagtgcctggagatgcagttataatgccattcagagaagtagccaagccaacagagcctgatgagcatgccacaattacaagttcatccgaaaatgatgaccggagtggctccagtttggaatggaataaagatggaagcctaagattaggggttcagaagggagtgcttcatgaccgcagggcagataactgctccccagtggcagaagaggagaccaccgggtcagcagagagcacgctgcccaaagcagaatcctcagctggagatggtccagtcccttattctcagggctccagctcactaataatgccacggcccaactcagttgcagcaacaagctcaaccaaattggaagatctgagttatttagacgggcagagaaatgctcctctacggacgtcaattagattaccatggcacaatacggccggaggtagggcacaggaagttaaagcacgatttgctccctacaagccacaagacattttgttgaaacccttgttgtttgaagtaccaagcataacaacagactctgtgtttgtgggaagggattggctctttcaccagatagaagaaaacttgaggaacacagaactggcagaaaacagaggcgcggtggtggttggcaatgtgggatttgggaagacggcaatcatttccaagttggtggccctgagctgccacggaagccgcatgaggcagattgcttccaacagcccgggttcatcacctaaaacctctgaccccactcaggatcttcatttcactccgttgctttcaccgagttcttccacaagtgcttccagcacagctaaaacacctcttgggtctatcagtgctgaaaaccagagaccaagagaggatgcagtgaaatatcttgcttctaaggtggtggcctaccactactgccaggctgacaacacgtacacttgcctggtgcccgagtttgtgcacagcatcgcagctttgctctgccggtcccatcagctggccgcctacagagaccttctgataaaggagccccaactacagagcatgctgagcctccgatcctgtgtgcaggacccggtggcagctttcaagaggggagtgctggagccactcacaaacctgagaaatgagcagaaaattcctgaagaagaatacattattttgatagatggcttaaatgaagctgagtttcataaacctgattatggagatacgctttcttcatttattaccaaaattatttctaaatttcctgcctggttgaagttgattgtgactgtaagagcaaattttcaggaaatcataagtgcgctgccatttgtcaagctttccttagatgacttcccagacaacaaagacatccacagtgacctgcacgcctacgtccagcacagggtgcacagcagccaggacatcctcagcaacatctccctgaacggcaaggccgatgccacactcattggaaaagtgagcagccacctggtgctgcggagcctcggctcctacctgtacctcaagctcaccctggaccttttccagaggggccacttggtcattaagagtgccagctacaaggtggtgcccgtgtctctctctgagctctatttgcttcagtgcaacatgaagttcatgacccagtccgcctttgagagggcacttccgattctcaacgtggccctcgcatccctccaccccatgacagacgagcagatctttcaggctattaatgctggccacatccagggggagcagggatgggaagactttcagcagaggatggacgccctctcctgcttcctcattaagaggcgagacaaaacccgcatgttctgccacccgtccttcagggagtggcttgtatggagagcagacggggaaaacacggccttcctgtgtgagcccaggaacgggcacgcgctcttggcattcatgttctcgcgtcaggagggcaagttgaaccgccagcagaccatggagcttggccaccacatcctgaaggcgcacattttcaaggcattctttgtgtgtgaccccgtgccttctgcaggtatctgcaccctctgcggcagacccactttcagagtgaccctgcagggcctcagtaagaagacgggaatttcttcaagccatctccaagccctgtggatcggctacagcaccgaggggctgtccgccgccctggcctctctcaggaatctctatactcccaacgtgaaggtgagccgtctcctgattttgggaggggccaacgtgaactacaggacagaagtgttaaataatgccccaatcctgtgcgtccagtctcaccttggccacgaggaagttgtcactctgctcctggaatttggtgcctgcctggacggaacgtcagagaacggcatgactgccctctgttacgcagcagctgctggccacatgaagctggtgtgtctgctgaccaagaagggagtgagagtggaccacttggataagaagggccagtgtgcgcttgtccacagtgccctacggggccacggtgacattctccagtacctgctgacttgtgagtggtcgccgggtcctccccagccaggcaccctgaggaagagccacgccctgcagcaggcgctgaccgcggcggccagcatgggccacagctcggtggtccagtgcttgctggggatggagaaggaacatgaagtagaagtcaatggcaccgacacattgtggggagaaacaggtccacaagaccaggactgcctgctgcccacgcttactccctcactttccggtgacgaggccccagatagaacgcagagctcaggtgatccacgggagagatgtggctacctctctgtgacatgtgaagagacatgtagtgttctgctgattgactatgccactttcttgaagcttgctaatgatgatgatgatggttgtttggattgtttgcagcccggggtgcggctccctggcatggggaccacaccttttgaaggcctgttcttgtgttgccccattttcagcctgagagccctgactgccgccgcaggaagagggaagctggaggtctgtgagctgctgctggggcatggagctgctgtgtcgcggacaaacaggagaggggttccacctttgttttgtgcagcacgccaggggcattggcagattgttagactgctgttggaacgcggctgtgatgtgaacctaagtgacaagcaaggccggacgcccctcatggtggctgcttgtgaagggcacttgagcaccgtggaattcctcctttcaaaaggtgcagccctttcttctctagacaaagagggtctgtcagcattaagctgggcttgtctgaaaggtcacagggcagtggtccagtatctggttgaagaaggagctgcaatagaccagacagacaagaatggccgcacacccttggacctggctgccttctatggcgatgccgagactgtgctgtacctggtggagaagggagccgtgatcgagcatgtggaccacagcgggatgcggcccttggacagagccatcggctgccggaacacatctgtagtggtggcgctactcagaaagggagccaagttaggaaatgctgcttgggcgatggccacttccaaacctgatatcttgattatacttttacagaaattaatggaggaaggaaatgtgatgtacaaaaaagggaaaatgaaagaggcagcccagaggtaccagtatgccttaagaaagtttcctcgagaaggattcggagaggacatgagacccttcaatgaattaagggtttccctctatctcaatttgtcgcgatgccgaagaaaaaccaatgactttggcatggcagaggaatttgcttccaaggctctcgaattgaagcccaagtcctatgaagccttttatgccagagcaagagcgaagagaaatagcaggcaattcgtggcagctctggctgacctgcaagaggctgtgaaactctgtcccaccaatcaggaagtcaagaggcttctggcccgcgtagaagaggagtgcaaacaactccagaggagtcaacagcaaaaacagcagggcccgctaccagctccactcaacgactccgagaacgaagaggacaccccaacccctggcttaagtgaccactttcactctgaggagactgaagaggaagaaacttctccccaggaagaatctgtttccccaactcccaggtcccagccatcctcatctgtcccttcctcatacatccgaaaccttcaagaagggttacagtccaaaggaaggccggtatcgccacagagcagggcaggaatcggcaagtccctgagagagcctgtggcccagccagggctgctcctgcagccctccaagcaggcccagatcgtgaaaaccagccagcacctgggctctggccagtcggcagtgagaaatggcagtatgaaagttcagatctcttctcagaaccctcctccaagtcccatgccagggagaatcgctgccactcctgctgggagcagaacccagcatttagagggaacaggtactttcactacaagagctggttgtggccactttggggatcggctgggccccagccagaatgtccgcctgcagtgtggtgagaatggccctgcacaccctttaccaagtaagacgaaaaccacagagaggcttctgtctcattcctccgtggctgtggacgcagcccctccaaaccaaggtgggctggcgacctgcagcgacgtgcgacacccagcttccctcaccagctcaggctcttctggttctccatccagcagcataaagatgtcaagttcaaccagtagtttgacttcgagcagcagtttttcagatggcttcaaggtccaaggaccagatactagaattaaagacaaggttgtaacccacgttcagagcggtacagctgagcacagaccccgcaacacgccgttcatgggcatcatggataagactgcgaggttccaacagcagagcaatcctccaagccgcagctggcactgtccggcaccagaggggctgctgacaaacacgtcttctgcagctggcctgcagtctgctaacactgagaagccctctctcatgcaagtgggaggatataataaccaagccaaaacctgttctgtttctaccctgagtgcaagtgtccacaatggggcacaagtgaaggagctagaagaaagcaagtgccaaattccagtccactctcaagagaacaggataactaagactgtttctcatctgtaccaggaaagtatctccaaacagcagcctcatattagtaatgaagcccacaggagccacctcactgcagccaaaccaaagcgatcatttatagagtcaaatgtgtgaaccttaagaaagccccatttgtggaatttggaaacgtgtgttgactcctggtggtaaattaaatagtttttttcatcagaaaaattattttttagccattttttttctttggggtggatctgatgccattgatatatctaaaatgtgggataaaacttctttaatagctagaaatcaccataaataagaatgctaaacagaattgaaaattatatcaacttaaaattttaagacagcccagaagacattaatgactctcacttatgaaattgtttggcttttgccactttcctccttgcctttgctatatggtagaatcacagaacttacttagagaataaatatgtctattgttcaagagtaacaggtttaactcatgaccaagtgatgtacatccaagtgatgtattctggaaacgatggaattttacagttacagttccattgagtcaaatcccattttatatatacataaaaattaagttctgagtgagttctagctaaatataagtgcgactgtaaacgcagccaatttttttaagcagaatatgagaacacctaagtattctcttcatagcagttcctataaagggattaaacacttatttctgtgttatggttcttattcatatatttttatagcacctttttttggaacctatatttgtgcttgaaggtgtttttgatatttggaaacagtataagccatttggagtcatgattggtggtcaagtggattcaagctaaaatactaagaccagcattcttagtggcgcttataaattagctctcacctggtttccaaactgcttttaacaatggtagtgctcctggaacaatccttccaagctcctctaaggacaatatttaattcagatactaaaggtaagactggttgttacttttgttttgttgtacaattagtactttatagtcacatgttgtatatattaaatagcccagttttattcagacttgtaaatagaactatttcaatgtagttaatctaaaaacaaaaaagaaaaccccagtcacgatttgcatgttctctgtaagcttcatccatgctggttattgcactgaatgatatattattagggcatgttaacagtataccagtaacagcactttatctcatttatatgaacacctttgaggtgctacttaagtccaagctctgatgtattattcatttgtaaagataaggtacaggaatgaaccttggtttaaaggtatttttatatgaaaatggtgtgttattggaagatgttaaaatgctaatttgagagaagtaggagtgtatctgttttatatgttgggatgtgaaatttattttctaaaattgaggagaaggaagttatatatttgcagaatgttttaaagtgaattgttgtaatgaagttcctgtgaacatcattatggttttgtacaaataggaacctctgatgtcattcttcaacgtttgttcctgtgtgtacaattgtactttgtatgaacagctttatcatttttataggctttccatgagttttgctgtaactactatggcttatttattttctttaatatttgtgaaagtcttactcctttgttagttttgtttctgcacaactactgtacttttccatatggaataaagactattaataga

SEQ ID NO: 463742 - DNA, 1058 bp, Homo sapiens
acccaacgcgtcgcccaccgcgtcggttcttattcatatatttttatagcacctttttttggaacctatatttgtgcttgaaggtgtttttgatatttggaaacagtataagccatttggagtcatgattggtggtcaagtggattcaagctaaaatactaagaccagcattcttagtggcgcttataaattagctctcacctggtttccaaactgcttttaacaatggtagtgctcctggaacaatccttccaagctcctctaaggacaatatttaattcagatactaaaggtaagactggttgttacttttgttttgttgtacaattagtactttatagtcacatgttgtatatattaaatagcccagttttattcagacttgtaaatagaactatttcaatgtagttaatctaaaaacaaaaaagaaaaccccagtcacgatttgcatgttctctgtaagcttcatccatgctggttattgcactgaatgatatattattagggcatgttaacagtataccagtaacagcactttatctcatttatatgaacacctttgaggtgctacttaagtccaagctctgatgtattattcatttgtaaagataaggtacaggaatgaaccttggtttaaaggtatttttatatgaaaatggtgtgttattggaagatgttaaaatgctaatttgagagaagtaggagtgtatctgttttatatgttgggatgtgaaatttattttctaaaattgaggagaaggaagttatatatttgcagaatgttttaaagtgaattgttgtaatgaagttcctgtgaacatcattatggttttgtacaaataggaacctctgatgtcattcttcaacgtttgttcctgtgtgtacaattgtactttgtatgaacagctttatcatttttataggctttccatgagttttgctgtaactactatggcttatttattttctttaatatttgtgaaagtcttactcctttgttagttttgtttctgcacaactactgtacttttccatatggaataaagactattaataga

SEQ ID NO: 463743 - DNA, 5902 bp, Homo sapiens
caaaatgtgctttgaggtaggaagggacctcctgtagagcggctttggcatgaggtcgacccgccctggggtggctccttttccctgtgttggcttggggccactgccccttcatgtttggctcacatggtccagaagcatcagggctcttttaacccagaatagtcaagccttggtttccttacccctgcagttttccagagcagctaaaaaacatccaagctggcaaaccattcttcctactccaaacattaggagcttttaccagtaagcaaggggtgggaagcttttcctttcttgaagatgctgccagcgtagtttcccttgtagctgccatcctgggtgcatgacttgcaaaactgatatgtgagtgacaataagccagatggcctttgcaaaagctctgcttattttgatttttgtggttccttacaaaaggcgaagtgagcattgatctttgttggtgctgttgtagctcaacggcaacatcactgtgttgtttcctcattttatttttcctaaaacctttacccattatctgcagattttcacatctaagcaaaataggttcatatgagtccagttacctagacaattaataaaaaagagcaaaatgttgagtgactatgtcataggttacttattgttaagttacagctttgtaagcagcttgctttgtaaatttttcatcccctgatggatgctgattttagaaggtgagagacgtgttagaaggatgtgaatatcgttttatttattggccataattaagtgcctttgggctttttgggtacagggttaaactacagctcaacatttaaatcaaatccaaccataaaattctcttaagtacaaaaaaaccagatgaccaacctcagggagaacccaagaaaaggtgggctttcccagcattgctgtgcagcattctgagaatacagcttgatttttctacatctttgcatgggcaacagtggtactgggtcctgtctcttgggacaagtttcactgtgattttaaatttttgtttcaacttggattcttcacgattgaccgtcaagttgaaatcctggttttgactttcactactgtgggatgtgcacaggaagttttccaccaaattttccacgtcgttcccctggcttgtttaatgagagcttggatttcagttttactccaacacctaaatagcctgggtctctaccagcatgccactagggttttacttcatttcagcctcctgtgggcattggacacccggcactctgtgagggtaacatgaaagataggcccttttcttacccaagctgatgtctgaagtacccgttttcacatgactcggaattaggaattgccgtcagataacactgggctcttctcactcaccctttgcacttggagtttttgttttactgtttccttaacctgtcacagtcccttaattagaatgtattgctagaggacagggtgcgttgtccaactttgtgcgcattttatagaaacacacaaaatcaccagacaaagcagctgtagtgtgaactcatccagatgcgatactgaaattccccagaggggcatcttcattgttttctttctttgttccagaagcaaaggccgataatgaaccgagctgttcgccggcagctcaagaactgttgacaaggctgggatttttactgggagaagggatcccaagtgccacacacataaccattgaagacaaaaatgaaaccatgtgcacagctctgagtcaaggcatcagtccttgctccacactaacaagcagcaccgcatctcctagcaccgatagcccctgctcaaccttgaatagctgtgtcagcaagacggcagccaacaaaagtccctgtgagaccattagcagccctagttccaccctggaaagcaaggacagtggaattataggtaagaagcacactgctcggtaacataatggctcgaatctcatcaaccagagcattcaccaggcacttcctcagagggttttagcatggtctgtgaaggtcagtctgccagcgcctgctctgttctttgcaggcagcactgactccatgtgtagctgagagagtggagcattggcttttacattccttgatgtttactttataacagtcagctcatttgttaaaaaaaaaaaaaaaaggaattccagatcagatctggcctgtgaaacaaaaatcattgctcttctatattcagttccatttgttgggcatcaggtcccactggggcacacagcagagcaatgaaattcctgcatattaagacgtcgtcttatcccaatctcaaggtggtggcctaccactactgccaggctgacaacacgtacacttgcctggtgcccgagtttgtgcacagcatcgcagctttgctctgccggtcccatcagctggccgcctacagagaccttctgataaaggagccccaactacagagcatgctgagcctccgatcctgtgtgcaggacccggtggcagctttcaagaggggagtgctggagccactcacaaacctgagaaatgagcagaaaattcctgaagaagaatacattattttgatagatggcttaaatgaagctgagtttcataaacctgattatggagatacgctttcttcatttattaccaaaattatttctaaatttcctgcctggttgaagttgattgtgactgtaagagcaaattttcaggaaatcataagtgcgctgccatttgtcaagctttccttagatgacttcccagacaacaaagacatccacagtgacctgcacgcctacgtccagcacagggtgcacagcagccaggacatcctcagcaacatctccctgaacggcaaggccgatgccacactcattggaaaagtgagcagccacctggtgctgcggagcctcggctcctacctgtacctcaagctcaccctggaccttttccagaggggccacttggtcattaagagtgccagctacaaggtggtgcccgtgtctctctctgagctctatttgcttcagtgcaacatgaagttcatgacccagtccgcctttgagagggcacttccgattctcaacgtggccctcgcatccctccaccccatgacagacgagcagatctttcaggctattaatgctggccacatccagggggagcagggatgggaagactttcagcagaggatggacgccctctcctgcttcctcattaagaggcgagacaaaacccgcatgttctgccacccgtccttcagggagtggcttgtatggagagcagacggggaaaacacggccttcctgtgtgagcccaggaacgggcacgcgctcttggcattcatgttctcgcgtcaggagggcaagttgaaccgccagcagaccatggagcttggccaccacatcctgaaggcgcacattttcaaggcattctttgtgtgtgaccccgtgccttctgcaggtatctgcaccctctgcggcagacccactttcagagtgaccctgcagggcctcagtaagaagacgggaatttcttcaagccatctccaagccctgtggatcggctacagcaccgaggggctgtccgccgccctggcctctctcaggaatctctatactcccaacgtgaaggtgagccgtctcctgattttgggaggggccaacgtgaactacaggacagaagtgttaaataatgccccaatcctgtgcgtccagtctcaccttggccacgaggaagttgtcactctgctcctggaatttggtgcctgcctggacggaacgtcagagaacggcatgactgccctctgttacgcagcagctgctggccacatgaagctggtgtgtctgctgaccaagaagggagtgagagtggaccacttggataagaagggccagtgtgcgcttgtccacagtgccctacggggccacggtgacattctccagtacctgctgacttgtgagtggtcgccgggtcctccccagccaggcaccctgaggaagagccacgccctgcagcaggcgctgaccgcggcggccagcatgggccacagctcggtggtccagtgcttgctggggatggagaaggaacatgaagtagaagtcaatggcaccgacacattgtggggagaaacaggtccacaagaccaggactgcctgctgcccacgcttactccctcactttccggtgacgaggccccagatagaacgcagagctcaggtgatccacgggagagatgtggctacctctctgtgacatgtgaagagacatgtagtgttctgctgattgactatgccactttcttgaagcttgctaatgatgatgatgatggttgtttggattgtttgcagcccggggtgcggctccctggcatggggaccacaccttttgaaggcctgttcttgtgttgccccattttcagcctgagagccctgactgccgccgcaggaagagggaagctggaggtctgtgagctgctgctggggcatggagctgctgtgtcgcggacaaacaggagaggggttccacctttgttttgtgcagcacgccaggggcattggcagattgttagactgctgttggaacgcggctgtgatgtgaacctaagtgacaagcaaggccggacgcccctcatggtggctgcttgtgaagggcacttgagcaccgtggaattcctcctttcaaaaggtgcagccctttcttctctagacaaagagggtctgtcagcattaagctgggcttgtctgaaaggtcacagggcagtggtccagtatctggttgaagaaggagctgcaatagaccagacagacaagaatggccgcacacccttggacctggctgccttctatggcgatgccgagactgtgctgtacctggtggagaagggagccgtgatcgagcatgtggaccacagcgggatgcggcccttggacagagccatcggctgccggaacacatctgtagtggtggcgctactcagaaagggagccaagttaggaaatgctgcttgggcgatggccacttccaaacctgatatcttgattatacttttacagaaattaatggaggaaggaaatgtgatgtacaaaaaagggaaaatgaaagaggcagcccagaggtaccagtatgccttaagaaagtttcctcgagaaggattcggagaggacatgagacccttcaatgaattaagggtttccctctatctcaatttgtcgcgatgccgaagaaaaaccaatgactttggcatggcagaggaatttgcttccaaggctctcgaattgaagcccaagtcctatgaagccttttatgccagagcaagagcgaagagaaatagcaggcaattcgtggcagctctggctgacctgcaagaggctgtgaaactctgtcccaccaatcaggaagtcaagaggcttctggcccgcgtagaagaggagtgcaaacaactccagaggagtcaacagcaaaaacagcagggcccgctaccagctccactcaacgactccgagaacgaagaggacaccccaacccctggcttaagtgaccactttcactctgaggagactgaagaggaagaaacttctccccaggaagaatctgtttccccaactcccaggtcccagccatcctcatctgtcccttcctcatacatccgaaaccttcaagaagggttacagtccaaaggaaggccggtatcgccacagagcagggcaggaatcggcaagtccctgagagagcctgtggcccagccagggctgctcctgcagccctccaagcaggcccagatcgtgaaaaccagccagcacctgggctctggccagtcggcagtgagaaatggcagtatgaaagttcagatctcttctcagaaccctcctccagccagcttggtaccgagctcgattgtatcatgtcaa

SEQ ID NO: 463744 - DNA, 450 bp, Homo sapiens
taatcggacccaggcttatgcggaggaaaatgttttcatgttacttatactaacattagttcttctatagggggatagattggcccaattgggtgggaggagttcagttatatgttgggatgtgaaatttattttctaaaattgaggagaaggaagttatatatttgcagaatgttttaaagtgaattgttgtaatgaagttcctgtgaacatcattatggttttgtacaaataggaacctctgatgtcattcttcaacgtttgttcctgtgtgtacaattgtactttgtatgaacagctttatcatttttataggctttccatgagttttgctgtaactactatggcttatttattttctttaatatttgtgaaagtcttactcctttgttagttttgtttctgcacaactactgtacttttccatatggaataaagactattaataga

SEQ ID NO: 463745 - DNA, 553 bp, Homo sapiens
ctcgccggcgtcctgctccctccctcatcgtgctgtggtccttgcagctgggctcctgctggtgctgacctccagccgtggggccacggaggaattgggatcctttccgcagggcctctgaagtgcctctgaatgcgtgtttgttttgcaggaaatgctgcttgggcgatggccacttccaaacctgatatcttgattatacttttacagaaattaatggaggaaggaaatgtgatgtacaaagtaagtggttccgcccttttctttgccattgaaactgcctgggagcaccctcttaattgggtacataatggctacagctgtgctactgcacagtctccatgtaatagaagtgcaaaaagtggctgggtggggtggctcacgcctgtaactccagcacttttggaggccgaggtgggcagatcacttgaggccaggaattccagaccaacctggccaatatggcaaaaccccatctttactaaaaatacaaaaatcagccaggtgcctgtaatcccagctactcgggaggctgaggcaggagaattgtttc

SEQ ID NO: 463746 - DNA, 459 bp, Homo sapiens
gaaaacggaactttcccttcctccctctctggctgtgcctcagagcgctgctaccctttagaacaaaactagacgggcttcccacaatcgtgtgtccaggctgcttctgactcctgtatttcttgtcgacaccaggactttggcatggcagaggaatttgcttccaaggctctcgaattgaagcccaagtcctatgaagccttttatgccagagcaagagcgaagagaaatagcaggtaccgtctgtggttatctttgtgtctagagctttttttcttgtgggatcaaacctgcctgttgaatttggggaggttttgctgcagaagtgttgctcaggtgcctctcatcctttttagtagtgaattagtattactacctgcttccaagaggcatagtagtggacattatcagtgatgagtaaacttctattttctcctgacgtctcaataatcattcctt

SEQ ID NO: 463747 - DNA, 7400 bp, Homo sapiens
agcggaggctttgctgtggcagctgctggagcggcggccgcctcgggagccggaggagaggcagccgcggagcgccgagctggcctcgccccgaggcccggccctgggtgtggggaaccgcgctgaggagctggaaactttcccggcagaaacaagtgttgaaaatgttaaaggctgtgctgaagaagagccgagagggaggaaagggaggcaagaaggaagcaggaagtgactttggtccagagacttctccagtcctgcaccttgaccacagtgctgactctcctgtgagcagtcttcccacagcagaggacacctatagggtgagcttggccaaaggtgtctcgatgtctctgccttcctcacctttgctgcctcgacagtctcacttggtgcaatcaagagtgaacaaaaaatccccaggtcccgtcaggaagcccaagtatgtggaaagccccagagtgcctggagatgcagttataatgccattcagagaagtagccaagccaacagagcctgatgagcatgaagcaaaggccgataatgaaccgagctgttcgccggcagctcaagaactgttgacaaggctgggatttttactgggagaagggatcccaagtgccacacacataaccattgaagacaaaaatgaaaccatgtgcacagctctgagtcaaggcatcagtccttgctccacactaacaagcagcaccgcatctcctagcaccgatagcccctgctcaaccttgaatagctgtgtcagcaagacggcagccaacaaaagtccctgtgagaccattagcagccctagttccaccctggaaagcaaggacagtggaattatagccacaattacaagttcatccgaaaatgatgaccggagtggctccagtttggaatggaataaagatggaagcctaagattaggggttcagaagggagtgcttcatgaccgcagggcagataactgctccccagtggcagaagaggagaccaccgggtcagcagagagcacgctgcccaaagcagaatcctcagctggagatggtccagtcccttattctcagggctccagctcactaataatgccacggcccaactcagttgcagcaacaagctcaaccaaattggaagatctgagttatttagacgggcagagaaatgctcctctacggacgtcaattagattaccatggcacaatacggccggaggtagggcacaggaagttaaagcacgatttgctccctacaagccacaagacattttgttgaaacccttgttgtttgaagtaccaagcataacaacagactctgtgtttgtgggaagggattggctctttcaccagatagaagaaaacttgaggaacacagaactggcagaaaacagaggcgcggtggtggttggcaatgtgggatttgggaagacggcaatcatttccaagttggtggccctgagctgccacggaagccgcatgaggcagattgcttccaacagcccgggttcatcacctaaaacctctgaccccactcaggatcttcatttcactccgttgctttcaccgagttcttccacaagtgcttccagcacagctaaaacacctcttgggtctatcagtgctgaaaaccagagaccaagagaggatgcagtgaaatatcttgcttctaaggtggtggcctaccactactgccaggctgacaacacgtacacttgcctggtgcccgagtttgtgcacagcatcgcagctttgctctgccggtcccatcagctggccgcctacagagaccttctgataaaggagccccaactacagagcatgctgagcctccgatcctgtgtgcaggacccggtggcagctttcaagaggggagtgctggagccactcacaaacctgagaaatgagcagaaaattcctgaagaagaatacattattttgatagatggcttaaatgaagctgagtttcataaacctgattatggagatacgctttcttcatttattaccaaaattatttctaaatttcctgcctggttgaagttgattgtgactgtaagagcaaattttcaggaaatcataagtgcgctgccatttgtcaagctttccttagatgacttcccagacaacaaagacatccacagtgacctgcacgcctacgtccagcacagggtgcacagcagccaggacatcctcagcaacatctccctgaacggcaaggccgatgccacactcattggaaaagtgagcagccacctggtgctgcggagcctcggctcctacctgtacctcaagctcaccctggaccttttccagaggggccacttggtcattaagagtgccagctacaaggtggtgcccgtgtctctctctgagctctatttgcttcagtgcaacatgaagttcatgacccagtccgcctttgagagggcacttccgattctcaacgtggccctcgcatccctccaccccatgacagacgagcagatctttcaggctattaatgctggccacatccagggggagcagggatgggaagactttcagcagaggatggacgccctctcctgcttcctcattaagaggcgagacaaaacccgcatgttctgccacccgtccttcagggagtggcttgtatggagagcagacggggaaaacacggccttcctgtgtgagcccaggaacgggcacgcgctcttggcattcatgttctcgcgtcaggagggcaagttgaaccgccagcagaccatggagcttggccaccacatcctgaaggcgcacattttcaagggcctcagtaagaagacgggaatttcttcaagccatctccaagccctgtggatcggctacagcaccgaggggctgtccgccgccctggcctctctcaggaatctctatactcccaacgtgaaggtgagccgtctcctgattttgggaggggccaacgtgaactacaggacagaagtgttaaataatgccccaatcctgtgcgtccagtctcaccttggccacgaggaagttgtcactctgctcctggaatttggtgcctgcctggacggaacgtcagagaacggcatgactgccctctgttacgcagcagctgctggccacatgaagctggtgtgtctgctgaccaagaagggagtgagagtggaccacttggataagaagggccagtgtgcgcttgtccacagtgccctacggggccacggtgacattctccagtacctgctgacttgtgagtggtcgccgggtcctccccagccaggcaccctgaggaagagccacgccctgcagcaggcgctgaccgcggcggccagcatgggccacagctcggtggtccagtgcttgctggggatggagaaggaacatgaagtagaagtcaatggcaccgacacattgtggggagaaacagccctgactgccgccgcaggaagagggaagctggaggtctgtgagctgctgctggggcatggagctgctgtgtcgcggacaaacaggagaggggttccacctttgttttgtgcagcacgccaggggcattggcagattgttagactgctgttggaacgcggctgtgatgtgaacctaagtgacaagcaaggccggacgcccctcatggtggctgcttgtgaagggcacttgagcaccgtggaattcctcctttcaaaaggtgcagccctttcttctctagacaaagagggtctgtcagcattaagctgggcttgtctgaaaggtcacagggcagtggtccagtatctggttgaagaaggagctgcaatagaccagacagacaagaatggccgcacacccttggacctggctgccttctatggcgatgccgagactgtgctgtacctggtggagaagggagccgtgatcgagcatgtggaccacagcgggatgcggcccttggacagagccatcggctgccggaacacatctgtagtggtggcgctactcagaaagggagccaagttaggaaatgctgcttgggcgatggccacttccaaacctgatatcttgattatacttttacagaaattaatggaggaaggaaatgtgatgtacaaaaaagggaaaatgaaagaggcagcccagaggtaccagtatgccttaagaaagtttcctcgagaaggattcggagaggacatgagacccttcaatgaattaagggtttccctctatctcaatttgtcgcgatgccgaagaaaaaccaatgactttggcatggcagaggaatttgcttccaaggctctcgaattgaagcccaagtcctatgaagccttttatgccagagcaagagcgaagagaaatagcaggcaattcgtggcagctctggctgacctgcaagaggctgtgaaactctgtcccaccaatcaggaagtcaagaggcttctggcccgcgtagaagaggagtgcaaacaactccagaggagtcaacagcaaaaacagcagggcccgctaccagctccactcaacgactccgagaacgaagaggacaccccaacccctggcttaagtgaccactttcactctgaggagactgaagaggaagaaacttctccccaggaagaatctgtttccccaactcccaggtcccagccatcctcatctgtcccttcctcatacatccgaaaccttcaagaagggttacagtccaaaggaaggccggtatcgccacagagcagggcaggaatcggcaagtccctgagagagcctgtggcccagccagggctgctcctgcagccctccaagcaggcccagatcgtgaaaaccagccagcacctgggctctggccagtcggcagtgagaaatggcagtatgaaagttcagatctcttctcagaaccctcctccaagtcccatgccagggagaatcgctgccactcctgctgggagcagaacccagcatttagagggaacaggtactttcactacaagagctggttgtggccactttggggatcggctgggccccagccagaatgtccgcctgcagtgtggtgagaatggccctgcacaccctttaccaagtaagacgaaaaccacagagaggcttctgtctcattcctccgtggctgtggacgcagcccctccaaaccaaggtgggctggcgacctgcagcgacgtgcgacacccagcttccctcaccagctcaggctcttctggttctccatccagcagcataaagatgtcaagttcaaccagtagtttgacttcgagcagcagtttttcagatggcttcaaggtccaaggaccagatactagaattaaagacaaggttgtaacccacgttcagagcggtacagctgagcacagaccccgcaacacgccgttcatgggcatcatggataagactgcgaggttccaacagcagagcaatcctccaagccgcagctggcactgtccggcaccagaggggctgctgacaaacacgtcttctgcagctggcctgcagtctgctaacactgagaagccctctctcatgcaagtgggaggatataataaccaagccaaaacctgttctgtttctaccctgagtgcaagtgtccacaatggggcacaagtgaaggagctagaagaaagcaagtgccaaattccagtccactctcaagagaacaggataactaagactgtttctcatctgtaccaggaaagtatctccaaacagcagcctcatattagtaatgaagcccacaggagccacctcactgcagccaaaccaaagcgatcatttatagagtcaaatgtgtgaaccttaagaaagccccatttgtggaatttggaaacgtgtgttgactcctggtggtaaattaaatagtttttttcatcagaaaaattattttttagccattttttttctttggggtggatctgatgccattgatatatctaaaatgtgggataaaacttctttaatagctagaaatcaccataaataagaatgctaaacagaattgaaaattatatcaacttaaaattttaagacagcccagaagacattaatgactctcacttatgaaattgtttggcttttgccactttcctccttgcctttgctatatggtagaatcacagaacttacttagagaataaatatgtctattgttcaagagtaacaggtttaactcatgaccaagtgatgtacatccaagtgatgtattctggaaacgatggaattttacagttacagttccattgagtcaaatcccattttatatatacataaaaattaagttctgagtgagttctagctaaatataagtgcgactgtaaacgcagccaatttttttaagcagaatatgagaacacctaagtattctcttcatagcagttcctataaagggattaaacacttatttctgtgttatggttcttattcatatatttttatagcacctttttttggaacctatatttgtgcttgaaggtgtttttgatatttggaaacagtataagccatttggagtcatgattggtggtcaagtggattcaagctaaaatactaagaccagcattcttagtggcgcttataaattagctctcacctggtttccaaactgcttttaacaatggtagtgctcctggaacaatccttccaagctcctctaaggacaatatttaattcagatactaaaggtaagactggttgttacttttgttttgttgtacaattagtactttatagtcacatgttgtatatattaaatagcccagttttattcagacttgtaaatagaactatttcaatgtagttaatctaaaaacaaaaaagaaaaccccagtcacgatttgcatgttctctgtaagcttcatccatgctggttattgcactgaatgatatattattagggcatgttaacagtataccagtaacagcactttatctcatttatatgaacacctttgaggtgctacttaagtccaagctctgatgtattattcatttgtaaagataaggtacaggaatgaaccttggtttaaaggtatttttatatgaaaatggtgtgttattggaagatgttaaaatgctaatttgagagaagtaggagtgtatctgttttatatgttgggatgtgaaatttattttctaaaattgaggagaaggaagttatatatttgcagaatgttttaaagtgaattgttgtaatgaagttcctgtgaacatcattatggttttgtacaaataggaacctctgatgtcattcttcaacgtttgttcctgtgtgtacaattgtactttgtatgaacagctttatcatttttataggctttccatgagttttgctgtaactactatggcttatttattttctttaatatttgtgaaagtcttactcctttgttagttttgtttctgcacaactactgtacttttccatatggaataaagactattaataga

SEQ ID NO: 463748 - DNA, 7170 bp, Homo sapiens
aaaagatttataggagatgaggcagagacaaaataagatgagatcaaatggtccatctatcaggaaagcacttcccctccaagggagcagcagcatgcaccctgccacctcccagatgtgatgtgtgcatctgaatagcaatgcaggatggagcttctaccctggtgaaggtctctgcactgcaagggagggtgtcatgcattgattgagactgagtggtcaccagtctccttcccctgattgcagagcccataaatcttgaggaattgaatcaggttgcagtgttcgtgaaacatcacaaaaacagagctcccaggtcttccgtacagaggtcaaataacccatttgtcttctgcagacttcaaatgaaaggaagtctgcctgtttgccatttctgttgtacaaatgtgcatcctcactaaattattgctaagactgaccttttaataaaaaggaaaatcacaaaggaggggaaccgaacaaagatactgctttctcaaaatttggaagaccacatatacatttatatagataaagctccatgaatccatatctatacacacatatctctttagattttttttttaaaacttccgttttcctgttcttagttttattgttttagcacaaaaacaaaagcatgtgtcgaagcatcctgtgtaagccgtgctaactcctccttccattcatcttgcagtgcacagctctgagtcaaggcatcagtccttgctccacactaacaagcagcaccgcatctcctagcaccgatagcccctgctcaaccttgaatagctgtgtcagcaagacggcagccaacaaaagtccctgtgagaccattagcagccctagttccaccctggaaagcaaggacagtggaattataggtaagaagcacactgctcggtaacataatggctcgaatctcatcaaccagagcattcaccaggcacttcctcagagggttttagcatggtctgtgaaggtcagtctgccagcgcctgctctgttctttgcaggcagcactgactccatgtgtagctgagagagtggagcattggcttttacattccttgatgtttactttataacagtcagctcatttgttaaaaaaaaaaaaaaaaggaattccagatcagatctggcctgtgaaacaaaaatcattgctcttctatattcagttccatttgttgggcatcaggtcccactggggcacacagcagagcaatgaaattcctgcatattaagacgtcgtcttatcccaatctcaaggtggtggcctaccactactgccaggctgacaacacgtacacttgcctggtgcccgagtttgtgcacagcatcgcagctttgctctgccggtcccatcagctggccgcctacagagaccttctgataaaggagccccaactacagagcatgctgagcctccgatcctgtgtgcaggacccggtggcagctttcaagaggggagtgctggagccactcacaaacctgagaaatgatgacttcccagacaacaaagacatccacagtgacctgcacgcctacgtccagcacagggtgcacagcagccaggacatcctcagcaacatctccctgaacggcaaggccgatgccacactcattggaaaagtgagcagccacctggtgctgcggagcctcggctcctacctgtacctcaagctcaccctggaccttttccagaggggccacttggtcattaagagtgccagctacaaggtggtgcccgtgtctctctctgagctctatttgcttcagtgcaacatgaagttcatgacccagtccgcctttgagagggcacttccgattctcaacgtggccctcgcatccctccaccccatgacagacgagcagatctttcaggctattaatgctggccacatccagggggagcagggatgggaagactttcagcagaggatggacgccctctcctgcttcctcattaagaggcgagacaaaacccgcatgttctgccacccgtccttcagggagtggcttgtatggagagcagacggggaaaacacggccttcctgtgtgagcccaggaacgggcacgcgctcttggcattcatgttctcgcgtcaggagggcaagttgaaccgccagcagaccatggagcttggccaccacatcctgaaggcgcacattttcaaggcattctttgtgtgtgaccccgtgccttctgcaggtatctgcaccctctgcggcagacccactttcagagtgaccctgcagggcctcagtaagaagacgggaatttcttcaagccatctccaagccctgtggatcggctacagcaccgaggggctgtccgccgccctggcctctctcaggaatctctatactcccaacgtgaaggtgagccgtctcctgattttgggaggggccaacgtgaactacaggacagaagtgttaaataatgccccaatcctgtgcgtccagtctcaccttggccacgaggaagttgtcactctgctcctggaatttggtgcctgcctggacggaacgtcagagaacggcatgactgccctctgttacgcagcagctgctggccacatgaagctggtgtgtctgctgaccaagaagggagtgagagtggaccacttggataagaagggccagtgtgcgcttgtccacagtgccctacggggccacggtgacattctccagtacctgctgacttgtgagtggtcgccgggtcctccccagccaggcaccctgaggaagagccacgccctgcagcaggcgctgaccgcggcggccagcatgggccacagctcggtggtccagtgcttgctggggatggagaaggaacatgaagtagaagtcaatggcaccgacacattgtggggagaaacaggtccacaagaccaggactgcctgctgcccacgcttactccctcactttccggtgacgaggccccagatagaacgcagagctcaggtgatccacgggagagatgtggctacctctctgtgacatgtgaagagacatgtagtgttctgctgattgactatgccactttcttgaagcttgctaatgatgatgatgatggttgtttggattgtttgcagcccggggtgcggctccctggcatggggaccacaccttttgaaggcctgttcttgtgttgccccattttcagcctgagagccctgactgccgccgcaggaagagggaagctggaggtctgtgagctgctgctggggcatggagctgctgtgtcgcggacaaacaggagaggggttccacctttgttttgtgcagcacgccaggggcattggcagattgttagactgctgttggaacgcggctgtgatgtgaacctaagtgacaagcaaggccggacgcccctcatggtggctgcttgtgaagggcacttgagcaccgtggaattcctcctttcaaaaggtgcagccctttcttctctagacaaagagggtctgtcagcattaagctgggcttgtctgaaaggtcacagggcagtggtccagtatctggttgaagaaggagctgcaatagaccagacagacaagaatggccgcacacccttggacctggctgccttctatggcgatgccgagactgtgctgtacctggtggagaagggagccgtgatcgagcatgtggaccacagcgggatgcggcccttggacagagccatcggctgccggaacacatctgtagtggtggcgctactcagaaagggagccaagttaggaaatgctgcttgggcgatggccacttccaaacctgatatcttgattatacttttacagaaattaatggaggaaggaaatgtgatgtacaaaaaagggaaaatgaaagaggcagcccagaggtaccagtatgccttaagaaagtttcctcgagaaggattcggagaggacatgagacccttcaatgaattaagggtttccctctatctcaatttgtcgcgatgccgaagaaaaaccaatgactttggcatggcagaggaatttgcttccaaggctctcgaattgaagcccaagtcctatgaagccttttatgccagagcaagagcgaagagaaatagcaggcaattcgtggcagctctggctgacctgcaagaggctgtgaaactctgtcccaccaatcaggaagtcaagaggcttctggcccgcgtagaagaggagtgcaaacaactccagaggagtcaacagcaaaaacagcagggcccgctaccagctccactcaacgactccgagaacgaagaggacaccccaacccctggcttaagtgaccactttcactctgaggagactgaagaggaagaaacttctccccaggaagaatctgtttccccaactcccaggtcccagccatcctcatctgtcccttcctcatacatccgaaaccttcaagaagggttacagtccaaaggaaggccggtatcgccacagagcagggcaggaatcggcaagtccctgagagagcctgtggcccagccagggctgctcctgcagccctccaagcaggcccagatcgtgaaaaccagccagcacctgggctctggccagtcggcagtgagaaatggcagtatgaaagttcagatctcttctcagaaccctcctccaagtcccatgccagggagaatcgctgccactcctgctgggagcagaacccagcatttagagggaacaggtactttcactacaagagctggttgtggccactttggggatcggctgggccccagccagaatgtccgcctgcagtgtggtgagaatggccctgcacaccctttaccaagtaagacgaaaaccacagagaggcttctgtctcattcctccgtggctgtggacgcagcccctccaaaccaaggtgggctggcgacctgcagcgacgtgcgacacccagcttccctcaccagctcaggctcttctggttctccatccagcagcataaagatgtcaagttcaaccagtagtttgacttcgagcagcagtttttcagatggcttcaaggtccaaggaccagatactagaattaaagacaaggttgtaacccacgttcagagcggtacagctgagcacagaccccgcaacacgccgttcatgggcatcatggataagactgcgaggttccaacagcagagcaatcctccaagccgcagctggcactgtccggcaccagaggggctgctgacaaacacgtcttctgcagctggcctgcagtctgctaacactgagaagccctctctcatgcaagtgggaggatataataaccaagccaaaacctgttctgtttctaccctgagtgcaagtgtccacaatggggcacaagtgaaggagctagaagaaagcaagtgccaaattccagtccactctcaagagaacaggataactaagactgtttctcatctgtaccaggaaagtatctccaaacagcagcctcatattagtaatgaagcccacaggagccacctcactgcagccaaaccaaagcgatcatttatagagtcaaatgtgtgaaccttaagaaagccccatttgtggaatttggaaacgtgtgttgactcctggtggtaaattaaatagtttttttcatcagaaaaattattttttagccattttttttctttggggtggatctgatgccattgatatatctaaaatgtgggataaaacttctttaatagctagaaatcaccataaataagaatgctaaacagaattgaaaattatatcaacttaaaattttaagacagcccagaagacattaatgactctcacttatgaaattgtttggcttttgccactttcctccttgcctttgctatatggtagaatcacagaacttacttagagaataaatatgtctattgttcaagagtaacaggtttaactcatgaccaagtgatgtacatccaagtgatgtattctggaaacgatggaattttacagttacagttccattgagtcaaatcccattttatatatacataaaaattaagttctgagtgagttctagctaaatataagtgcgactgtaaacgcagccaatttttttaagcagaatatgagaacacctaagtattctcttcatagcagttcctataaagggattaaacacttatttctgtgttatggttcttattcatatatttttatagcacctttttttggaacctatatttgtgcttgaaggtgtttttgatatttggaaacagtataagccatttggagtcatgattggtggtcaagtggattcaagctaaaatactaagaccagcattcttagtggcgcttataaattagctctcacctggtttccaaactgcttttaacaatggtagtgctcctggaacaatccttccaagctcctctaaggacaatatttaattcagatactaaaggtaagactggttgttacttttgttttgttgtacaattagtactttatagtcacatgttgtatatattaaatagcccagttttattcagacttgtaaatagaactatttcaatgtagttaatctaaaaacaaaaaagaaaaccccagtcacgatttgcatgttctctgtaagcttcatccatgctggttattgcactgaatgatatattattagggcatgttaacagtataccagtaacagcactttatctcatttatatgaacacctttgaggtgctacttaagtccaagctctgatgtattattcatttgtaaagataaggtacaggaatgaaccttggtttaaaggtatttttatatgaaaatggtgtgttattggaagatgttaaaatgctaatttgagagaagtaggagtgtatctgttttatatgttgggatgtgaaatttattttctaaaattgaggagaaggaagttatatatttgcagaatgttttaaagtgaattgttgtaatgaagttcctgtgaacatcattatggttttgtacaaataggaacctctgatgtcattcttcaacgtttgttcctgtgtgtacaattgtactttgtatgaacagctttatcatttttataggctttccatgagttttgctgtaactactatggcttatttattttctttaatatttgtgaaagtcttactcctttgttagttttgtttctgcacaactactgtacttttccatatggaataaagactattaataga

SEQ ID NO: 463749 - DNA, 8551 bp, Homo sapiens
caaaatgtgctttgaggtaggaagggacctcctgtagagcggctttggcatgaggtcgacccgccctggggtggctccttttccctgtgttggcttggggccactgccccttcatgtttggctcacatggtccagaagcatcagggctcttttaacccagaatagtcaagccttggtttccttacccctgcagttttccagagcagctaaaaaacatccaagctggcaaaccattcttcctactccaaacattaggagcttttaccagtaagcaaggggtgggaagcttttcctttcttgaagatgctgccagcgtagtttcccttgtagctgccatcctgggtgcatgacttgcaaaactgatatgtgagtgacaataagccagatggcctttgcaaaagctctgcttattttgatttttgtggttccttacaaaaggcgaagtgagcattgatctttgttggtgctgttgtagctcaacggcaacatcactgtgttgtttcctcattttatttttcctaaaacctttacccattatctgcagattttcacatctaagcaaaataggttcatatgagtccagttacctagacaattaataaaaaagagcaaaatgttgagtgactatgtcataggttacttattgttaagttacagctttgtaagcagcttgctttgtaaatttttcatcccctgatggatgctgattttagaaggtgagagacgtgttagaaggatgtgaatatcgttttatttattggccataattaagtgcctttgggctttttgggtacagggttaaactacagctcaacatttaaatcaaatccaaccataaaattctcttaagtacaaaaaaaccagatgaccaacctcagggagaacccaagaaaaggtgggctttcccagcattgctgtgcagcattctgagaatacagcttgatttttctacatctttgcatgggcaacagtggtactgggtcctgtctcttgggacaagtttcactgtgattttaaatttttgtttcaacttggattcttcacgattgaccgtcaagttgaaatcctggttttgactttcactactgtgggatgtgcacaggaagttttccaccaaattttccacgtcgttcccctggcttgtttaatgagagcttggatttcagttttactccaacacctaaatagcctgggtctctaccagcatgccactagggttttacttcatttcagcctcctgtgggcattggacacccggcactctgtgagggtaacatgaaagataggcccttttcttacccaagctgatgtctgaagtacccgttttcacatgactcggaattaggaattgccgtcagataacactgggctcttctcactcaccctttgcacttggagtttttgttttactgtttccttaacctgtcacagtcccttaattagaatgtattgctagaggacagggtgcgttgtccaactttgtgcgcattttatagaaacacacaaaatcaccagacaaagcagctgtagtgtgaactcatccagatgcgatactgaaattccccagaggggcatcttcattgttttctttctttgttccagaagcaaaggccgataatgaaccgagctgttcgccggcagctcaagaactgttgacaaggctgggatttttactgggagaagggatcccaagtgccacacacataaccattgaagacaaaaatgaaaccatgtgcacagctctgagtcaaggcatcagtccttgctccacactaacaagcagcaccgcatctcctagcaccgatagcccctgctcaaccttgaatagctgtgtcagcaagacggcagccaacaaaagtccctgtgagaccattagcagccctagttccaccctggaaagcaaggacagtggaattataggtaagaagcacactgctcggtaacataatggctcgaatctcatcaaccagagcattcaccaggcacttcctcagagggttttagcatggtctgtgaaggtcagtctgccagcgcctgctctgttctttgcaggcagcactgactccatgtgtagctgagagagtggagcattggcttttacattccttgatgtttactttataacagtcagctcatttgttaaaaaaaaaaaaaaaaggaattccagatcagatctggcctgtgaaacaaaaatcattgctcttctatattcagttccatttgttgggcatcaggtcccactggggcacacagcagagcaatgaaattcctgcatattaagacgtcgtcttatcccaatctcaaggtggtggcctaccactactgccaggctgacaacacgtacacttgcctggtgcccgagtttgtgcacagcatcgcagctttgctctgccggtcccatcagctggccgcctacagagaccttctgataaaggagccccaactacagagcatgctgagcctccgatcctgtgtgcaggacccggtggcagctttcaagaggggagtgctggagccactcacaaacctgagaaatgagcagaaaattcctgaagaagaatacattattttgatagatggcttaaatgaagctgagtttcataaacctgattatggagatacgctttcttcatttattaccaaaattatttctaaatttcctgcctggttgaagttgattgtgactgtaagagcaaattttcaggaaatcataagtgcgctgccatttgtcaagctttccttagatgacttcccagacaacaaagacatccacagtgacctgcacgcctacgtccagcacagggtgcacagcagccaggacatcctcagcaacatctccctgaacggcaaggccgatgccacactcattggaaaagtgagcagccacctggtgctgcggagcctcggctcctacctgtacctcaagctcaccctggaccttttccagaggggccacttggtcattaagagtgccagctacaaggtggtgcccgtgtctctctctgagctctatttgcttcagtgcaacatgaagttcatgacccagtccgcctttgagagggcacttccgattctcaacgtggccctcgcatccctccaccccatgacagacgagcagatctttcaggctattaatgctggccacatccagggggagcagggatgggaagactttcagcagaggatggacgccctctcctgcttcctcattaagaggcgagacaaaacccgcatgttctgccacccgtccttcagggagtggcttgtatggagagcagacggggaaaacacggccttcctgtgtgagcccaggaacgggcacgcgctcttggcattcatgttctcgcgtcaggagggcaagttgaaccgccagcagaccatggagcttggccaccacatcctgaaggcgcacattttcaaggcattctttgtgtgtgaccccgtgccttctgcaggtatctgcaccctctgcggcagacccactttcagagtgaccctgcagggcctcagtaagaagacgggaatttcttcaagccatctccaagccctgtggatcggctacagcaccgaggggctgtccgccgccctggcctctctcaggaatctctatactcccaacgtgaaggtgagccgtctcctgattttgggaggggccaacgtgaactacaggacagaagtgttaaataatgccccaatcctgtgcgtccagtctcaccttggccacgaggaagttgtcactctgctcctggaatttggtgcctgcctggacggaacgtcagagaacggcatgactgccctctgttacgcagcagctgctggccacatgaagctggtgtgtctgctgaccaagaagggagtgagagtggaccacttggataagaagggccagtgtgcgcttgtccacagtgccctacggggccacggtgacattctccagtacctgctgacttgtgagtggtcgccgggtcctccccagccaggcaccctgaggaagagccacgccctgcagcaggcgctgaccgcggcggccagcatgggccacagctcggtggtccagtgcttgctggggatggagaaggaacatgaagtagaagtcaatggcaccgacacattgtggggagaaacaggtccacaagaccaggactgcctgctgcccacgcttactccctcactttccggtgacgaggccccagatagaacgcagagctcaggtgatccacgggagagatgtggctacctctctgtgacatgtgaagagacatgtagtgttctgctgattgactatgccactttcttgaagcttgctaatgatgatgatgatggttgtttggattgtttgcagcccggggtgcggctccctggcatggggaccacaccttttgaaggcctgttcttgtgttgccccattttcagcctgagagccctgactgccgccgcaggaagagggaagctggaggtctgtgagctgctgctggggcatggagctgctgtgtcgcggacaaacaggagaggggttccacctttgttttgtgcagcacgccaggggcattggcagattgttagactgctgttggaacgcggctgtgatgtgaacctaagtgacaagcaaggccggacgcccctcatggtggctgcttgtgaagggcacttgagcaccgtggaattcctcctttcaaaaggtgcagccctttcttctctagacaaagagggtctgtcagcattaagctgggcttgtctgaaaggtcacagggcagtggtccagtatctggttgaagaaggagctgcaatagaccagacagacaagaatggccgcacacccttggacctggctgccttctatggcgatgccgagactgtgctgtacctggtggagaagggagccgtgatcgagcatgtggaccacagcgggatgcggcccttggacagagccatcggctgccggaacacatctgtagtggtggcgctactcagaaagggagccaagttaggaaatgctgcttgggcgatggccacttccaaacctgatatcttgattatacttttacagaaattaatggaggaaggaaatgtgatgtacaaaaaagggaaaatgaaagaggcagcccagaggtaccagtatgccttaagaaagtttcctcgagaaggattcggagaggacatgagacccttcaatgaattaagggtttccctctatctcaatttgtcgcgatgccgaagaaaaaccaatgactttggcatggcagaggaatttgcttccaaggctctcgaattgaagcccaagtcctatgaagccttttatgccagagcaagagcgaagagaaatagcaggcaattcgtggcagctctggctgacctgcaagaggctgtgaaactctgtcccaccaatcaggaagtcaagaggcttctggcccgcgtagaagaggagtgcaaacaactccagaggagtcaacagcaaaaacagcagggcccgctaccagctccactcaacgactccgagaacgaagaggacaccccaacccctggcttaagtgaccactttcactctgaggagactgaagaggaagaaacttctccccaggaagaatctgtttccccaactcccaggtcccagccatcctcatctgtcccttcctcatacatccgaaaccttcaagaagggttacagtccaaaggaaggccggtatcgccacagagcagggcaggaatcggcaagtccctgagagagcctgtggcccagccagggctgctcctgcagccctccaagcaggcccagatcgtgaaaaccagccagcacctgggctctggccagtcggcagtgagaaatggcagtatgaaagttcagatctcttctcagaaccctcctccaagtcccatgccagggagaatcgctgccactcctgctgggagcagaacccagcatttagagggaacaggtactttcactacaagagctggttgtggccactttggggatcggctgggccccagccagaatgtccgcctgcagtgtggtgagaatggccctgcacaccctttaccaagtaagacgaaaaccacagagaggcttctgtctcattcctccgtggctgtggacgcagcccctccaaaccaaggtgggctggcgacctgcagcgacgtgcgacacccagcttccctcaccagctcaggctcttctggttctccatccagcagcataaagatgtcaagttcaaccagtagtttgacttcgagcagcagtttttcagatggcttcaaggtccaaggaccagatactagaattaaagacaaggttgtaacccacgttcagagcggtacagctgagcacagaccccgcaacacgccgttcatgggcatcatggataagactgcgaggttccaacagcagagcaatcctccaagccgcagctggcactgtccggcaccagaggggctgctgacaaacacgtcttctgcagctggcctgcagtctgctaacactgagaagccctctctcatgcaagtgggaggatataataaccaagccaaaacctgttctgtttctaccctgagtgcaagtgtccacaatggggcacaagtgaaggagctagaagaaagcaagtgccaaattccagtccactctcaagagaacaggataactaagactgtttctcatctgtaccaggaaagtatctccaaacagcagcctcatattagtaatgaagcccacaggagccacctcactgcagccaaaccaaagcgatcatttatagagtcaaatgtgtgaaccttaagaaagccccatttgtggaatttggaaacgtgtgttgactcctggtggtaaattaaatagtttttttcatcagaaaaattattttttagccattttttttctttggggtggatctgatgccattgatatatctaaaatgtgggataaaacttctttaatagctagaaatcaccataaataagaatgctaaacagaattgaaaattatatcaacttaaaattttaagacagcccagaagacattaatgactctcacttatgaaattgtttggcttttgccactttcctccttgcctttgctatatggtagaatcacagaacttacttagagaataaatatgtctattgttcaagagtaacaggtttaactcatgaccaagtgatgtacatccaagtgatgtattctggaaacgatggaattttacagttacagttccattgagtcaaatcccattttatatatacataaaaattaagttctgagtgagttctagctaaatataagtgcgactgtaaacgcagccaatttttttaagcagaatatgagaacacctaagtattctcttcatagcagttcctataaagggattaaacacttatttctgtgttatggttcttattcatatatttttatagcacctttttttggaacctatatttgtgcttgaaggtgtttttgatatttggaaacagtataagccatttggagtcatgattggtggtcaagtggattcaagctaaaatactaagaccagcattcttagtggcgcttataaattagctctcacctggtttccaaactgcttttaacaatggtagtgctcctggaacaatccttccaagctcctctaaggacaatatttaattcagatactaaaggtaagactggttgttacttttgttttgttgtacaattagtactttatagtcacatgttgtatatattaaatagcccagttttattcagacttgtaaatagaactatttcaatgtagttaatctaaaaacaaaaaagaaaaccccagtcacgatttgcatgttctctgtaagcttcatccatgctggttattgcactgaatgatatattattagggcatgttaacagtataccagtaacagcactttatctcatttatatgaacacctttgaggtgctacttaagtccaagctctgatgtattattcatttgtaaagataaggtacaggaatgaaccttggtttaaaggtatttttatatgaaaatggtgtgttattggaagatgttaaaatgctaatttgagagaagtaggagtgtatctgttttatatgttgggatgtgaaatttattttttgtaatgaagttcctgtgaacatcattatggttttgtacaaataggaacctctgatgtcattcttcaacgtttgttcctgtgtgtacaattgtactttgtatgaacagctttatcatttttataggctttccatgagttttgctgtaactactatggcttatttattttctttaatatttgtgaaagtcttactcctttgttagttttgtttctgcacaactactgtacttttccatatggaataaagactattaatagaatgtgttttgcactaaatgagtcaatggataagtagagaacagcctgatgacagctatctctgttgcttttaatctttgttaccctagagggaatagtgaaaagcatattttatattaacactacaaaatgcttatttaatttcgttttataatttcagaataagggtgacagctgctagaaattccacaat

SEQ ID NO: 463750 - DNA, 4818 bp, Homo sapiens
caaaatgtgctttgaggtaggaagggacctcctgtagagcggctttggcatgaggtcgacccgccctggggtggctccttttccctgtgttggcttggggccactgccccttcatgtttggctcacatggtccagaagcatcagggctcttttaacccagaatagtcaagccttggtttccttacccctgcagttttccagagcagctaaaaaacatccaagctggcaaaccattcttcctactccaaacattaggagcttttaccagtaagcaaggggtgggaagcttttcctttcttgaagatgctgccagcgtagtttcccttgtagctgccatcctgggtgcatgacttgcaaaactgatatgtgagtgacaataagccagatggcctttgcaaaagctctgcttattttgatttttgtggttccttacaaaaggcgaagtgagcattgatctttgttggtgctgttgtagctcaacggcaacatcactgtgttgtttcctcattttatttttcctaaaacctttacccattatctgcagattttcacatctaagcaaaataggttcatatgagtccagttacctagacaattaataaaaaagagcaaaatgttgagtgactatgtcataggttacttattgttaagttacagctttgtaagcagcttgctttgtaaatttttcatcccctgatggatgctgattttagaaggtgagagacgtgttagaaggatgtgaatatcgttttatttattggccataattaagtgcctttgggctttttgggtacagggttaaactacagctcaacatttaaatcaaatccaaccataaaattctcttaagtacaaaaaaaccagatgaccaacctcagggagaacccaagaaaaggtgggctttcccagcattgctgtgcagcattctgagaatacagcttgatttttctacatctttgcatgggcaacagtggtactgggtcctgtctcttgggacaagtttcactgtgattttaaatttttgtttcaacttggattcttcacgattgaccgtcaagttgaaatcctggttttgactttcactactgtgggatgtgcacaggaagttttccaccaaattttccacgtcgttcccctggcttgtttaatgagagcttggatttcagttttactccaacacctaaatagcctgggtctctaccagcatgccactagggttttacttcatttcagcctcctgtgggcattggacacccggcactctgtgagggtaacatgaaagataggcccttttcttacccaagctgatgtctgaagtacccgttttcacatgactcggaattaggaattgccgtcagataacactgggctcttctcactcaccctttgcacttggagtttttgttttactgtttccttaacctgtcacagtcccttaattagaatgtattgctagaggacagggtgcgttgtccaactttgtgcgcattttatagaaacacacaaaatcaccagacaaagcagctgtagtgtgaactcatccagatgcgatactgaaattccccagaggggcatcttcattgttttctttctttgttccagaagcaaaggccgataatgaaccgagctgttcgccggcagctcaagaactgttgacaaggctgggatttttactgggagaagggatcccaagtgccacacacataaccattgaagacaaaaatgaaaccatgtgcacagctctgagtcaaggcatcagtccttgctccacactaacaagcagcaccgcatctcctagcaccgatagcccctgctcaaccttgaatagctgtgtcagcaagacggcagccaacaaaagtccctgtgagaccattagcagccctagttccaccctggaaagcaaggacagtggaattataggtaagaagcacactgctcggtaacataatggctcgaatctcatcaaccagagcattcaccaggcacttcctcagagggttttagcatggtctgtgaaggtcagtctgccagcgcctgctctgttctttgcaggcagcactgactccatgtgtagctgagagagtggagcattggcttttacattccttgatgtttactttataacagtcagctcatttgttaaaaaaaaaaaaaaaaggaattccagatcagatctggcctgtgaaacaaaaatcattgctcttctatattcagttccatttgttgggcatcaggtcccactggggcacacagcagagcaatgaaattcctgcatattaagacgtcgtcttatcccaatctcaaggtggtggcctaccactactgccaggctgacaacacgtacacttgcctggtgcccgagtttgtgcacagcatcgcagctttgctctgccggtcccatcagctggccgcctacagagaccttctgataaaggagccccaactacagagcatgctgagcctccgatcctgtgtgcaggacccggtggcagctttcaagaggggagtgctggagccactcacaaacctgagaaatgagcagaaaattcctgaagaagaatacattattttgatagatggcttaaatgaagctgagtttcataaacctgattatggagatacgctttcttcatttattaccaaaattatttctaaatttcctgcctggttgaagttgattgtgactgtaagagcaaattttcaggaaatcataagtgcgctgccatttgtcaagctttccttagatgacttcccagacaacaaagacatccacagtgacctgcacgcctacgtccagcacagggtgcacagcagccaggacatcctcagcaacatctccctgaacggcaaggccgatgccacactcattggaaaagtgagcagccacctggtgctgcggagcctcggctcctacctgtacctcaagctcaccctggaccttttccagaggggccacttggtcattaagagtgccagctacaaggtggtgcccgtgtctctctctgagctctatttgcttcagtgcaacatgaagttcatgacccagtccgcctttgagagggcacttccgattctcaacgtggccctcgcatccctccaccccatgacagacgagcagatctttcaggctattaatgctggccacatccagggggagcagggatgggaagactttcagcagaggatggacgccctctcctgcttcctcattaagaggcgagacaaaacccgcatgttctgccacccgtccttcagggagtggcttgtatggagagcagacggggaaaacacggccttcctgtgtgagcccaggaacgggcacgcgctcttggcattcatgttctcgcgtcaggagggcaagttgaaccgccagcagaccatggagcttggccaccacatcctgaaggcgcacattttcaaggcattctttgtgtgtgaccccgtgccttctgcaggtatctgcaccctctgcggcagacccactttcagagtgaccctgcagggcctcagtaagaagacgggaatttcttcaagccatctccaagccctgtggatcggctacagcaccgaggggctgtccgccgccctggcctctctcaggaatctctatactcccaacgtgaaggtgagccgtctcctgattttgggaggggccaacgtgaactacaggacagaagtgttaaataatgccccaatcctgtgcgtccagtctcaccttggccacgaggaagttgtcactctgctcctggaatttggtgcctgcctggacggaacgtcagagaacggcatgactgccctctgttacgcagcagctgctggccacatgaagctggtgtgtctgctgaccaagaagggagtgagagtggaccacttggataagaagggccagtgtgcgcttgtccacagtgccctacggggccacggtgacattctccagtacctgctgacttgtgagtggtcgccgggtcctccccagccaggcaccctgaggaagagccacgccctgcagcaggcgctgaccgcggcggccagcatgggccacagctcggtggtccagtgcttgctggggatggagaaggaacatgaagtagaagtcaatggcaccgacacattgtggggagaaacaggtccacaagaccaggactgcctgctgcccacgcttactccctcactttccggtgacgaggccccagatagaacgcagagctcaggtgatccacgggagagatgtggctacctctctgtgacatgtgaagagacatgtagtgttctgctgattgactatgccactttcttgaagcttgctaatgatgatgatgatggttgtttggattgtttgcagcccggggtgcggctccctggcatggggaccacaccttttgaaggcctgttcttgtgttgccccattttcagcctgagagccctgactgccgccgcaggaagagggaagctggaggtctgtgagctgctgctggggcatggagctgctgtgtcgcggacaaacaggagaggggttccacctttgttttgtgcagcacgccaggggcattggcagattgttagactgctgttggaacgcggctgtgatgtgaacctaagtgacaagcaaggccggacgcccctcatggtggctgcttgtgaagggcacttgagcaccgtggaattcctcctttcaaaaggtagcagcgtgatgccctcaaaggtttcttttggacggacacagagagaacttcagcagacccattcagtgctttctgattcaaattctaagttttctgttaatggaaattttctaataaacagtagagagaataggca

SEQ ID NO: 463751 - DNA, 1438 bp, Homo sapiens
ttcatgaatgggttcagggtccttatgcaaggactggagggagtgggcttctcctgttttgcccttctgccttctgccatctgctttactgtcacacgtagcagctcaggtgaaaagcacttttaccgtggggactttcccttagtgctctgtgatgcacaagagcagacctatgtagaagcatttaagtattttgtctcccgggggtccggccctggaggacccgaagcccccactcccataacgccccttactacatccccactccagccgccactgcgactgccacagaacccccgccacgtgttgctgaacctgtttaaagcggccacagccggagttcgaagagcaaagcaggagtccgcctgggcaatgcgcatgcgggaggcacgagcccattctcccgtgacggtgactccaacggttggctgaggacgattccctgagccttgacaaagcaggagccctccgtggcggtgcgtcggtgtcgaggctccagtctgactaatccagggggtcgacaaaacagattcgggacactatgctacacggagggcctaccaggatgcagaaacagcagacggagtccagggaaagcagtgcggcatcccagcctcaggcctgcccgtacggtgttcgggaggggaggagaccaatgtgaaaggagatggttctatctcctcgcggctcttctctgagaaatgaagccacgatacgaaacaatcttcaagaagaagctgaaaaccggatatgacacggatgtccccagaacacagcaggcatcctgaagctccgcctcctgaagctccccctccctcggtggaagtcggctcagggaggtcctgaggacaggactcctgggggtttggctgcagaatgaattcattaggactttatataatttttcaaatcatgaaattgcgcaagcttttgaatatggaattgggagggctttcagttcattcagtagaaaactggaacatttttgaaaggtgatctgcttgacacctttcaaagagcacaaaaccttgtgaagtagcagatgcaatgattaccaatgtactttataaaatgactttcagagtttgagatgaaattggcttttctgaaatatgtaagtctctggaaaaactcaacatttctaatcttgctttggaaagcctttaagtatgtaaaaatcaatttcttatatcttctctgaaataaacatggaatatcctaaggttttgttcatgtttcatgaatttcacagcattcatcatattttaaagttatttttgatactttgcattgtattaaaatctgtcttggaatgagaggcctgaaaaacaatcataatatactgttgttgtctaacaatatatcaagtttttaatgactcttacgatgcaatatttttatcattcttgtagtttatccacgtgtatttaatattact

SEQ ID NO: 463752 - DNA, 960 bp, Homo sapiens
ttcatgaatgggttcagggtccttatgcaaggactggagggagtgggcttctcctgttttgcccttctgccttctgccatctgctttactgtcacacgtagcagctcaggtgaaaagcacttttaccgtggggactttcccttagtgctctgtgatgcacaagagcagacctatgtagaagcatttaagtattttgtctcccgggggtccggccctggaggacccgaagcccccactcccataacgccccttactacatccccactccagccgccactgcgactgccacagaacccccgccacgtgttgctgaacctgtttaaagcggccacagccggagttcgaagagcaaagcaggagtccgcctgggcaatgcgcatgcgggaggcacgagcccattctcccgtgacggtgactccaacggttggctgaggacgattccctgagccttgacaaagcaggagccctccgtggcggtgcgtcggtgtcgaggctccagtctgactaatccagggggtcgacaaaacagattcgggacactatgctacacggagggcctaccaggatgcagaaacagcagacggagtccagggaaagcagtgcggcatcccagcctcaggcctgcccgtacggtgttcgggcacctcctacgaaccaggatctgtacttgctgtcccagttataaagtaaaacagcctgtccttcctgcactcaaggagacagctccataagcggggagcttgttaaaaatgcagaatttggggaactattcacagagatttttactaagttacgtggaaaaaagcctgggactagctacgatctcccctctggtgatttggatgtgatagtctcttaaacatattttgaaatatactcgcccaaagaatggagaaagacccagccggccctcctcatgtggctgctgagggagatatatgtataattaaaaaactgcca

SEQ ID NO: 463753 - DNA, 1971 bp, Homo sapiens
actatgatgataccctgggtccacgggccttggttttaaagctgtggaaaactgtcccccagaaactagacgagcatggtatctgtggagggcctcacaaagctggtggacccctcccagctgacggaggagtttgatggctccctggactacaaccatgaggagtggatcgaactgcggctctccctggaggagttcttcaacagcgccgtgcacctgctctcgcgcctcgaggacctccaggagatgctagcccggaaggagtttcctgtggatgtggagggctctcggcggctcattgacgaacacacacagctcaagaaaaaggtgctgaaggcccctgtggaggagctggaccgggaggggcagcggctgctgcagtgcatccgctgcagcgacggcttctcaggacgcaactgcatcccgggcagtgctgacttccagagcctggtgcccaagatcaccagtctcctggacaagctgcactccacccggcagcacctgcaccagatgtggcatgtgcgcaagctcaagctggaccagtgctttcagctgcggctcttcgagcaggatgctgagaaggtaggaagggaacaggccaaacctgagccgggatgggggtgagggagcagaggttgctcatccaactttctgattaatgatagtactttcctggaaagctttaaaacagtgtgcctactagttttagctaatgtaatttttttaagctcacccttatatagtgtgtattatgtgcccagtattgttctaagcactgtgtgtaaatttactcattttaatcctttcaagagtcctgagaggtagatgtactattataatcacattttacagatgaagaaactgaaaggttaaagaattcaccaagctgggaagtgcagtctggctccagggtccctgcttttacctactgttagaagctgccccgagtgcctgcaatgagtggctcaagccagctaaggaacaaaaacagtactgttaacagccactataatattaattagtgattatggccctgcaatgtattttaccattgacaaaccactttcacacagtcttatttaatctgcataatcctttgatccttatgggttgagtggtggcatctctcttgacatgcagggaaacggatgttctttgatcttgggtctacagtgacagagctgacatctgaatccagcatttttctgtttctaagtccagggctcttcctgccatacccacttgtttccaaaggtttctcttcagctgctaagcactttcttgagtaagacaccattttttccagcagtgaattttcaaagctttccccttatcagggaaaagtaagataagagaatgtaaaaaaggaaaattgcatatagtgcctctttgctgaggatacaaaggtatctttcctagattctctttaagctaaagagaagaaagaagagtttactattatatgtgctttaagaagaataaaataggctctcttcctatgagttttctggatataacttatatttaaatggccaatactgttcttagggatgccatgacatctctcagtaacctgtgaattttacaatgtctgatatcatggttttctgtcttttaagagctcatattgaaaaatgtctctaggtatttttaaatgatgaaatcgagatcttcagctctctgtataagtgtgatcccaatttatgtattaaatataactgcaagaaaatttatcagaatattaatagttttgcttccttggggcaggcttatggttgattttaatttctctgtataattttataatgttttctaattttttataacatatagtaaaaaaattagtatatgcagtttttttaatgcatatcactttttatagcatatcactttttatataccttttgaatatgatttaagcaaggtttgggaacttctgacctttcttggggctctttgcccagtggcctg

SEQ ID NO: 463754 - DNA, 1217 bp, Homo sapiens
ctggcggcccagttagggaagatgagtacttctgggtctgtgacgttgggaaggggcaaactcagttgtgtgtggggttcgggtggatggcaacatcgcacttgtaaacatacccagaccaaagtgttagaggtatctcattctaaggagatgcgagtgggaagctgggtcgttgaactgacccccacccccagtttattgtcaggacctgatcaacttggtttttactccaagagactccccagcgttaatctctgtgtcatgcacatcctaagccttacggctgcatcagaactcccttgtctcaatgatacaggaagagaattgatggccactgggcatctgttcctcactggagcccactgtgtgctcacacccagcttcaccttggaatgtggtagggagcaggagcatggggtaggtgaggagtgacctggaagaggtatcaggaccattccttaacatttctgataatcggtgcctgtgaagacattcccgcagtgtctgcggagtcctagaaagagagcagaggccacacaaaatgcttttctgaacccaagatcgccatactttgtggaatcttcccattggacatagcagtgagcacccgtttcctttcctgccctcacctgttcctgattcggaatgcttctgccaaataaatagtcactggctacccaaggagtttaaagtctaagcctggtcaatgcacacccagaagagttaagttcagtgataaagggaaatgtagatgaacatactaattcagcccatgtgaccactttgggcctcagctgttaggttgagaagtaagaggggattgaatgcgctccaaagatccgttcagttcctaatgttgcttaattctatacatgtggcaaaaggcttgtaacataaattaaatgaaattcccttattaaattaaaaagaaggttgagaacacattcaggttgtttttgccctggccagtagactctctttagcaggcagccgaaaagcttaactaagaagaatcagccctttattgttactctctttggggatgtttatctttgtatgtttagaaataaaaaaccttggtccttactttcagccctgaaataacctgctttcctttagtgaagctattttttcccttgggaaattgagattcaaagagtagagaagatgaccaggctcatagccttctgtggttcctcgcacagtgccctggggac

SEQ ID NO: 463755 - DNA, 1565 bp, Homo sapiens
tccagataaaactgggtttaaaatgaaggtggggggcgttaatggggagaaaaacggaatagcaggatcaaatgacttccagcttgatgtttccctgaattctaccatcaagcaaaactgtcattcattcacgctacaattagaaaacaatacaccaaccagccatcagtgtaagtatttcaggctcatcagcaatatgaatgtcactaatgcattgctctacataaaagagagtggagaagccctgggattatcaacaggtaatggtgatactgcagcagttggctgcatgagatttgtgattacagacttgagagtggctgtcacctttggtgctaccagaagtagctttcaaaactgcccttctgtaacagagaattctagaagggtggtccatggaccatctatattagaaggacttctggctctgcttcgcctgcggattactggtcctgctcaggcaaactgaatcagaatcactttctagtagagacttgagaggacccatagctcttgccaacacttgattgcagcattgtaagagaccctgagccaaaggactcagctacaccatgctggctcctcgcccatagagaccatgatataataaatgtttgttattttaagatgttaaacttggagtaatttgttacacagcaatagataactgatatgcttctaatcattgcatggtgtccatagcatatttttaccacattttacttgtccacttcctgcagatgggttgcttgctgcctgaatctaactcctgctactactgcaaataccactgccatgaatatcctcagcaagacccccttccagacctgcatgaacagttgtgtgaaatgtatatgcacaaagggactgcaagggaagacccagagactagggaagaacttggaacaataatctcagtttcttcaattcctaaacttgagagtattgctgtttttaaatgaaagtattttttccccctaagcattttgttctaaagttgagctgcctttgaggggaaataaagagactaccagattaatgggtttttttcaaatgggatggtggggtaaggaataatcggggtggtctgtggaacaacttggaggattggtgttatgtctcaagaagatattcaagtatgttcctccttttttacccagaccgactgcttcatgctgggcttcagacatgagaggctaggagtaggaggcatgccttgttcaaagatacccagttctcccaggaccatttgttgaaaaggcaggcacctcattttacagaagaggaaactgaggcccagaaagagaagtggcatgcccaaggctgtgccagaagcaaagtgtaaaatagatcctgagcctccgactcctgtaactcctccaggggacagcagcatctcttctgactctttgcttccatgtcttgaggaagcagcctcctgcctatggccatctgaggaagccatcttggaagcagacccctcagccccagtcaagccttcagatgactgaagtctcagctgacatcttgactttaatttaaaaaaaaaaaaaaaaaaaaaaaaa

SEQ ID NO: 463756 - DNA, 677 bp, Homo sapiens
tactactactaaattcgcggccgcgtcgactggggctgcgcctatgggtttgcgaggctgacagtttcctaggcgtcaccccaagccgtgaccaggcctttcctcctcaccaaagtgcgacattggccctggaaatcccccgggcaagagagggttgtaaattcagcttccttaacgtcgcagattagaatgttctacaccacagcacctgcataaataaaggtcttctagatgccagtgattttcttcatgccaaggaagaccacggatcgccagcaagcaccaggcgccagaagaaaggcatggaacggatgctctctctgagtcccctgaaaggaatcagtcctgctgacgccttgactttggccttccagtctttggaactgagaaacactataattctgttgtttcaaagccaccagtttgtggtcctttgttatgacatcgtgagagaactaacacagcagggagcacactggattgaagatcatgagagctgcaccccagtctccactctgccgttaactgctggttctgcacatgtagtcatgcctgtcttaccaggattacaagtgtgagccactgtgccctgcctctcctccatttcctttgtgtttttaaatatttattaatgtatgtatttatgtttcttctcccatgcccttcagggatgaata

SEQ ID NO: 463757 - DNA, 942 bp, Homo sapiens
  misc_feature (1)..(2): n is a, c, g, or t
  misc_feature (8)..(9): n is a, c, g, or t
  misc_feature (11)..(11): n is a, c, g, or t
  misc_feature (14)..(14): n is a, c, g, or t
  misc_feature (16)..(18): n is a, c, g, or t
  misc_feature (22)..(22): n is a, c, g, or t
nntatttnntngantnnnttcngaaggaatggtaccagctcctccttgtatctctggtagaattcgactgtgaatccatctggtcctggacttcttttggttgaatgttgaatattggcccccactctcttctggcttgtagagtttctgctgagagatcagctgttagtgtgatgggcttccctttgtggtcaggaccctcagctgcaggtctgttgcagtttactggaggtccactccagaccctgtttgcctgggtatcagcagcggtggctgcagaacagtggatattggtgaactgcaaatgctgccgcctgatcgttcctctggaagttttgtctcagaggagtacccggctgttgggaatattacagaggcgatgctgtgtccttctccatgcatcatatcaggagacacaggaaatgaaagtttattacaatattggtggtggtaactatgatcactttgttaatgtgatatccattggtttctccactgtcaaattataagagcagaaggtaactattgtgaaacacattttgatgctctttttaaatattttttgtttttatttattttaaaaaagtttttattttttttaatactttaagttgggatacatgtgcagaatgtgcaggattgttacatagcatatctgcatgttctgcacatgtattccagaacttaaagtaaaataaaaaaatttttttaaaagatgtaactggcattaattttagaaatgcaaaaatgaaagacctgataatgaaatcaggaagaagaagagttgaaggagaaggtgggtgtactaatatcctcatctgatgagggcaatcacaaagaagtatctatagcgaatgggacaaaaaaagaaaggtattatagttacaacagagaaactaaaaatagagataaaactaaataaaggatgggcatggtggctaa

SEQ ID NO: 463758 - DNA, 944 bp, Homo sapiens
aggcacagaagctggagccagcgggaggaggcaagcgggcaaccgaacagaatgatgagaaaaaccgaagctcagggaacatttccaagaccaagagctgagaacgctgcggagctgaaatttaaatccagtttgtcagacccccccaatccgacattgtcccctcgtcctgccatggcccatatcccaggaggacctgtcaccatcctccaccttggatcccccaaagccctgtttctctctttcacagcctctctctaccttattcctatcaccaagggattcttctctctttccctctttctactatttgttagaatggaaagcactgggccgggggagaaaaatttaaggcagagtgatgtgagaagtgtcgacaagacccaggaaagcccagggagaggggctggggctaaggcgtctgcccgcttggcagcagctgtgatgttcggaaatgatggatcaactctggaaaacctattaggaaagggctgggccatcctgcgtttccgccaggcctgtccaggtgactttgagaggccaaatcactgctgggtgagtgacccactgctaggaagatgcccagacgccaactgggaaaagcttggccaagccaatcaggtgctgccagagccttctttgtgatagcaatgccaacccatgaactaataccctcctttgggagagatgctgacacgccaaggaaactaatgtttttatctcagctgactcatttgctgagaacaacaggtttataaggcaactcttagcttgacccactctactcctccatcaaaataaagaaataaataaagttttcaaactaaagagcattaaagaatgataacttttctttttcttggtactatctattgacctatacctggttttcactgtaacacatttgtggtatgaaaaatgacaatatgatgtcagagaaaatg

SEQ ID NO: 463759 - DNA, 2790 bp, Homo sapiens
actgacacaaaagtgattgggcatgaaatacgccatctgcaaaactgaactcgtcctctttcccccgaatgtatctcccagatgtccagaatacgccatctgcaaaactgaactcgtcctctctccccagaatgtatctcccggatgtccagaatacgccatctgcaaaactgaactcgtcctctttccccagaatgtatctcccggatgtccagaatacgccatctgcaaaactgaactcgtcctctttcccccgaatgtatcatctcccagatgtccagaatacgccatctgcaaaactgaactcgtcctctctccccagaatgtatctcccagatgtccagaatacgccatctgcaaaactgaactcatcctctttccccagaatgtatctcccggatgtcgagaatacgccatctgcaaaactgaactcgtcctctttcccccgaatgtatctcccagatgtccagaatacgccatctgcaaaactgaactcgtcctctttcccccgaatgtatcatctcccagatgtccagaatacgccatctgcaaaactgaactcatcctctttccccagaatgtatctcgcggatgtccagaatacgccatctgcaaaactgaactcgtcctctttccccagaatgtatctcccggatgtccagaatacgccatctgcaaaactgaactcgtcctctttccccagaatgtatctcccggatgtccagaatacgccatctgcaaaactgaactcgtcctctttcccccgaatgtatctcccggatgtccagaatacaccatctgcaaaactgaactcgtcctctttcccccgaatgtatctcccggatgtccagaatacgccatctgcaaaactgaactcgtcctctttcccccgaatgtatctcccggatgtccagaatacgccatctgcaaaactgaactcgtcctctttcccccgaatgtatctcccggatgtccagaatacgccatctgcaaaactgaactcgtcctgtttcccccgaatgtatctcccggatgtccagaatacgccatctgcaaaactgaactcgtcctctttccccagaatgtatctcccggatgtccagaatactccatctgcaaaactgaactcatcctctttcccccgaatgtatctcccggatgtccagaatacgccatctgcaaaactgaactcgtcctctttcccccgaatgtatctcccggatgtacagaatacgccatctgcaaaactgaactcgtcctctttcccccgaatgtatctcccggatgtccagaatacgccatctgcaaaactgaactcgtcctctttccccagaatgtatctcccggatgtccagaatacgccatctgcaaaactgaactcgtcctctttcccccgaatgtatctcccggatgtccagaatacgccatctgcaaaactgaactcgtcctctttcccccgaatgtatctcccggatgtccagaatacgccatctgcaaaactgaactcgtcctgtttcccccgaatgtatctcccggatgtccagaatacgccatctgcaaaactgaactcgtcctctttccccagaatgtatctcccggatgtccagaatactccatctgcaaaactgaactcgtcctctttcccccgaatgtatctcccggatgtccagaatactccatctgcaaaactgaactcgtcctctttccccagaatgtatctcccggatgtccagaatacgccatctgcaaaactgaactcgtcctctttctcccgaatgtatctcccggatgtccagaatacgccatctgcaaaactgaactcgtcctctttcccccgaatgtatctcccggatgtccagaatacgccatctgcaaaactgaactcgtcctctttcccccgaatgtatctcccggatgtccagaatacgccatcggcaaaactgaactcgtcctctttccccagaatgtatctcccggatgtccagaatatgccatctgcaaaactgaactcgtcctctttcccccgaatgtatctcccggatgtccagaatacgccatcggcaaaactgaactcgtcctgtttcccccgaatgtatctcccggatgtccagaatacgccatctgcaaaacagaacttgtcctctttcccccaaatgtgtgtccactgcttgaaccaggaaactggatatcatcttaaatcctccctttcccaccaccaccaaatccaagctggggagcccctcttctttactgcctctgaaaaccgcactgtccccccacaccccatggatcctgcttgaacccaggcactcatcacttcttcgctggggtatgaccattcccctggccttcctatcttcccatctatgcccaacatggctgccaaggggatctgtcctaaatgcaaagttagccatgcctgccctccctcccctggcttgcctgaaatctttcaggaagctcagagcttttaagacaacattttgagaacaaggaccttttgcaattttacgtcttctgttttctggagtccccaaattcagctcagccttcatggcttctaagaaacttgccttgacctcatctttcctatgcgttctgtgcctagctagcaaaattcttagctgacattactttgatcatgaactttgttgcctgtgagttcccagagggcaggccaagtctgacttggctttgttgcaaagtctagcacatgatggacattcaataaagttttgatagagagaaaagcaaaatctcagacttcttagctcatgatgtcccagtgaa

SEQ ID NO: 463760 - DNA, 1284 bp, Homo sapiens
gattgtcaccatatttatgtccataagtacccaatgtttagctttcacttacaacgactaaaaaggagcaagtcaagaaaaaggaaagctataaaggagacaaaaagaagactaccagatgaaacaattaccctgaaaaactcatgtattttattaaaggagtacaaataccccacaaatgacaataaatctccaatccctctactttccactctgtttggcaacaatgggcttggaactttgcaaatcacacttcaacatcaccagctgctcacattcttccaagagataccagaagggaaactgggaagctggaggagaaggggagaggaccatgccttccctagacaaaagacaaagccttttgcttctgctataaataggacaccctcaggaaagctggagcttctaattcttccagtgatggaactcagcatatgtctgaggagcagagaattcagaagctcccatgggcctcccacagctggaatctaaaacaaccacagaagtctcagaaaagagaatataaaagcatacaacaaaataaaggactcataagagtacagggatcacatacatgaagttgaacaatgttcggttttaattcttcacaattatcatttgtaagattgtaggcattggccatggaaccccaagtctccagccatctccagttctctgcaggcactgaatgtatgtgctaaggcaagccatctgcagctgctgcttgaagggaggtacagatacaacagttggaaaccttggtcaccacagcagaggtgtggggccaatccacaatgcagttggagcatgttaacttatggatgaaatgacagagaagacacagctgcttcagcgctctctccatgcttgcaggaaaccatctaccaccactcaggtttccagcggagcccatccgagcagcacagctgccactgggtaccacaacccatgttgcagccacgtggctggcccagaagcagcagggaatgaaggctcactcacctcgggatcctcttcgtaatgccagttgtcggttctaactgaggtgcgaggggagttggtgggcaagtggcagaagactttctgcaatggttaatgtcattttccagcatacagtgctatatagtaaatatgtagccaaataaattctaaataaatgtaaaataacttagatgaacggattaactctataatattctctctgtatataagatttttaaaatattttgacaacttttatctcagaattttgtgtattttattttatttcatttttaaaaa

SEQ ID NO: 463761 - DNA, 864 bp, Homo sapiens
tgaggccactgcccacccaccaggtaccatctctcaagcgtgccctgaagttcagggaaagacgccagcgccccctgctggttgcgctctcccatagcagggctcacattttgggagaaagaaatcagctgttagcagctttcgttcttcaccatgttaagcaaagcacaacattttataactgggtgaaaagccagatattctgtcagctgatttgattgttctgtacgcatatccctaagccattgtttgacggatatttgtactgagttgactttcttcataagatgataggactaatgaagagaaaaggcaatggagtttttaaaaccagcgtgatgaaccaaatgctgccactgactagctatgtacatgtaatccaaaggttccctccgttgaaacaaaataacagtgcttacctaaccaggcaccatgggagcctgttgtcaccctggatatctagctccatgcccttgcccttccactctgcctcgacaagaatcatggcacccaaaatacatgagttcaaatctaagtttcacaggctcagggatgaacccaagctaccaaatgcacaggcccctcctgtatacggttacagcagcagtatatatgagtctttctttcacttcttgccaactcttaccaatctaatgaatgggaagtggtaactcattattatttcaatttgtattccctgtattaatccctgagaccttaacacttgtgtattgcacattctggttcctctttggcaaattgccttggcattaagatagtaaattttccttgccacctacgctggttgagtcaggatgcttaattacttggagatcctttcttggaaacgctgagcctggccag

SEQ ID NO: 463762 - DNA, 1228 bp, Homo sapiens
aggaaggacgctgtgcagagctgccatgttagaaaactcaggagccatggccgcatgtttggggcttgttttctccctgaaggagagtcaggaggacgtgctcattcccgctggcctcagctccatcctcaccatcccaggcgttctcacaggctcctcttccccagtctccctggccgcaatccactcagtaaataccctggccccgatggcggctttcactgatgaggaaaccaaggatcatagcggtggagacgtttgcaaggtcacacagctaagacgtagcagctgtggtctgtacccggatctgatgccattgcctgcctgctttctgctgccttccagggactctgccggtcagcaggtgtatgacagaagcatatatattagccaaaacatggtctctgtcatctgttttctaactcagataaaggtgatcttaaggacgtggacagcacagtttaggatcaaatgttctgcaaaatctgggtcaggtcaggaatttacctaatttgacatattgtttccgactcctttgacatttctcttcatttggttctgaatatacagtataggagatttttttcctattaaaccgtgtccggcggtgtaaaagctcttggggttgctgatctcatggagctctgcagtttgcctcaagcaattctttggacttcacagagcatcctgttattttgttacagacttaattccttgatctcatgcatcctggaagtttctagtggcaaaagcctctccccactctgcagctgtcacttatttataagccagaggcactttctgtatatgcaactttcatcatagagctctgagagaaaggtctggcatttctggatgattctggccaacccagagctgcacagagccctaacatttcatgagagagaaaatcaacaggagaatggccactgtgggcatgacacgtggcaatgtgatcgctaaccccacggaaccagccacttaccgctttctgaaacccagatcgtcatcccgcagtgtgatacaaaaggaagatcatcttgctagatgccaagaaccgtagttatgacactttttgtcattctgtttcctcttatttatacagtggagagtaggatgttttcaaataaaccttctaaatatgaaatcctgagaatgcattacttcaaaaatgctgcaccgttagcagccttttagttggttacattataaaacatgtagaccagta

SEQ ID NO: 463763 - DNA, 2608 bp, Homo sapiens
ccagctgcgggctggtgtcatggcaggtgggcggcgccgcaggaggcgcctggcggagctgacggtggacgagttcctagcttcgggctttgactctaagtccgaatactctccagaagcggagacgcgggaggcacgcgaggctgcccggagtccggatgagccgggcgggagcccctcggccagccggcgtaaaggccgtgcctctgagcacaaagatcagctctctcggctgaaggacagagacgccgagttctacaagttcctgcaggagaatgaccagagccagctaaacttcagcgactcggacagctctgaggaggaagaggagccgttccactccctgccatatgtgctggaggaagccagtgaggatgaggatggagcagaggagggggaagatggggacagagtccccagagggctgaaggggaagaagaattgtgttcctgtgaccctcgccatggttgagagatggaagcaggcagcaaagcaacgcctcactccaaagctgttccatgaagtggtacaggcgttccgagcagctgtggccaccacccaaggggaccaggaaagtgctgaggccaacaaattccaggtcacggacagtgctgtgttcaatgctctggtcgtgttcaatgctctggtcaccttctgcatcagagaccttactggctgtctccagaagctgctgattggaaaggtggcaaaggacagcagcaggatgctgcagccgtccagcagcctgctctgggggaagctccgtgtggacatcaaggcgtacctgggctcggtcatacagctggtgtcctgtgtggcagagacagtggtgttggcggccgtgctatggcacatcagcgtgctggtgccctgcttcctgaccttccccaagcagtgctcaagagaatgcagagtctgccggcacaagaaggacactttccttggccccatcctcaagcaaatgtacatcatgtatgtgaggaactgcaagttcacctcgcctggtgccctccccttcatcagttccatgcagcggaccctgacggagctgctggccttggagccgggtgtggcctaccagcacgccttcctctacatccgccagctcgccatacacctgcacaacgccatgaccacccgcaagaaggaaacgtctgtgtacaactggcagtacatgcactgcctcttcctgtggtgccgggtcctgagcactgtgggccccagcgaagccctccagcccttggtctactcccttgcccaggtcatcattggctgtatcaagctcatccccactgcccgcttctacccactgcgaatgcactgcatccgtgccctgacgctgctctcggggagctcgggggccttcatcccagtgctgcctttcatcctggagatgttccagcaggtcgacttcagcaggaagccggggcgcatgagctccaagcccatcaacttctccgtgatcctgaagctgtccaatgtcaacctgcaggagaaggcgtaccaggacggcctggtggagcagctgtacgacctcaccctggagtacctgcacagccaggcacactgcatcggcttcccggagctggcgctgcctgtggtcctgcagctgaagttgttcctccgggagcgcaaggtggccaactactgccggcaggtgcagcagctgctggggaaggcagtggaagcctggcagaagctgaccctggaagaggggacccccctgaccttgtactacagccactggcgcaagctgcatgaccgggagatccagctggagatcagtggcaaagagcggctggaagacctgaacttccctgagatcaaacgaaggaaggtggctgacaggaaggatgaggacaggaagcaatttaaagacctctttgacctgaacagctgtgaagaggacgacaccgagggattcttggaaagagggatactggggcccctgagcactcggcatggggtggaagaggataaagaggacaaggaggagggcgaggaggacagcagcaacttggaggatggagacccagacgcagaggcggggctggcccctggggagctgcagcggctggcccaggggccggaggatgagctggaggatctgcagctctcagaggaggactgaggcagcccatctggggggcctgtaggggctgccgggctggtggccagtgtttccacctctcaggcctagaggctggcgtctgtgcagttgggggaggcagtagacaggggacaggctttaatatttatttttcagcatgaacgaccaaacttaccgagagctaggctgggctggcgtggctgctgaagccccacagttgtgggctgctgaagtcagctccgcgggggagctgaccctgacgtcagcagaccgagaccagtcccagttccagggggaggcctgcaggcccctggccccttccaccacctctgccctccgtctgcagacctcgtccatctgcaccaggctctgccttcactcccccaagtctttggaaatttgttcttttcctttgaagtcacattttcttttaaaattttttgttttgcatccgaaaccgaaagaaataaagcggtgggaggcagggccattgtaaaa

SEQ ID NO: 463764 - DNA, 1748 bp, Homo sapiens
atgtaaatgccacaataggtattacagttctgtataatgagcatttatcaaattcccctagttctgtgcccctcaatctggcatatatgcaactatgacaggaggtactaaaagccttagataagcatggtgtatctttttttttccccacgtatattttttgttgtttttttttttttctgttattttgtccgtggttcttccataacttataaacttgatttataccgaggaggtgggaaattgggcggggcagggttggacttgacccgggattggggaagctcctctcgcttgccccctcggggcgggcctaggccctttggaggatggggacgccaggacacccctccctgaggttgtctggccgcctctgcccctagtgctcagaatcctgcgtgcccctcaattccggaatccctcctttccgatgtcccccccaacccctgaggggggagggaagggaggggggtcaggtctcccctctgtggcagggggaggtggaggtggaggtggaatcggaagggcgtggaaggcgggggccaggagggctcagccgatggtgagtccaaagccacactggaacttgttcttgcggtgattcaggaaggccccaagggccagcgtcaggggcaggagctggagcttcttctccagcgtggcacccacgatccagttgctatccacagagcctttgaagaggaggttggccttgggcaggtccagctggtacccgaaggagacgctggtatcctgcatccttgtgctggcctgaaaatccacacccacctgcaactggtcactggctttgtggtagtatgttgcgtgcatgcccgcctggctcaacgttaacgttgccaaccagttgttcaatgtgtatttcccagctagagacatgacagtgccctcgtccccaggccgccggttgtagaccagctctctgcccagggccaggcaaggcctgatgctctggaggtagtgggcttcgagaattcttgaacccacgaggacgtctgggttccccagggtgacggctgctgtgagtcagagccccgatactccccgtccacctgccagttcacaaacttcgactgctgggtctggatggccatcttggacctgagaccggggcccagctggtgaatgacctgagcgtggagactgccgctgttgtccatgtcacctaccagtacagggaacgcctctgtgggactcagctgctttgtccccacatacgtgaccccgaagtggtactccttacacctccggtggcactcctggaatgtgcccgggttgggcaggcagccgcaggccccatcctcggcggcccctgaggcgctggcggttgcagccccgggggtccgttccgaacctcgactcctaggggtgccggcgcccaggccgcctctcagcggcggcagcgtgaagcccggcggcgagggcggaggtggcggccctgcgggcggcgagctggcggccaacatgttccccatggtcgctggcggtggcgcctgctcccggcctggtctccgctcccacccggtgcgtcacgcgcaaccgaactcgctgccgccgccgccacccccattgtattactaatattctgtaacattaaaattacttgtctttaaatccatcaatagtatttctgattttaaaataacatttgattttaacttcatatttttagtgtaaaaaaaaatcttaggttgacctaagatttgaaatttaaaagtgattagcaaagg

SEQ ID NO: 463765 - DNA, 1432 bp, Homo sapiens
gctctggctggctgcagtgtccatcgctgccaccaaccacaaacagggctgcaaacaggaaggattttattcaccagcagaacgcagctccgccctcgcggtgccaccggcccgcccgcccgggtctctgctgaggagaacattgctctgccttcgctgtatctccgaagtctgtgcagaggagaactcagctccgccctcgcaatgctctccggctccgccctcgcaaaggcacacagcgctggcgccggcgaggcggagaggcggacagcggcggagaggcggccagcggcggcgcggcggagaggcggacagcggcggagaggcggccagcggcggcgcggcggacagcggcggcgcggcggacagcggcggcgcggcggagagacggacagcggcggcgcggcggcgcggcggagagacggacagcggcggagaggcagacagcggcagcgcagcggagaggcggccagcggcggagaggcggacagcggcggagaggcggacagcggcggcgcggcggagagacggacagtggcggagaggcagacagcggcggcgaggcgcggagaggcgctggcgccggctctggcgcggagaggcgcaggcccaggctccactccccagctgtgaaaggcttcaacattgctttatggcatgtgtggtcgtttttcactccattgttgttgtttacccagtttatgggggttgtaatgtttatcacactccttggatgatttccgaagatcaccccatcctgagatctgctgccttacacagtggaggctgttttctgagtgtcggataactctgttattaaataagtgcatattgagaatactcactccagatgcttagaggcatgttgagaaggacaaagatagtgcctcctgtcaggtcacttacatcagaacttgcaggaaacctgctttatacagcagttgacaggtgtggaaattgaagctcatggaaatgaaagttaatacactaaattttcaaggagttaatgaaaactgacatttctgctaaaaacagcatgttctccctgtgggattttaaaggaaggtcaatggtaactgtacaaagaagaaatggacatagtctcattgttagcagtctgaaaatagttgctagcacctccatgcccacgccaatgtctccagcctccttcaagcaccttgctgtgtcttggaaccattgggagccctcacaggaggcccttcgttcctgtatgcatgtggtgccacaagctgctttgggcccggaggaatcctacacatctcagaacacttcctcacctgaccctgtcacccatctctccccttctcatgtgctcagccccttctttgactcttgaattttgagtttttacagatgtttgggagctcttactctgacatgaatttataattgtaatggagactcagacaac

SEQ ID NO: 463766 - DNA, 1752 bp, Homo sapiens
ctgctaaactgtttttcaaagcagctgccccatcttacattcccacctgcgatgtgggagagttctgacttttccacttcctcacccacattgttcttgggcatctttttctgactgtgcccagcctgtcctttggcttcatcgtgccgctgcgatcatgctgttctgctacagattcaccctgcatacgctgtttaaggcccatatggggcagaagcactggaccatgtgggtcatctttgctgttgtcctcattttcctgctctgctggctgccctacaacctggtcctgctggcagacaccctcatgggaacccagatgaccaatgagacctgtgagcgccgcaacgacatcaaccaggccctggatgccactgagattctgggcatccttcacagctacctcaatcccctcatctacgccttcattggccagaagttttgccatggacttctcaagattatagccatacacggcttgatcagcaaggactccctgcccaaagacagcaggccttcctttgttggctcttcttcagggcacacttccactactctctaagacctcttgcctaagtgcagtcccgtggggttcctcccttctcttcacagtcacattccaagcctcatgtccactagctcttcttggtctcagtgtcagtgcagcccccactgtggtcgcaggaagcagaggaggccacgttcttactagtttcccttgcatgatttagaaagcctgccctggtacctcaccccttgccataattactacatcacttgctggagctctgtccctcctgcccttgagctcatggcactctatgttctaagaagtgaaaatctacactccagtgagacagctctgcatactcattaggatggttaatgtcagaagaaagaaaatcataaaatagaaggtgtccacaaaggtgcagagaaagtggaattctcgggcatcgtgagcgggaatgtaaaatgttgtggccactgcggaagacagtatggcatctttcctcaaaacatcagacatagaattaccacatgatcctgcaattccacttgtagtaattgacccacaagaagtgaaagcagggacttgaacacatatttgtacaccaatattcatagctgcttattcataagacccaaaaggcagaaacaacccaaatgttcatcaatgaatgaatgaatgaatggctaaacaagatgtgatgtgtacaatgttcatcaatgaatgcatggctaagcaaaatgtgatatgtacataacgaagtatccttcagcctgaaagaggaatgaagtactcatacttgttacaacacggacgaaccttgaaaacttcatgctaagtgaaataagccagacataaacagataaatagtttatgattccacttacatgaggtactgagagtgaacaaattcacagagacagaaagcagaacagtgattaccagggactgaggggaggggagtatggggagtgatggtttaatgggcacagagtttatgtttgggatgttgaaaaagttgtaaagataaacagtagtgatagttgtacaataatgtctgagtacttaatgccactaaactgtacacttaaatgtctaaaatggtaaaattttatgtatattttacctcaattaaaaagaaaacaccttggcccccaaaggtacttttgccaaagaaccaaggctgaaatttcttgctaaatgagataattaaatgtctttcattgcttaaaacacttttg

SEQ ID NO: 463767 - DNA, 947 bp, Homo sapiens
ctgctaaactgtttttcaaagcagctgccccatcttacattcccacctgcgatgtgggagagttctgacttttccacttcctcacccacattgttcttgggcatctttttctgactgtgcccagcctgtcctttggcttcatcgtgccgctgcgatcatgctgttctgctacagattcaccctgcatacgctgtttaaggcccatatggggcagaagcactggaccatgtgggtcatctttgctgttgtcctcattttcctgctctgctggctgccctacaacctggtcctgctggcagacaccctcatgggaacccagatgaccaatgagacctgtgagcgccgcaacgacatcaaccaggccctggatgccactgagattctgggcatccttcacagctacctcaatcccctcatctacgccttcattggccagaagttttgccatggacttctcaagattatagccatacacggcttgatcagcaaggactccctgcccaaagacagcaggccttcctttgttggctcttcttcagggcacacttccactactctctaagacctcttgcctaagtgcagtcccgtggggttcctcccttctcttcacagtcacattccaagcctcatgtccactagctcttcttggtctcagtgtcagtgcagcccccactgtggtcgcaggaagcagaggaggccacgttcttactagtttcccttgcatgatttagaaagcctgccctggtacctcaccccttgccataattactacatcacttgctggagctctgtccctcctgcccttgagctcatggcactctatgttctaagaagtgaaaatctacactccagtgagacagctctgcatactcattaggatggttaatgtcagaagaaagaaaatcaggctggccaacggggtgaaaccctgtctctactaaaaatac

SEQ ID NO: 463768 - DNA, 1861 bp, Homo sapiens
tgcgcatgcgcacccgcgtcccgctgctgtttagccgtttccaaggctacgaagcccatcggccggggataagagagcaagaaaatgaagctcaagagcctcctgctccggtattacccgccagtctttggtgagccaaatcatatgcaagtttccaagatactactgaatagcaggaattatgttggaatatgaaaaacatggagaattaaagactaagtccatagatttgcttgatcttggtcccagcactgatgtcagtgcgttagtagaagaaatccagaaggcagaacctctactcacagcttcacgaacagagcaagtcaaacttttgatacagaggttgcaagagaaactcggccagaacagcaatcacacgttctatctttttaaggttctcaaagcacatatattgccactgactaatgttgcacttaacaaatcgggctcatgctttatcacaggaagctatgatcggacgtgcaagctctgggacactgcgtctggagaggagctgaacacgctggagggccacaggaatgtggtttatgccatagcattcaacaatccttacggtgacaaaatcgccactgggtcctttgataaaacttgtaaactctggagtgtggaaacaggaaaatgttaccataccttcaggggtcatacagcagaaatagtgtgtttatcatttaaccctcaaagcacattggtggcgactggaagtatggacacaacagccaaattgtgggacattcagaatggcgaggaagtttacaccttaagaggacattctgccgaaatcatctccttgtcatttaacacctcaggagacagaatcatcacggggtcttttgatcataccgttgtagtgtgggacgctgatactggaaggaaggtaaatatcttaattggtcattgtgctgagattagcagtgcctcattcaattgggattgctctctaatattaactggctctatggacaaaacctgcaagctgtgggatgctacaaatggaaaatgtgtggcaaccttaacaggccatgatgatgaaatactagacagctgctttgattacactggaaagcttattgcaactgcttcagctgatggaacagcaagaattttcagtgctgccacaagaaaatgcattgccaaactggaaggtcatgaaggtgaaatttcaaagatttctttcaaccctcaagggaaccatcttctaactggcagctctgacaaaacggctagaatctgggatgctcagactggccagtgcctccaggttcttgaggggcacactgatgaaatcttttcatgtgctttcaactataaaggcaacatagtcattacaggcagcaaggataatacctgtaggatatggcgttgactgaaggaagctggtcagtgagcaaccttgctagcaatggtaatcaagaactggaacttcacagacagcagctctcttaatatttcttatactttctctttttctgcaagtcaactatttctacaactgtccttcatttcacagatatgaccattaaacatgacaaagttatgccactccaatattattatttgatggcgatggcaggacacagcataatgtttggctaatgccaccagttatttcagttgtgtttgttttttaaaagcattatgatactgaaaaaggagaccagaacaacttaacaacgtgtctcctggattttactttgaagcctattgttataatttctgttgaataaagtgtttggaggaaattccttgtacatgtgtatttatgatgtatgtttttagggtgaagtaagggaaataatgcggatctcatttaatggcaaatatcttctgtattgatacattg

SEQ ID NO: 463769 - DNA, 1809 bp, Homo sapiens
tgcgcatgcgcacccgcgtcccgctgctgtttagccgtttccaaggctacgaagcccatcggccggggataagagagcaagaaaatgaagctcaagagcctcctgctccggtattacccgccaggaattatgttggaatatgaaaaacatggagaattaaagactaagtccatagatttgcttgatcttggtcccagcactgatgtcagtgcgttagtagaagaaatccagaaggcagaacctctactcacagcttcacgaacagagcaagtcaaacttttgatacagaggttgcaagagaaactcggccagaacagcaatcacacgttctatctttttaaggttctcaaagcacatatattgccactgactaatgttgcacttaacaaatcgggctcatgctttatcacaggaagctatgatcggacgtgcaagctctgggacactgcgtctggagaggagctgaacacgctggagggccacaggaatgtggtttatgccatagcattcaacaatccttacggtgacaaaatcgccactgggtcctttgataaaacttgtaaactctggagtgtggaaacaggaaaatgttaccataccttcaggggtcatacagcagaaatagtgtgtttatcatttaaccctcaaagcacattggtggcgactggaagtatggacacaacagccaaattgtgggacattcagaatggcgaggaagtttacaccttaagaggacattctgccgaaatcatctccttgtcatttaacacctcaggagacagaatcatcacggggtcttttgatcataccgttgtagtgtgggacgctgatactggaaggaaggtaaatatcttaattggtcattgtgctgagattagcagtgcctcattcaattgggattgctctctaatattaactggctctatggacaaaacctgcaagctgtgggatgctacaaatggaaaatgtgtggcaaccttaacaggccatgatgatgaaatactagacagctgctttgattacactggaaagcttattgcaactgcttcagctgatggaacagcaagaattttcagtgctgccacaagaaaatgcattgccaaactggaaggtcatgaaggtgaaatttcaaagatttctttcaaccctcaagggaaccatcttctaactggcagctctgacaaaacggctagaatctgggatgctcagactggccagtgcctccaggttcttgaggggcacactgatgaaatcttttcatgtgctttcaactataaaggcaacatagtcattacaggcagcaaggataatacctgtaggatatggcgttgactgaaggaagctggtcagtgagcaaccttgctagcaatggtaatcaagaactggaacttcacagacagcagctctcttaatatttcttatactttctctttttctgcaagtcaactatttctacaactgtccttcatttcacagatatgaccattaaacatgacaaagttatgccactccaatattattatttgatggcgatggcaggacacagcataatgtttggctaatgccaccagttatttcagttgtgtttgttttttaaaagcattatgatactgaaaaaggagaccagaacaacttaacaacgtgtctcctggattttactttgaagcctattgttataatttctgttgaataaagtgtttggaggaaattccttgtacatgtgtatttatgatgtatgtttttagggtgaagtaagggaaataatgcggatctcatttaatggcaaatatcttctgtattgatacattg

SEQ ID NO: 463770 - DNA, 778 bp, Homo sapiens
ctgtgtcatctgctgtcaacaatatggaacagcaagaattttcagtgctgccacaagaaaatgcattgccaaactggaaggtcatgaaggtgaaatttcaaagatttctttcaaccctcaagggaaccatcttctaactggcagctctgacaaaacggctagaatctgggatgctcagactggccagtgcctccaggttcttgaggggcacactgatgaaatcttttcatgtgctttcaactataaaggcaacatagtcattacaggcagcaaggataatacctgtaggatatggcgttgactgaaggaagctggtcagtgagcaaccttgctagcaatggtaatcaagaactggaacttcacagacagcagctctcttaatatttcttatactttctctttttctgcaagtcaactatttctacaactgtccttcatttcacagatatgaccattaaacatgacaaagttatgccactccaatattattatttgatggcgatggcaggacacagcataatgtttggctaatgccaccagttatttcagttgtgtttgttttttaaaagcattatgatactgaaaaaggagaccagaacaacttaacaacgtgtctcctggattttactttgaagcctattgttataatttctgttgaataaagtgtttggaggaaattccttgtacatgtgtatttatgatgtatgtttttagggtgaagtaagggaaataatgcggatctcatttaatggcaaatatcttctgtattgatacattg

SEQ ID NO: 463771 - DNA, 2793 bp, Homo sapiens
gggaggagaagcgcgggttcctggctctccacgcgcactgctttaatcagacccgtgcagcctcgagctggagtggccagctgggcctggagcaatgcgagcgggccccagggagcgacagcggcgttggcgcagcggccgaaggagccccggccgggaagtgtggatgcgtctctcccgaggccgggccgcctcgcccgctctagtccagcggagcccgagcgcctcggaccaatccccagtgattatgcaagacagcggaccaatcagctccgccagctcatgaatatttatgaccttcgctgagtcaaagctttgaaccgagtttggggagctcagcagcatcatgcttagacttttcaaagagacaaactccattttcttatgaatggaaagtgaaaacccctgttccgcttaaattgggttccttcctgtcctgagaaacatagagacccccaaaagggaagcagaggagagaaagtcccacacccagaccccgcgagaagagatgaccatgaccaccatgccagaaagtctcaacagccccgtgtcgggcaaggcggtgtttatggagtttgggccgcccaaccagcaaatgtctccttctcccatgtcccacgggcactactccatgcactgtttacactcggcgggccattcgcagcccgacggcgcctacagctcagcctcgtccttctcccgaccgctgggctacccctacgtcaactcggtcagcagccacgcatccagcccctacatcagttcggtgcagtcctacccgggcagcgccagcctcgcccagagccgcctggaggacccaggggcggactcggagaagagcacggtggtggaaggcggtgaagtgcgcttcaatggcaagggaaaaaagatccgtaaacccaggacgatttattccagtttgcagttgcaggctttgaaccggaggttccagcaaactcagtacctagctctgccggagagggcggagctcgcggcctctttgggactcacacagactcaggtcaagatctggttccaaaacaagcgatccaagttcaagaagctgatgaagcagggtggggcggctctggagggtagtgcgttggccaacggtcgggccctgtctgctggctccccacccgtgccgcccggctggaaccctaactcttcatccgggaagggctcaggaggaaacgcgggctcctatatccccagctacacatcgtggtacccttcagcgcaccaagaagctatgcagcaaccccaacttatgtgaggttgcccgcccgtctccttcttgtctccccggcccaggtccctcccgcctccaggtccatccatcccgtccggaaaagaaggacccagagggaagaaggaacagtggaggcgggacgccctccatctcctcggagccccgcgaggtccggcccagcaacttcccggcatccgcgctctagcctgaaccctggcctgggccgagcagtggcagcagagagtggcctcggagggaagccactgccacctgagacagcccaagcagcaagataaacccgctccacccgacccgccgaccttcagctttgtgggactatcaggaaaaaacaaaacaaaaacaaaatgtagaaaaagcaaaagctcttttctgtcctgtcagtctcctgtctccttttgctctgtctgtgcgctggtaaagtccaggtcctcatccgtccgctgtcctcattctgcagcctcagcaaaaagccacaagatctgagcggcccgggtcctgccgggctgaccatctccggatcctgggacactctgcctgaccatctgtgtagctggtgtgggaatctgggggcattggagggagggggttttatttattgagaaatggacttcgcctgaggctgtttgccaattcagggttctgctgggcgcaaggaacgcactgttcaaacgcactgtttactttaagcgcacggggagaaacgaataaggaggacgtggtgatttttaatttatacagtaacttttgtacttctctggtatggagagtttggagccgaatgatttgcattttttacatgtccgacattatttaataaataatttttaaaagaaaagaacgataaatgaagccaacatgattttctcatttcgggaggaactctgttgcttcgcctggacaagaaggaaaatgctgatttcctccttgggtagaaagagggagcgagggcaaatggggagtagagagaaaacaggcgagaacaagcactctaatttcagtgggctttaaaataagacaaaatcagctttacaacaatccctagaggctcgaccacagaataatgccagtcaccaccctgaacgcacaatctccagtgcaggatctaatgactgtacatattattgttattattattattgttattattgttgttctgtaaacatgttgcacaagcttagcctttttgcgttctgttgtgtgtggctgtaaaaccccatgctttgtgaaatgagaatcttgacatttttcttgtgaaatttggaaaatgtgatcaattgaaatcaactgtgttttgtgttctctatgtcaaagtttagttttatattgagaatgttaacttattgctttgtatcttgggaaaaaaactttgtaaataagttataaagtttctttgagacagtaaaattatgatttcttgaaagaactgctctcttgtgctgtgtgaggctgtgccaggggtccaggccaggttcccgcctctggagacagttcatacagggtcagcgacttatcaacttatc

SEQ ID NO: 463772 - DNA, 679 bp, Homo sapiens
ggcgggaggccgatgagccgcgggccgcaggggccccggcgcagacgccgcagcccattgtgcttcctgcccggcgcgctctgttgcagaggagccccggccgggaagtgtggatgcgtctctcccgaggccgggccgcctcgcccgctctagtccagcggagcccgagcgcctcggaccaatccccagtgattatgcaagacagcggaccaatcagctccgccagctcatgaatatttatgaccttcgctgagtcaaagctttgaaccgagtttggggagctcagcagcatcatgcttagacttttcaaagagacaaactccattttcttatgaatggaaagtgaaaacccctgttccgcttaaattgggttccttcctgtcctgagaaacatagagacccccaaaagggaagcagaggagagaaagtcccacacccagaccccgcgagaagagatgaccatgaccaccatgccagaaagtctcaacagccccgtgtcgggcaaggcggtgtttatggagtttgggccgcccaaccagcaaatgtctccttctcccatgtcccacgggcactactccatgcactgtttacactcggcgggccattcgcagcccgacggcgcctacagctcagcctcgtccttctcccgaccgctgggctacccctacgtcaactcggt

SEQ ID NO: 463773 - DNA, 2690 bp, Homo sapiens
gggaggagaagcgcgggttcctggctctccacgcgcactgctttaatcagacccgtgcagcctcgagctggagtggccagctgggcctggagcaatgcgagcgggccccagggagcgacagcggcgttggcgcagcggccgaaggagccccggccgggaagtgtggatgcgtctctcccgaggccgggccgcctcgcccgctctagtccagcggagcccgagcgcctcggaccaatccccagtgattatgcaagacagcggaccaatcagctccgccagctcatgaatatttatgaccttcgctgagtcaaagctttgaaccgagtttggggagctcagcagcatcatgcttagacttttcaaagagacaaactccattttcttatgaatggaaagtgaaaacccctgttccgcttaaattgggttccttcctgtcctgagaaacatagagacccccaaaagggaagcagaggagagaaagtcccacacccagaccccgcgagaagagatgaccatgaccaccatgccagaaagtctcaacagccccgtgtcgggcaaggcggtgtttatggagtttgggccgcccaaccagcaaatgtctccttctcccatgtcccacgggcactactccatgcactgtttacactcggcgggccattcgcagcccgacggcgcctacagctcagcctcgtccttctcccgaccgctgggctacccctacgtcaactcggtcagcagccacgcatccagcccctacatcagttcggtgcagtcctacccgggcagcgccagcctcgcccagagccgcctggaggacccaggggcggactcggagaagagcacggtggtggaaggcggtgaagtgcgcttcaatggcaagggaaaaaagatccgtaaacccaggacgatttattccagtttgcagttgcaggctttgaaccggaggttccagcaaactcagtacctagctctgccggagagggcggagctcgcggcctctttgggactcacacagactcaggtcaagatctggttccaaaacaagcgatccaagttcaagaagctgatgaagcagggtggggcggctctggagggtagtgcgttggccaacggtcgggccctgtctgctggctccccacccgtgccgcccggctggaaccctaactcttcatccgggaagggctcaggaggaaacgcgggctcctatatccccagctacacatcgtggtacccttcagcgcaccaagaagctatgcagcaaccccaacttatgtgaggttgcccgcccgtctccttcttgtctccccggcccaggtccctcccgcctccaggtccatccatcccgtccggaaaagaaggacccagagggaagaaggaacagtggaggcgggacgccctccatctcctcggagccccgcgaggtccggcccagcaacttcccggcatccgcgctctagcctgaaccctggcctgggccgagcagtggcagcagagagtggcctcggagggaagccactgccacctgagacagcccaagcagcaagataaacccgctccacccgacccgccgaccttcagctttgtgggactatcaggaaaaaacaaaacaaaaacaaaatgtagaaaaagcaaaagctcttttctgtcctgtcagtctcctgtctccttttgctctgtctgtgcgctggtaaagtccaggtcctcatccgtccgctgtcctcattctgcagcctcagcaaaaagccacaagatctgagcggcccgggtcctgccgggctgaccatctccggatcctgggacactctgcctgaccatctgtgtagctggtgtgggaatctgggggcattggagggagggggttttatttattgagaaatggacttcgcctgaggctgtttgccaattcagggttctgctgggcgcaaggaacgcactgttcaaacgcactgtttactttaagcgcacggggagaaacgaataaggaggacgtggtgatttttaatttatacagtaacttttgtacttctctggtatggagagtttggagccgaatgatttgcattttttacatgtccgacattatttaataaataatttttaaaagaaaagaacgataaatgaagccaacatgattttctcatttcgggaggaactctgttgcttcgcctggacaagaaggaaaatgctgatttcctccttgggtagaaagagggagcgagggcaaatggggagtagagagaaaacaggcgagaacaagcactctaatttcagtgggctttaaaataagacaaaatcagctttacaacaatccctagaggctcgaccacagaataatgccagtcaccaccctgaacgcacaatctccagtgcaggatctaatgactgtacatattattgttattattattattgttattattgttgttctgtaaacatgttgcacaagcttagcctttttgcgttctgttgtgtgtggctgtaaaaccccatgctttgtgaaatgagaatcttgacatttttcttgtgaaatttggaaaatgtgatcaattgaaatcaactgtgttttgtgttctctatgtcaaagtttagttttatattgagaatgttaacttattgctttgtatcttgggaaaaaaactttgtaaataagttataaagtttctttgagacagtaaaattatgatttcttg

SEQ ID NO: 463774 - DNA, 1251 bp, Homo sapiens
ccccaatcgggctcctccggccaggtgggtatgccatgagctttcctccgccctccagagctgaagcttggactgtctcaagctctatgaagctgcaggacttgacttcaatggagtgggccatccacacagccaggattcttcccctgctaatacagcagcagtgggaccgccttgcagtaggcacagcggagatgtgccctgccaggtccccagggggttctcagagaggctgtgagcaggtggctacagctgctggcagttcacacacagtcctcctcatgctcagagaccaaagggagaagagtgggaaacgagtggaacagggccaaaccatcatgacctggataacaattcctaaaacctgtcgaaggcgtcccaggggagtggggagagcatggttctcatcagcctacgaactacatggccttgccaagtttctcaaccccgggatttctcgggtggacatcaattaccaggattctgattagaacaagcaaacaaaccaggcaatggaaagaaacaaagcaaatgaatttcaatttagtcatctgaaatgatgccaagaaactagcagctttcttaagactaccttcctagtaaaaagtgaattatgttgcttaaatcagttgctttagttaatcatttaaaatctatcaaacaggaattctgagtggtttatatgtgcaggttctgacaatcagaaacgtttgttctaacttgtaaacatttatcaaagtaaggccttgtgtctccaaaaaaaaaaaaaaaaaaaaaaaaaaaaagccggggggtggggggtggggtgactttgatttgctgtcttcttagaccacctcctcatttatctagagcctccaacattttttctgatttgtactcatttatcctttctttccctttcatactgtctatctaaagagcattttaaaacaatctctgccttctatttttaaaaatgacaagtttacaagacctaagaattatgggctatgctttttttcttctttttgaaatggagtctcactctgtccccaggctggagtgcagtggagcgatctcagctaactgcaacctctgcctcccgagttcaagagattctcctgcctcaccctcccgagtagctgggattacagatactccactttaaggacagtccacattttgtttttccattaaccagctgatggatatctcagttgtttccagttttttaactcttacaaataaagctgctatgaacacgcatgt

SEQ ID NO: 463775 - DNA, 1636 bp, Homo sapiens
ccccaatcgggctcctccggccaggtgggtatgccatgagctttcctccgccctccagagctgaagcttggactgtctcaagctctatgaagctgcaggacttgacttcaatggagtgggccatccacacagccaggattcttcccctgctaatacagcagcagtgggaccgccttgcagtaggcacagcggagatgtgccctgccaggtccccagggggttctcagagaggctgtgagcaggtggctacagctgctggcagttcacacacagtcctcctcatgctcagagaccaaagggagaagagtgggaaacgagtggaacagggccaaaccatcatgacctggataacaattcctaaaacctgtcgaaggcgtcccaggggagtggggagagcatggttctcatcagcctacgaactacatggccttgccaagtttctcaaccccgggatttctcgggtggacatcaattaccaggattctgattagaacaagcaaacaaaccaggcaatggaaagaaacaaagcaaatgaatttcaatttagtcatctgaaatgatgccaagaaactagcagctttcttaagactaccttcctagtaaaaagtgaattatgttgcttaaatcagttgctttagttaatcatttaaaatctatcaaacaggaattctgagtggtttatatgtgcaggttctgacaatcagaaacgtttgttctaacttgtaaacatttatcaaagtaaggccttgtgtctccaaaaaaaaaaaaaaaaaaaaaaaaaaaaagccggggggtggggggtggggtgactttgatttgctgtcttcttagaccacctcctcatttatctagagcctccaacattttttctgatttgtactcatttatcctttctttccctttcatactgtctatctaaagagcattttaaaacaatctctgccttctatttttaaaaatgacaagtttacaagacctaagaattatgggctatgctttttttcttctttttgaaatggagtctcactctgtccccaggctggagtgcagtggagcgatctcagctaactgcaacctctgcctcccgagttcaagagattctcctgcctcaccctcccgagtagctgggattacagatactccactttaaggacagtccacattttgtttttccattaaccagctgatggatatctcagttgtttccagttttttaactcttacaaataaagctgctatgaacacgcatgtgtgccatttctgcacgtcgtctccagactccacacgggaaagctcttataggttttatagttttagcttttatatttaggtctacgacccttttaagcgaggctcatttttttctctatatggaaacctagtcgttttagcatggtttgttgaaaagattttcctttctccattaaattgccttgtcaaaaacgaattgaccatgtatgtatgggtctatttctggactttatcctactctactgatttatatgtccagctcttctccaacaccacactgtcttgtagctttactgcaagccttaaaatcagctaatacaagaatctcaactttgttctttttaaaaattggtttgactattttggattgtttacattttcagag

SEQ ID NO: 463776 - DNA, 804 bp, Homo sapiens
cctggggtttgatgcctccctgcccagagcccttgctatagcatatgctggtgagggccgaggctctagctcacactccagaccggggtagggatccaatctggctttgaagacatcatgcagagcctctgctctggagatgggaacctgcagacaaatgcctccttatctcaatcctctgaaaacagtttgaccagggagacagcgttcactcatgaatttaagaaaaaaaaaatccctgatccctactttttgccaacttcaatgctgatttctagtggtaccaagaaaaatgcaactgagcctccatcctcaaggggctcacagtcttgtgtggagataaaaaatccaagtcctgtgaccggggtcctgcccaagggtcctgcttccctaggcatcccagaagttcagcctgcatctcgaccagagcctgagagtagacacctgccggtttatctgtcccttcatgtagcaggtgacagaggtgccaggggcatggcaggggtactctgacacagcactgccccacggagcccatgtcccagggcagaagacccacgatgcacagccagccaggtggcctcatccgatcagtcaaaggcctcaatagaaccaagactgacctctgccaaagagagaattctttcagcagacggccttcggacttgagctatgacggcaactcttccccgggcccacctgacggactgggtttctcagcctccacagtcgtgtgagccaattccgtaagataaatctctctctcttctctctcaatctctctctcaatctctctctctctcc

SEQ ID NO: 463777 - DNA, 762 bp, Homo sapiens
ttgccctgaagagcttgccctggataccacaaatatgctgccgtcgggagctctgtattaccagccatggtcaaccccaccgtgttcttccacatctctgtcgacggtgagtccttgggccgcatctcttttgagctgtttgcagacaagtttccaaagacagcagaaaacttttgtgctctgaatactggagagaaaggatttggttacaagggttgctgctttcacagaattattccagggtttatgtgtcatggtggtgacttcacacaccataatggcactggtggcaagtcaatctacggggagaaagttgatgatgacaacttcatcctgaagcatacaggtcctggcatattgtccatggcaaatgctggacccaacacaaatggttcccagtttttcatctgcactgccaagtctgagtggttggatagcaagcatgtggtcattggcaaggtgaaagaaggcatgaatattgtggaggccatggagcactttgggtccaggaatggcaagaccagcaagaaggtcaccattcctgactttggacaactcgaataagtttgacttgtgttttatcttaaccactggaccattccttctgcagctcaggagagcagccctccaccccatctgctcgcagtattctagaatctttgtgctctcgctgcagttccctttgggttccatgttttccttgttcccttccatgcctagttagatggcagagttaagtttgtgattatgaaatgaaaacta

SEQ ID NO: 463778 - DNA, 1486 bp, Homo sapiens
ccgtaaatgtatgaccccattaatgaagggaaagccggctccccaccagccgtttccaaggcaacccacaggctggacaagcaccgtctcttctgtttcccattatggagatcgcctctacagcccataagaggagagcaagcatggtcagaaactctttctcccagtgttgcccgcacagttcgcaaatgcaaagctgtgagcagggatgcttatagctccaagctacgcggttggaactatcagagcatttgtgcatgctggctattactggctgtgtgcacaaggagtggaaacactacagtgaactgcacttgcaagggatctaggttgtgtgctccttatgagaatctaatgcctgatgatctgaggtggaacagtttcatctgggaaccaaccctcaacccctgcattcatgaaaaaactgtcttctaggaaatcagttgctggtgccaaaaaggttggggaccactatcctagagggtctagggagctcttaatatggaccactgaagatggacaacatttagccagtcctgatccagggggtgatgaaatcaatcttctgagttgtgaccagacttccttagaatgaaataaaataaagtacaatagaagaaaagagagtgaaagagaaaatactagagtgtggtgcaagattgtgtgcgtgtgtgtgtgtgtgagtgtgtgtgtgtgtgtgtgtgtgcgagagagagaaatatttgtttgcatttgtggacagtaggttaaaatgtaaatgtgaaatgtgtcctagtctggatatgtcaaaatgagtttataatccaatgttctagaacacatggaggctaactccaaacgttaacaatgacaacaaggcagtcagagccctggagagagatgcactcctcaacattgcctgttgctgaagattcagaactagcagcaacaccaaaacaaaaagatcaagctggggtgacattgtaacgagaacttctcagctggagttaattgatttgaacaattcaagtccaccaggcaaatcagcccaggacagcttaccacgctggccgagttaatttttttttcacatagtttttgaacggctgcgatgttaagaggagaccaaaggctgtgagatggagaaaatagaattcactgaatgtcaagggacttgcccagggacacacagtgttgtgctttctccattacacagtcacctaattgaagattggccccaaatcttatttatcttggtgtcctattggctaatggccatgcctcacacataataagtattgagaaaatgattgttgattaaatgaatgaaggtaaattatgttaatcagtctgtgaacatatttaatatagaagtcaactaagatcaaattattagaggtacattaaaaatgcaaaaggaagagaaatagaatttattggtttgatatttcatatcagcttggactagaagaacactaagatttgttctgaatcagaaagtctatgg

SEQ ID NO: 463779 - DNA, 1721 bp, Homo sapiens
cgtggcagtgcttgtgtgtcggggctctgaggctccggcctgacctctcctcggggtcgacgggaaggtctccggatgccaggactcgcaaagggccgaccagaatgaggaaatcccaggcggagtccgggggaggcagcacggcatcccagcctcagggctgcccggacggtgttggttggggtaagattggggaagatgccaggtgatagaatccaccctgcctctgacagcatccaatctggagcaaaggcttctttcaaccttcccccaagctcccaatacaagcccaaattctggaacaagtcctttccaacacctccttcagagaagctccctggctccaggcagtgcttgctcccctcactgcagcaggaagcctaacttgcgaactgcaggtgtgctccaggtggtcactggatgcaagaaatggtgcgagaactttggatgtggaacgtggaggaggaggaacacgaagtggggatctgcacttggggtggtcagcactgcggatgcccagcaaagtcactgcctggtccacatcccggaggggtctctgcgcctcagtcggcatcgcagctgatggtgaaacttttggtgtggcagaagagtgtccacaaacttcggaaggtatccgctacatcctccatagccgtgtatccctgcccagggcaatcttctgggggagcggaaagtcctgctcccgggccagggctggctggctggagccacttgtgcggcgcagccctggcggaggttcaggcggccccggtgtcgcaagcggctgtgagtgatgcctccctggggccggagtggtcccaggaaggctgcagaccagggctgaccagcgggcagcatggtggccgcgatggaaggtgacggggttcgcagcgccaggggacccagcagagcccgagcccgggcatcccgcatctccagcagcatcgcaggtaggcctggtgctggtgaagtggcggccagtgcacaaggcctacgacccagtcccagaggccagcccattgtcagctaacttcaggaaccccgggccagctgaggccccgggccccatgggcaagacaaagggcagagggtccgcaggcggggccgagtgcaggcagtgcaggcctggctccaccgccgcggagctcgcagggcgcagcaggcatcgggcagtgaccagggcttccagaggaggctgtgcacccctgcaaaggctcctgccctgcgtccagcctatccgcggggactccacgtgcaccccctcctcattgtccttgtctagggccgcggcggcaaggtccttgctcccatggcgtgactccagggtgcaggagcctgggctgagcaggtggagtagggtgagctccgccaagaacccagcgagagtggcgccccagggcggcacaggaggccgcatttaacatgtcaatcatctgaaagattttatggcatcttttttttgacatcttataatatctataatgtttattatatcttgtgatataattattaacaccacttcagtgtgattattatgattatttttataccaacacatcttcaattattaatattcccagttgctagagaaaactgaaaactactagttttgaaagcctcacttctgccaatggaagcacattccagcatgtcgccaacgcaatccactttccaccactttcacaaaaaacgttactgcacaattatactatcctaccctt

SEQ ID NO: 463780 - DNA, 1238 bp, Homo sapiens
cgtggcagtgcttgtgtgtcggggctctgaggctccggcctgacctctcctcggggtcgacgggaaggtctccggatgccaggactcgcaaagggccgaccagaatgaggaaatcccaggcggagtccgggggaggcagcacggcatcccagcctcagggctgcccggacggtgttggttggggtaagattggggaagatgccaggtgatagaatccaccctgcctctgacagcatccaatctggagcaaaggcttctttcaaccttcccccaagctcccaatacaagcccaaattctggaacaagtcctttccaacacctccttcagagaagctccctggctccaggcagtgcttgctcccctcactgcagcaggaagcctaacttgcgaactgcaggtgtgctccaggtggtcactggatgcaaggtattgacagatggatcccattgatacccccactgcataaccatgtaagcctatcatcccccacttgcacatgaggaaacggaggtccacagggtggggaagggaagacataatttgtccttcaaatgcgataccggtgagatgtctctctatcccaaagcctgatgtgatttccttactggagcaagggaaagagtcctgcatggtttcaagggacgtaccaggaggatggtgcccaggtgtcctcaaggtggtgtgcaagtgggttgtggctttgagtggcaggcgccaatgggatgtacctctgggctgtgagaggctggtggagttgggacctccagacctagagattatgggcacagaaacctattactgccagacgctgaggcgttgccatgggatccaagggtgtttcgggtcagctcagagcctttctcagataattgtttcggtaactggggagctgctgtccagcacacgcccctatgaaggcttaatgtgccctcagattcctaagcctgtgactttgagtatcggtgtcttccttgcaatgtttcaatctgaggttcttggggagagtgcagaattggagcccgatggaagcctgatggggagagggttgggtggagggcacatggagaatgtgtcaggcctgtgcatccctcatctacaaaatgggaataataagaatatctgacaattagacgtgtagaaaatatatgtaaaggcctttgaaaagagcttgtgaaagctcaataattgtccccaataattgctctcaataattgtcagctatcattccataataagc

SEQ ID NO: 463781 - DNA, 692 bp, Homo sapiens
gggagtccggagtacttggccaggctggccccgagcggaactggagaaagctgaggctctaaccatggaatactgggaatgtccctttctgtgaaggaggtttgtcagccacaacaggaatattcatgaacatgaaggggttgggcatgttccaggatctgtctatcgacttctctcaggaggaatgggagggcctggacactgctcagaaggacttatagagagatgtaatgatggagaactatagcagcctggtctcactaggtctctctatcccaaagcctgatgtgatttccttactggagcaagggaaagagtcctgcatggtttcaagggacgtaccaggaggatggtgcccagttttcctttaatgcagccatttcatgcatcaatggatattcattcagcactcttttttttttttgggatacagagtctcactctgtagcccgggctggagtgcaggggtgtgatcttgtctcactggaagccaataagaaacgctgtggggatgacctccctacaagcacggaaaaccattcctgcgcatttctgcgcgtggaacgcctacctttagtgccgtttcctgcgctttcttgcagatttgtatcaggcctgagaacctcccacctggtccatgcccggctcccggtgagcaccgagacccaaccttgtgcacagccagtcttgtc

SEQ ID NO: 463782 - DNA, 1737 bp, Homo sapiens
tgcttgtgtgtcggagctctgaggctccggcctgacctctcctcggggtcgacgggaacgtctccggatgccaggactcgcaaagggctgacaagaatgaggaaatcccaggcggagtccgggggaggcagcacggcatcccagcctcagggctgcccggacggtgttggttggggtaagattggggaagatgccaggtgatagaatccaccctgcctctgacagcatccaatctggagcaaaggcttctttcaaccttcccccaagctcccaatacaagcccaaattctggaacaagtcctttccaacacctccttcagagaagctccctggctccaggcagtgcttgctcccctcactgcagcaggaagcctaacttgcgaactgcaggtgtgctccaggtggtcactggatgcaagtttcttttgatttctcctgcttagaaatggtgcgagaactttggatgtggaacgtggaggaggaggaacacgaagtggggatctgcacttggggtggtcagcactgcggatgcccagcaaagtcactgcctggtccacatcccggaggggtctctgcgcctcagtcggcatcgcagctgatggtgaaacttttggtgtggcagaagagtgtccacaaacttcggaaggtatccgctacatcctccatagccgtgtatccctgcccagggcaatcttctgggggagcggaaagtcctgctcccgggccagggctggctggctggagccacttgtgcggcgcagccctggcggaggttcaggcggccccggtgtcgcaagcggctgtgagtgatgcctccctggggccggagtggtcccaggaaggctgcagaccagggctgaccagcgggcagcatggtggccgcgatggaaggtgacggggttcgcagcgccaggggacccagcagagcccgagcccgggcatcccgcatctccagcagcatcgcaggtaggcctggtgctggtgaagtggcggccagtgcacaaggcctacgacccagtcccagaggccagcccattgtcagctaacttcaggaaccccgggccagctgaggccccgggccccatgggcaagacaaagggcagagggtccgcaggcggggccgagtgcaggcagtgcaggcctggctccaccgccgcggagctcgcagggcgcagcaggcatcgggcagtgaccagggcttccagaggaggctgtgcacccctgcaaaggctcctgccctgcgtccagcctatccgcggggactccacgtgcaccccctcctcattgtccttgtctagggccgcggcggcaaggtccttgctcccatggcgtgactccagggtgcaggagcctgggctgagcaggtggagtagggtgagctccgccaagaacccagcgagagtggcgccccagggcggcacaggaggccgcatttaacatgtcaatcatctgaaagattttatggcatcttttttttgacatcttataatatctataatgtttattatatcttgtgatataattattaacaccacttcagtgtgattattatgattatttttataccaacacatcttcaattattaatattcccagttgctagagaaaactgaaaactactagttttgaaagcctcacttctgccaatggaagcacattccagcatgtcgccaacgcaatccactttccaccactttcacaaaaaacgttactgcacaattatactatcctaccctt

SEQ ID NO: 463783 - DNA, 673 bp, Homo sapiens
aggcttggcaaagcaggagccctccttggcagtgcttgggtgtcggggctctgaggctccggcctgacctcttcacggggtcgacgggatcgtctccggatgccaggagtcccaaagggccgaccaggatgaggaaaccccaggcggagtccgggggaagcagcacggcatcccagcctcaggcctgcccggacggtgatggttggggtaagattggggaagatgccaggtgatagaatccaccctgcctctgacagcatccaatctggagcaaaggcttctttcaaccttcccccaagctcccaatacaagcccaaattctggaacaagtcctttccaacacctccttcagagaagctccctggctccaggcagtgcttgctcccctcactgcagcaggaagcctaacttgcgaactgcaggtgtgctccaggtggtcactggatgcaaggtaccactaccagttgttgggcagggagacctcctgctgctgcccatcctatgttgcatcctccaacatgggtgcactgtggttcagccagcacctataccacctgcagcccagggctcctgtggtgggcctgaggttcctccctatcaaatggagatatgctggggttgctgcctttgctgaagcccatgtccaggtcatcttgggggtggccaaggttac

SEQ ID NO: 463784 - DNA, 878 bp, Homo sapiens
aggcttggcaaagcaggagccctccttggcagtgcttgggtgtcggggctctgaggctccggcctgacctcttcacggggtcgacgggatcgtctccggatgccaggagtcccaaagggccgaccaggatgaggaaaccccaggcggagtccgggggaagcagcacggcatcccagcctcaggcctgcccggacggtgatggttggggtaagattggggaagatgccaggtgatagaatccaccctgcctctgacagcatccaatctggagcaaaggcttctttcaaccttcccccaagctcccaatacaagcccaaattctggaacaagtcctttccaacacctccttcagagaagctccctggctccaggcagtgcttgctcccctcactgcagcaggaagcctaacttgcgaactgcaggtgtgctccaggtggtcactggatgcaagaaatggtgcgagaactttggatgtggaacgtggaggaggaggaacacgaagtggggatctgcacttggggtggtcagcactgcggatgcccagcaaagtcactgcctggtccacatcccggaggggtctctgcgcctcagtcggcatcgcagctgatggtgaaacttttggtgtggcagaagagtgtccacaaacttcggaagaacagaaaacgcctacaagttgcgggcccctgtagtgcaacttgtggtcagtctagggagagtggctttggagccaacaccaattgaggaaaatccatctgaggacatgagctcactcaggttctcatctacttccttgggggtttgcccggctcctcagaagtttggaccccatactgtcctgcgggggactctccactgctgcagaactgtctccagaagcg

SEQ ID NO: 463785 - DNA, 825 bp, Homo sapiens
cgtggcagtgcttgtgtgtcggggctctgaggctccggcctgacctctcctcggggtcgacgggaaggtctccggatgccaggactcgcaaagggccgaccagaatgaggaaatcccaggcggagtccgggggaggcagcacggcatcccagcctcagggctgcccggacggtgttggttggggggttgggcatgttccaggatctgtctatcgacttctctcaggaggaatgggagggcctggacactgctcagaaggacttatagagagatgtaatgatggagaactatagcagcctggtctcactaggtctctctatcccaaagcctgatgtgatttccttactggagcaagggaaagagtcctgcatggtttcaagggacgtaccaggaggatggtgcccagatatatatatatggaaaagagaaggtccaagaatatcaaagacattgaagaagaggaaagatttgtcctgccaaatatcagaacttttataaagctacagcaatttaaagaacacgaaagatactgactcaccgcaacacacataagacacaaaactgccggggcatgcaccgcttcccagagacgagcgacgcgcagtacgacggtctcacccactacaccgggcttacccgaacctagcacgagctctgcatatcgcgtaggaccggcaggtggcacgccaacaaagtttacgggcgccgtgctggcatatgccaccggcatagcagccatcagccgcgcccgtcattgttacaccgaggccgacgctgcggcaggaataaactgcggcaagccgttgagccctaccatcgcgcctc

SEQ ID NO: 463786 - DNA, 1840 bp, Homo sapiens
  misc_feature (1)..(1): n is a, c, g, or t
  misc_feature (3)..(4): n is a, c, g, or t
  misc_feature (10)..(10): n is a, c, g, or t
ntnnctcctnagctccatgtagttccagatcctttcctgtgagtggatttggcttggacagaagagggaagacttatgtggaggtgggcgcttggctgccgccaccattgtggccatctggaaagggtgaatcttcgagaggagagcccagtgactgtcgtgcattgcctgggacagcccagacacctaattctgatcagacagaagtccctgatcagatgaaaagaaaaagcaaagattctgtctgtcctgaccgccctgcaggttaagctgccctgcagccagcagagtgcctggcatacgggaggcaccctgtgcagcagccagggctactcgcccaactgggaggaggcggatggtgggtaaaagtgagcactgggccttcctgatgtgaggcgaggatgtggatctgggaggaaagacaaatgaagaagcaggtggacagccccagctgggctccaggtggggcctggggtaaagtgacccttctgcattgctttcctgctctggctgcccctctttctggatgggtaaaagcacttccatgttttcagaggcgtggagggagcccgagaagagcagatgttgacaccaccatcactgcctgcagcagtgagaccaggggcacagtttttgttgaaagggtcgaccaggaagcacttccttgactctgtcctaaagcctctggagagcccttaaatttgtggtccttgaagctattgtaaaggtgaggacacagcgaggagtaggctgtctatgaaccaggaagtgggccctcaccagacacagaatctgccagcacctcaatttggacttcccagactccagaactgcaagaaattaatttctattgctcacaagccacccagtctatggtattctgttacagcagctggagcaaactgagacagtacttgacagtgattttcatgaaggttctcccttgctcatttttaagcccactggttcagacagaagcctctgggagagccctccagagtccaccttgaaggcttcattccttctacccagagcatctccgtggagaggaagaaaaagcatcaatgaaatgaggtgccccagcgggcctgcacccaccaactgttcctagtatcattggttgatgataccatgaacgatgaaccgtggggctggccttctctccagctcagaacacacttgctttagctcaagactgtccaacccaagcccgcaggatgcacgtggcccaggacagctttgaatcctacgttggtcccccactcactcatcctctgggccagtcatttggcacacagtacacgttgtgtttctgtggaagccctatggggagagaatgggttgtgggggccaggatctggaagcttccagtggatgaagaggatgtcagtgctactaccagactcacacccactggctgcccttgcagacctgctgggtgccacagaaccagggcacactgcaaccagagcttccagaaactgggaatgctggaagtatccaggcaagaagccaatagctccagggaccctgtggctctgggatgcaggtggcctctgctcaccaagttcatgctggtagctggggacacagggagcccgacttgctccaagtctcccagccaggctgtaggagagctggattgcaccaaatcagacacaaattccagatggctcaaggacctaagtggaaacgtgaaactttccagtcacgagagaacacctttatgacctcatggtgagaaggagggacttcttggggaagactcaaaaagcacaaaccaagcgacaaaaggctgacacacttgaccacattacaattaagaatttctctctatctt

SEQ ID NO: 463787 - DNA, 1477 bp, Homo sapiens
caaatttttattattagctggctatgaaggaaagaaatgcacttaattgggtaaacagtttatttcttatcttcttttaagctttctgaacgaacagaatttggctagctggttttctacccttgaaagcataaagaagcttggactgtctgaaaatactcttttctgggagtatgttcgtagacaactgaaataaactgcaactcactggtgccaaatatatcacacatcagcccacctcctgccacggtgagcttgtagcagagaaaagaatgttctcaggttcagaaaggggcttccctgctgaggagccatgctctttccacgatgaagaactagagaccgtcttgtgcagtgggctggcagagaggagccacacagtgaagtgtaaattgctcaggatcacaattcagaggacatgggttctcaccttggctctatgactcattttgtgcctttcacccctacaatctctccgaacctcagtctctgaatgaatgaaatgagactgaccaaaccaatctggctaaatataaaggtataacatcctgatcaaacacaggaatttatcagatgtagtataagacagaaagaaaggagacaagaatgatgtcaagtggcctaagcaactggaaagatgaagttgccatcaacccagatggcgaaaggacagactgcctcctcagtgggtccctgaaccctgtgcctcctgaaagggagacacctcccagcaggggtcgacagatacctcaaacaggacacctccagctggcatatggctggtgcccctctgggacgaggcttccagaggaaggagaaagcagcaatctttgctgttctgcagcctccactggtgatactcacgcaaacagggtctggaatggaccccagcaaactccagcagacctgcagaagaggggaccgactggtagaaagaaaactaacaaacagaaagcaatagcaccaacatcaacaaaaaggatgaccacgcaaaaactcactgaaggtcaccaacagcaaagaacaaaggtagataaatccatgaagatgaggaaaactggcaaaaaaaggctgaagatttcagaaaccagaatgcctcctctcctccaaaggatcacaactccttggcagcaagggaaaaaaaactggatggagaatgagtttgataaattgacagaagtaggcttcagaaagtgggtaataacaaactcctccgagttacaggagcatgttctaatccaatgcaaggaagctaagaactttgataaaaggttagaggaattgctaactagaataaccagtttagagaaaaacataaatgacctgatggagctgaaaaacatagcacaagaactttgtgaagcatacacaagtatcaatagctgaattgataaatcagaagaaaggatatcagagattgaagatcaacttaatgaaataaagcgtaaagacaagattagagaaaaaagaatgaaac

SEQ ID NO: 463788 - DNA, 2180 bp, Homo sapiens
aagtggacggaggcagcaggactcatgtgctattaatcattttttaaaaatagacaatatggaactgctgaccttgggccaagtgctgtgtggagtcctggacccaggcaggggtgggacccagggacccagacaggaagtgacagattcctgggagtggacaaaatggaccgcgctgggccacaaagtggatatgggtggcgagaatgaaattggagttgaggtttctggtttggacaagaagaataaacacctgaggaacaagagtcctctgagcagccatgcctgggacagccacactgagagcagccacctgagatgccagagtcccccacgcagccatgcctgggacagccacacccagagcggccacctgagacgccggagtcccccacacagctgtcctcaggacagccacaccgagagcagccacctgagatgccggagtcccccacgcagccgtcctcaggacagtcatgccaagagcagccacctgagacgccagagttgcccatgtagccatgcctggcacaaccgtctcagaaacacatgattaaggggtaacaaaacaacaaacaccatgagaacaaaatgtgaaccatgttgtgaagaaacagtcaaaaactagaaaggatagcaagacaaatgaaaataaaagcggacattttttcacattatactaaagagatggcccgggagtggaaacctgtagattaacaaaaccacctttattattacctgaagtccacttttcttcaaccatggggcttccacgtcacatatggacattttaacagcaagaaaatcacatgtggggtgaaactaaagccccacacagtggtgtcttctcgaaagccaaagacgaggtttcataattgagctccatttcttcttattccctttctcagtgatatttctttttagtaaacattttaaagaatgaaacgtggttctttatcattaagcccccaaaagatcattcagaaagtgagaagaatttgaaaaaacgtgtgtatattttcccctcatgatatttttttcctggaatgtgtacgggaaggtatctcatttatatgtaacttggaggttgtcacaaaagcaggtactgataacctttgctatgtaaagttcaaagtataaaaatgttttaccttctgaataactagttcaaagtgaaaaggaaaaaaatccagggttcgctggtgacatggtttggctgtatgtcctcactcaaatctcatgtcgaattgtaatccccatgtgttggaggagggggccggtgggaggtgattgaatcatgggggtggtcttcccccttgctgttctcgtgatagtgagtgagtgctcccgagatccagttgtttaaaagtgtgtagcacttcccccttcactctctctctcctgctctgccatgtgaaaaagattcttgcttccccttcgcccttctgctatgatttcatatttaaagatggtgtggattgtttacctttatgttttggtaaaaatttatgtgctatcaacaagtttaaacattcacaatagaaacttaaatgtcttcatctccaaggcactgaacattgtcatattaaaagcttaaatatatttactgttatatttattgttacaatagttttaactattggcggcaagatcaatagttgcaacttatatttttgctgatgcttaaaagtgttttaaaagttgatctgccttacaatttatttttatttaactccaagtgttaactctagattgttctgaaacttatatggacttttgaaaatagccagattttatgtgttgtggggacccatttccaaaatctttaaagactttcaatagcttacaacctgtgttcatatattctaaatccagctagtcttctataaaaagttgaatgggagcttttttctcccgtaaagtaatttcatttgtcgggattgttcaggattgctgtgttagttcccaaaacctccagcagtgatgccgcagccccgacacagcagtgacgccgcagccccgacacagcagtaatgccgcagccccgacacaggttgaaatttcttttttaagcacactcaagtggcttaagatctcaagcacttgaaaatgctggaaggcttttaggaatgtttctgtaactttaaaatgtatcaatccccttttgtttctcttttaat

SEQ ID NO: 463789 - DNA, 496 bp, Homo sapiens
ctttaaaagtaaaagataatataacatattttaatacattgtgtgtaatgtacatatgcatattgtctatgtactatatacacattgtttataatattgttattacagtttgtcattcacctgaaaggagaaggaaaagtacgaaaggtttctctgcttgggaaaaggtgaatgttgttatatcaagaacgattacacacatggatctcatacatgtttttagaacattgttcttctgattgaagaagtctgatgctcctgaaaaatcttaaaatatctgacttgtattgaagaaaattatttaattaaatttttaaaggctggttgaaaaagtctgacagttctgagaattttttaaatgtctgaattgtaataaaaaaatggtttactttaaacttctaaaaactaatgaccttgtgactaaagaaaaatcatttgaagtgtattaaaaaatagcaaaacattaaaatcttttctctgtgcaaattttatcaga

SEQ ID NO: 463790 - DNA, 1447 bp, Homo sapiens
tctgcgcgggccatgtggggacccggggtcactgctgagggcctgtcggtggctccggcgccgccgcctctgctgccgctgctgctactgctggcgctggcgctggtggcgccctcgcggggcggcgggggctgcgctgagctggcgtgcggcgagcgggagcgctgctgcgacgcgaccaacgccacggcggtgcgctgctgcaagctgccgctgcacgccttcctggacaacgtgggctggttcgtccgcaagctctccgggctgctcatcctgctggtgctcttcgccatcggctatttcctgcagcgcatcatctgccccagtccacgcaggtacccgcgcggccaggcgcgcccgggacagcggcccgggcctccggggggcgccggaccgctggggggcgcggggccgcccgacgacgacgacgactcgcccgctctgctgcgcgacgaggcggcagccggctctcaggactcactgctggacagtggcggcggcggccggggccggggaggcggcgggcgctcggacccctcctgcgcctcagagcacgagatgcgtgtagtgtcgccggtcttcctgcagctgcccagctacgaggaggtcaagtatctgcccacctacgaggagtccatgcggctgcagcagctcagccccggggaggtcgtgctgccagtgtcggtgcttggccgccctcgaggcggggtcgccgcggagcccgacggcggcgagggccgctaccctcttatctgagcgctcggggatcggcggctggtgcagggctgggggctgcgggtggcaagcaacggccggggtgccgccgccaactgcctcagaccttatctggcaccctggcctaactgcccggcaccccgcgactgggttggggtcactcgtctccctcgcgttctcccgggatcttatgtttctctgcgtttcattccgttcaaagaaacgtggggcacgcgcggcgggtgcggctgcagcaggcgaccctccagcgcaccttcgaaggacgtccctgccctctgccttgcctcgtattgtggttcactatttgtcattcacctgaaaggagaaggaaaagtacgaaaggtttctctgcttgggaaaaggtgaatgttgttatatcaagaacgattacacacatggatctcatacatgtttttagaacattgttcttctgattgaagaagtctgatgctcctgaaaaatcttaaaatatctgacttgtattgaagaaaattatttaattaaatttttaaaggctggttgaaaaagtctgacagttctgagaattttttaaatgtctgaattgtaataaaaaaatggtttactttaaacttctaaaaactaatgaccttgtgactaaagaaaaatcatttgaagtgtattaaaaaatagcaaaacattaaaatcttttctctgtgcaaattttatcaga

SEQ ID NO: 463791 - DNA, 779 bp, Homo sapiens
agcagcctactgtgtacaagaaagccatcagcaatgagaattataagagtttcccatgattttggaatatatataccaataacatatttatacaaatatggcccaaagaaaaccaaacaccattttatatttgacaatgctccctgtatgatttttgtaccaaataagccaaatgtcactgttgcattagtgcattatcaatgtcaaacccaattcttaataaaaccttataaatatatcgatccaatcttaatcagtttgaccataagttcccctcgacaagaaaaacgaattcatagcacaaagtacaccagtttaagactagccttagaattcttttttgcattaatccaaacagaagagatttgttttaccattccttcaatcgttcccacagagagaagtcagaaatctgactgcgtatgtcaagcctctgagcccaagccggcctgtatacatccagatagcctgaagcaactgaagaatcacaaaagaagtgaaaatggccggttcctgacttaactgatgacattaccttgtgaaattccttctcctggcccaggagctccccaccaagcaccttgtgacccccgccctgccctcaagagaacaaccccctttgactgtaattttccactacccacacaaatcctataaaactgcctcacccctagttccctttgctgactcttttttcagattcagcccacctgcacccaggtgattaaaaagctttattgctcacacaaagcctgttggtggtctcttcacatggacac

SEQ ID NO: 463792 - DNA, 3772 bp, Homo sapiens
  misc_feature (3703)..(3703): n is a, c, g, or t
  misc_feature (3754)..(3755): n is a, c, g, or t
tttcccttgcctccataactgttcgggatctatgccttatcaaccaaattgttttgcctatccaccccacggtgccaaacccatatactctcctatcctcaatagctccctccacaatccattattctgcatagttggatactttcacctttggatacctggttttgccatcctaacaaaaccgttatataaactcacaaaaggaaacctagctgaccccatagatcctaaatcctttctccactcctctttccattccttgaagacagctttagagactgcccccaccctagctcttgctgactcatcccaacccttttcattacacacagcagaagtgcagggctgtgcagttggaattcttacacaaggactgggatcgcatcctgtaggctttttgtccaaacaacttgaccttactgttttaggatggccatcataattcaggcctgtcctcggaatgctacaagagaacaacccccctttttcctttacttacccaaatcccataaaacggccccacccctatctcctttcgctgactctcttctcagactcagcccacctgcacccaggtgaaataaacagctttattgctcacacaaagcctgtttggtggtctcttcacacagatgcaagtgaaagaaggagcctgcctgcaaccttccagagtaatcagtgtgagctgagctctttccctgaatgaatccaagtaaccctggccttctgaaatgaccagcagacacacaactgtccagaggctgcccaaagtataaactctggttctaaagtaccatgtccagccaaggaagtcctagtgttgcgctttctacgacgacagtcagttcagttgctgtgcaggctggggactccaaaatcgttatagctgtcataaaggtaagctaacaacttccttttttctgtgcggctgtgggcttctagctgtgtgttgaaaaccctaaagaacattccatgcaatcggcaggacacagcatagagaagacaacgcagcaagcactcttactgctttctaaaatgggctactaagagaaacctctacaagtttcagcagttaccagagattctctttcctttcagtcagccagaaagcatctatagcagcttgatttaaaaaaaaaaaaaaaaagaaaagaaagaaaaataaagaaaagaaaacctctagcatatactgtcaatttggtctttaaaagcaaggcattggtaactggaagttcatgattgcctgactaaagagtccaatggacctgtggaatgcttgtgatttttgagagtggatgtgatggaggtgggaggaggcaggtcccgacagacagggggagggcactgctttaagcacgatggaactcagaaaacaccaagtaaagggctccgacatgtgccctttgccacactggttttgacatggtaaagaaactactaaatccttgtccagtaacgaagaccatgcaaggaaaggtacaaaagctttgtgtcaaatttgctcttaacagcaggaagtagaagccacttagggtttacaattactgcatgttttatgacaacccatttgcccatttgcaaagatgaccacacatctttaggctgaagaagaactccatgattttattctccatggaaatgccctgtaaaaaaaagctttcaagcactaggcttgggctttagatgatattccacctaaataattcagtgtttaatgaagggaaagctggcaaacaagctgatggtcacaaaccagttactttcaggtccccaccaggtttaattgaatgacttttctggccttttgttagagcatggacagcaagccatgtttactttaacttaattgctgtgaattttatggtaatgtgaaaattcataccaggaaaagagcacttgatactgagcaaaacagttcactatagaaggacagaatggaaagtattcctgccgaggtggattttctggtgttgtgagacttctctcccacaggaaccaggcctctgctgacttcctcaccctcccatcttttcagagtcccagagaggagatgaaaagaagcctgatgcagaagtagggcaaacagatcatttgcacgggattaatgatactttgagttaactgcagatttcagcaatgagggaaaagaggcaaactcactatttttcaaaaagttaactttccatttcctcaaatatgaacattcttggagcaggatgaggaataatattagaggataaattacagaagaatcagaggtagattgaacacaaaaaaattacactggaaattacactggaaaattacactggaaactcttattttaactgaattgtgtttctaagaatgttcccccactaccctctcctcagccctcttaccttactgccatctccatacaaaatacaccccaagcaattcagagtataaagtccaccttaatggaatggaagtgcctgtgtgtgatttatagtgactgtccaaactgtctcaggggactgaatatattctaaaatagaaatacatttttctaatttctctttagtaattcaggtatctacatgcgtatgcgtgttagtggttcattttgcttaatgagttgttgcttcttagaaaagcaattcctcaggaaatgcaatgacaaattatatcttagagcagtgtaaatcttgtgtggaaagcaagttgactgtgctcaaatggcagttgtcacaggcatctaattttgttaatattttcctacacgctttaatgaatattcaacaactaaggttggaaaacagcatattttacctttgaaataagataaaaatcaatttcttcatctgatatttattattttcagctaaaccagcaaggccaatgtaaagacactaatcagcctaaattgcatttacaagaactttccccatggtgaaatttgcatcctacctgcccaagtggaatttcactatttttattgagttcagttttgtgagtgagagaggatacagttgtgtaaattattctgtaactttataatattcaataatacgtaatccattgtatgttttcctcacttgggaatttttaactcaaatccaatatgccaagagagaataatttatgctaagaataaaaaataaaagacagggcatggatttatattagatctgttgtgtttcaatttaagtaaaccccatctctatggaaagaatggaaaaaaatagaaaatagaaaaaagtgtttacagtataactggaaatttaaacgatatattaaaaatgagaagggtgaagaggaaggaacaagaggaactaaaagtgcattttatttaatttttatttttagtgtggcaaatgggtacaacttcaactggctgaatcacagcccaatcttctagaaattggcagcagtcaagatgaaaccaaaaaacttcttcatgatcatgaacttcttttggccaagctcaagctggagaatgctggaggagaccttaaggatggccaccaccactatgaaggagctgttgtcattctggatgctggtgctcagtacgggaaagtcatagaccgaagagtgagggaactgtcgtgcagtctgaaattttccccttggaaacaccagcatttgctataaaggaacaaggattccggctattatcatctctggaggacctaattctgggtatgctgaaaatgcttcctgggtttgatcccaccantattcactattggcaaagcctgttctttggaatttggctatgggattgccnnatgatgaaataagggga

SEQ ID NO: 463793 - DNA, 1339 bp, Homo sapiens
  misc_feature (1270)..(1270): n is a, c, g, or t
  misc_feature (1321)..(1322): n is a, c, g, or t
tttcccttgcctccataactgttcgggatctatgccttatcaaccaaattgttttgcctatccaccccacggtgccaaacccatatactctcctatcctcaatagctccctccacaatccattattctgcatagttggatactttcacctttggatacctggttttgccatcctaacaaaaccgttatataaactcacaaaaggaaacctagctgaccccatagatcctaaatcctttctccactcctctttccattccttgaagacagctttagagactgcccccaccctagctcttgctgactcatcccaacccttttcattacacacagcagaagtgcagggctgtgcagttggaattcttacacaaggactgggatcgcatcctgtaggctttttgtccaaacaacttgaccttactgttttaggatggccatcataattcaggcctgtcctcggaatgctacaagagaacaacccccctttttcctttacttacccaaatcccataaaacggccccacccctatctcctttcgctgactctcttctcagactcagcccacctgcacccaggtgaaataaacagctttattgctcacacaaagcctgtttggtggtctcttcacacagatgcaagtgaaagaaggagcctgcctgcaaccttccagagtaatcagtgtgagctgagctctttccctgaatgaatccaagtaaccctggccttctgaaatgaccagcagacacacaactgtccagaggctgcccaaagtataaactctggttctaaagtaccatgtccagccaaggaagtcctagtgttgcgctttctacgacgacagtcagttcagttgctgtgcaggctggggactccaaaatcgttatagctgtcataaagtgtggcaaatgggtacaacttcaactggctgaatcacagcccaatcttctagaaattggcagcagtcaagatgaaaccaaaaaacttcttcatgatcatgaacttcttttggccaagctcaagctggagaatgctggaggagaccttaaggatggccaccaccactatgaaggagctgttgtcattctggatgctggtgctcagtacgggaaagtcatagaccgaagagtgagggaactgtcgtgcagtctgaaattttccccttggaaacaccagcatttgctataaaggaacaaggattccggctattatcatctctggaggacctaattctgggtatgctgaaaatgcttcctgggtttgatcccaccantattcactattggcaaagcctgttctttggaatttggctatgggattgccnnatgatgaaataagggga

SEQ ID NO: 463794 - DNA, 1104 bp, Homo sapiens
  misc_feature (1)..(1): n is a, c, g, or t
  misc_feature (5)..(7): n is a, c, g, or t
nggtnnncagcgacccctgcctcctaccgacctgggctccccgcacccgccgcgcgagatccagtcccagcatcctgatggacgcaggcgttttcctggagccccgcggttggccacgccccgcgctctccgccccgtcggggacgcccaggccaccggcctgatgagggaagcaggggcagagcgctcaggccagggccggcgggggcactgcgcactggccgcctccctcctctggccaatcctcctgccgctgcgcgtctagtccacctcgtccctctctgcagcaggcatgttcctacgtgaagcatggagttacgcaatggcctgcctgtccatgaagttcctctggcctcctccgattctgtggctgcaaatccacacctaggagctccgcaggcctgctggagcacagcgcctgtaggtttctgcgcctggaacccacctcaggaccacaagccgcattcagtctctttttatagatctggaacccgaagcccagcgtggttaggaacttgtctaaggtcacttggtagtaaatactggaacagggattcaaacccacatctccagagagagctcagaagccttgtgctttccatgagtgcagctgtttccagaggcctccggccctgtctcaccttcccagactgccttgagaggctctagctggcctgtctctagtgtggccagattctatctggtcagtggcaagggaggaccccaggccacaatactgacatcagggaacagaacagatctgcagggccagtgagtggtgctacggaaaggctgggagtggcccctgcgtggttttccctagacccatcgtcaggggctccaggcctccatgtgttgtgctgcacgggctactggctccctctccaaaatcgaccctgggtgagctgtggaggcgagaaggcagtgtgcatttcagaaactaaccaaaatcagtgagaaaatcttggagaaactgaagttaccctgggcggctgtagctgggaatggaggatggggcagccaggagccagacttaagaaggctgttcacactctgctcttgttgcttgcctcccacacctcgtgacaaatgctgcctggtccc

SEQ ID NO: 463795 - DNA, 1339 bp, Homo sapiens
ggggtcctctgggcagaggaatcatcatggacacgagtctccgaggacaactgcccttggaaccatgttgtgaggaagctcgggccacatgccagaacaaaggccccgaggaatctaaaccccttaatgccaggagagacaaatgcaattcctgcagcaggtttgtggactttgtgggcactgacccttctgaaacccttctcctgaagaaaacagatagactctccaaaatctcagtggatttgtacaacagaagtttagttctcactcttgcaaagttcaaaaaaggtccagattggggcagttctcctccaagtgatttggaaacccaagcacctttcatctcctgcatcatcaatttatctatgaatctgcctaaagccagtggcagggaaagaacatggatgatcctgcatgggtcgttttggggggccagtcctggaagtaaatgctcattcattgtattgactagaaatcagtcacatggttacatctctttctgcaagaaaggctgggaaatgcaatccagctgtgtacccaggaaggctggagaaatgggtttcatgaacatctagctggtgtctaccatggagatgagaaaaaagtccaggtcaaaattgtagcctttgaataacaaaaccttagggccaaaatagaattttaaagtcatttagttcatcctccttattttgaatttagttcaatttcaaataaaggcaacaaagtttgaagacactgtgaagtctaaagtcagtagcagtaatggaaagttgggctaatgtggagatattccaaacagagcaagagcaaatgggattcttggcttgtctctcatcgtgatcctgattgaagaccactggacacatctgtcaagactctaaccgcaatccattggaaatcactggagagccaaaggaaatgaagtctcagacatattgtccaggctggaatgtagcggctattcacaggcatgatcatagtgcactacagcctcaaactcctgggctcaagcaatcctcccatctcaatgtccggagtagctgggactacagatgtgtgttagcggctatggcagccatcttgtgaccaggaggaagcttctgagaatcacagagatgcaacctctgaagctgccaaaccactgccagcagctgcctaaccactgccagcagctgcctatctccagacatcttggtaggtgagaaaaataaccccctattcatttcagttcccagaacttgggatttctgttactttcggctaaaggttttctggatacatcccagatcacgcatctgcctttgcatgggcacacataaatggtctttgctaaatttct

SEQ ID NO: 463796 - DNA, 1101 bp, Homo sapiens
ggggtcctctgggcagaggaatcatcatggacacgagtctccgaggacaactgcccttggaaccatgttgtgaggaagctcgggccacatgccagaacaaaggccccgaggaatctaaaccccttaatgccaggagagacaaatgcaattcctgcagcaggtttgtggactttgtgggcactgacccttctgaaacccttctcctgaagaaaacagatagactctccaaaatctcagtggatttgtacaacagaagtttagttctcactcttgcaaagttcaaaaaaggtccagattggggcagttctcctccaagtgatttggaaacccaagcacctttcatctcctgcatcatcaatttatctatgaatctgcctaaagccagtggcagggaaagaacatggatgatcctgcatgggtcgttttggggggccagtcctggaagtaaatgctcattcattgtattgactagaaatcagtcacatggttacatctctttctgcaagaaaggctgggaaatgcaatccagctgtgtacccaggaaggctggagaaatgggtttcatgaacatctagctggtgtctaccatggagatgagaaaaaagtccaggtcaaaattgtagcctttgaataacaaaaccttagggccaaaatagaattttaaagtcatttagttcatcctccttattttgaatttagttcaatttcaaataaaggcaacaaagtttgaagacactgtgaagtctaaagtcagtagcagtaatggaaagttgggctaatgtggagatattccaaacagagcaagagcaaatgggattcttggcttgtctctcatcgtgatcctgattgaagaccactggacacatctgtcaagactctaaccgcaatccattggaaatcactggagagccaaagaactctctttcattgtcctggctggaagcactggattcctcctttcaaatgaactaaaatattttccaagatgtcaagtcaatctgggcaaactttctcaacataaccatccctacattccaatatccctctttttcatttttcctttaaaaataaacgtgcatttttttctcaaaagtgactgag

SEQ ID NO: 463797 - DNA, 909 bp, Homo sapiens
agctattatcaaaaagatcaaaagtaacagatgctagcaaagatgtgtatttatccaaaggaaaggaaatcactgtgtcaaaaggatacatgcactcttatgtttattataacactattcacaattgccaaaatacggaatcaatctaagtgtccatcagttgatgaatggagaaagaaaatgtggtttatttacatagtagaatattacctgaccattaaaaagcaaaatcattgttacatgaatatactgcaaaaaaatatgtcatttgcagcaacatggatgaaactgaaagtcatcatgttaagtgaaataagccagacacagaaagacaaatattgcatgtactcatatgaggtctcatgtttcactatactctcccacaacacacagagagaaaatgtagcagctattcaaagaaaagaacaccttggtgaaaacccccagaactggaaataagcctgagacacctgcatgattcatagaacaaaataaaaactgtatggaaaaggctcaacaaggacagagcatcccaggggtgaccattcctctgatctctgcctcacaactcacctcagggtaaccagtcttctgcccaagctaaagcacccaacacacccccatcggacttcagtcaatccgaagtggttcacttctcatctctgcctctttcttcccaaatgtcctgcactagaatggtatgctccccactcctttcaacatgaaccccatcatgttataaccttcttctacctgtgcaaatgattaccatgtctcctcctattaatgatggaagggctatcttttctgtgttatggaagaaagtaatctacatggtcagtcctggcttttaatgttaatagacaattatcagctgaaatagtttcagctataattaacagaaaataa

SEQ ID NO: 463798 - DNA, 546 bp, Homo sapiens
acagccaaatactatactacagtttacaatagagaaaatgtagcagctattcaaagaaaagaacaccttggtgaaaacccccagaactggaaataagcctgagacacctgcatgattcatagaacaaaataaaaactgtatggaaaaggctcaacaaggacagagcatcccaggggtgaccattcctctgatctctgcctcacaactcacctcagggtaaccagtcttctgcccaagctaaagcacccaacacacccccatcggacttcagtcaatccgaagtggttcacttctcatctctgcctctttcttcccaaatgtcctgcactagaatggtatgctccccactcctttcaacatgaaccccatcatgttataaccttcttctacctgtgcaaatgattaccatgtctcctcctattaatgatggaagggctatcttttctgtgttatggaagaaagtaatctacatggtcagtcctggcttttaatgttaatagacaattatcagctgaaatagtttcagctataattaacagaaaataa

SEQ ID NO: 463799 - DNA, 1802 bp, Homo sapiens
gcccacgacggtggccggcggcggcctctgcttcccggacccatgaacaaagctggagatgcggctttggagtcggccctgggacctgcttcttctcttggcttcggggaccgcagcccagggcgttccctccggatcggtggccagggcttgcggggcgtgtgcgactcgggacccccagccgggcagcagcggccgccaagcatggcaaggagcagcgccagcttctccccaccgcgtcccgggatggcgggcttcgggtgggagccggcccgggacatccaggtgggatcagccaccgctcaggccttgtcccaagcggacgcggccagaggcagtctcagcaccacgcaggccgcgggctcagtgggcaaagagaggggcccccggtgtctgggaccggtgacttggcccctgttatccccgagctcagccgcaggcttcagggacctgggcaaagtgtggataaccctgcccgccttttggggaggaaagccagttgctcccctagcctctactgtggcactacgaagcaagggcagccaagctgatcgctggtttcatctgcaccaccccactccctctggcaggtgatgagatggccagtgacggctctccaaactgttccaacctctgcccattacccacttccaaagctgcttccacattttcaggtatcttcatagcaatgctctacttcccagtaccaattttctgtattagtctgttcttgcactgctatgaagaactacctgagactgggtaattttataaagaaaagtggtttaattggatcacgattctgcaggctgaacaagaagcatggctgaggaagcctcaagaaatttacaatcatggcaggaggtgaagagggaggtgacacgccttacatggctgaagcaggaggaagagagagcaaaagggaagatgctacgtacttttaaacaatcagatctgatactgtcttcatgcgaacttggtatcctgtttccatcccagccttctataacccagtaacatcttttttgaaaccagtgggtgagaaagacacctggtcaggaacgcggaccacaggacaactcaggctcacccacggcatcagactaaaggcaaacaaggactctgtataaagtaccggtggcatgtgtattagtggagatgcagcctgtgctctgcagacagggagtcacacagacacttttctataatttcttaagtgctttgaatgttcaagtagaaagtctaacattaaatttgattgaacaattgtatattcatggaatattttggaacggaataccaaaaaatggcaatagtggttctttctggatggaagacaaacttttcttgtttaaaataaattttattttatatatttgaggttgaccacatgaccttaaggatacatatagacagtaaactggttactacagtgaagcaaattaacatatctaccatcgtacatagttacatttttttgtgtgacaggaacagctaaaatctacgtatttaacaaaaatcctaaagacaatacatttttattaactatagccctcatgatgtacattagatctctaacttgatcatcctatatgtctgctttgtattttcttaatgtacgtctccccatttgctattggtcatttcctatttggctcatttttcaactgggttgttttcctgttattaaaagagttctttactgatttttggacattaactctttatcagatatgtgatctgcaaatatttcctccagtctattgctcttgcaagtactatgttcaataaaagtgatgaga

SEQ ID NO: 463800 - DNA, 1145 bp, Homo sapiens
gagacactgctagtttaattttagcatggtgactactgaggccatgttttcttaagcattcaggtgatgaaaatgaggaaatggtgttgcaatatcaatgcccgcgtgacccaaatggccatgttattttaacgacaggaggagtgacacagacaactggatgagggaggctgtaactgaaatatcacgtgggtgaacaaagggagaaatgtcgatggcagctgtgttgaccctttacaacatgcagcggattctgccagatcccaccaacaatcatgctttctacagtaaccaagtgctgcatccaatcatggcaatgaaaaacagttctcctaacttgtaaatactttgatttgaaaaaatggagtttcaaatcatcctttttatttctatgaagattttaatccacctgcagaaaaaaaaaaagaatgttgatgctatcttgtccaaatacaaacatgactttgcccatctgtctgcctatttggcagaccgtgcaaatgtaaatttttgcaaattccatgcagtctatgaacgctttaccaaagaaaagttaaaaatattagccacgaagtgtcctgcacattttgtacacatcagtaaaaaggggtggagtttccttccctgtgatattgatgctttcaaaatgaaagcttttatttacttttcagtttcctcaaagcatgaaaaagcacttaatgagatttttcacattccagaaatggaaggagatggcctcctttggacatgtgcctacacgagggctgtcactgttgccagggtaaaaaggcagcctgccatacaaccatattttcaaagcatgggacaagaagaatgtccttgtctaatttggaaatatattaagaatgaaaatagagaaaaagattatggttaaacagtcaaactgaaatttataagttcttcctccaaaactgcctgatgatctttgaggagcccataaggcgtctggaaaagcatgaactgactgtccctgagttgtcgatgttatagaaaaggacagccaatttaaacaagactttctcacttctttactaaaactgtaacttatttggaattcaacttcaacttcaacttcacaagttcaaagtatctttgtgctttaaaactatttttcctgagagaaa

SEQ ID NO: 463801 - DNA, 1163 bp, Homo sapiens
agtcctcagtgagataggcaagtatgtccacattaaccaaaaagctttttgtctccacaaaagacaccaattgaaaatagtggctgctgaattagctagggcaaactacaaaaatgaatttgtgtgattgtgctgctcctttgattgttttttgaaactgagtaggggcacatttcctcatttacaggctgtaactgaaatatcacgtgggtgaacaaagggagaaatgtcgatggcagctgtgttgaccctttacaacatgcagcggattctgccagatcccaccaacaatcatgctttctacagtaaccaagtgctgcatccaatcatggcaatgaaaaacagttctcctaacttgtaaatactttgatttgaaaaaatggagtttcaaatcatcctttttatttctatgaagattttaatccacctgcagaaaaaaaaaaagaatgttgatgctatcttgtccaaatacaaacatgactttgcccatctgtctgcctatttggcagaccgtgcaaatgtaaatttttgcaaattccatgcagtctatgaacgctttaccaaagaaaagttaaaaatattagccacgaagtgtcctgcacattttgtacacatcagtaaaaaggggtggagtttccttccctgtgatattgatgctttcaaaatgaaagcttttatttacttttcagtttcctcaaagcatgaaaaagcacttaatgagatttttcacattccagaaatggaaggagatggcctcctttggacatgtgcctacacgagggctgtcactgttgccagggtaaaaaggcagcctgccatacaaccatattttcaaagcatgggacaagaagaatgtccttgtctaatttggaaatatattaagaatgaaaatagagaaaaagattatggttaaacagtcaaactgaaatttataagttcttcctccaaaactgcctgatgatctttgaggagcccataaggcgtctggaaaagcatgaactgactgtccctgagttgtcgatgttatagaaaaggacagccaatttaaacaagactttctcacttctttactaaaactgtaacttatttggaattcaacttcaacttcaacttcacaagttcaaagtatctttgtgctttaaaactatttttcctgagagaaa

SEQ ID NO: 463802 - DNA, 1059 bp, Homo sapiens
ttctgaataggacactcctctgcttcaaagatttccgtggctccccattgcctagagaataaaattcaaattcttgtagttcttaacgtcctggctatgttcgcagctccctcttccacctccgtcctccctctaagactcactattttcttctgctgcttcagcaaatccaggactccaaatgtcccatggccgtctccatctcagggcctttgctcatctgggttcctgctgcagggaattctgtcccttccagatgtggttgtctatcctggagttatagcagcgatttaccttgaagaaagcctggtccctggagaacttccatccactgcacgaatgcatgctgcaaatgacattcacattcgtgatttccagaaaaggacaaagaagtacgacttacactgtgcaagcaaacaaaacaataacactggtcaaacattatttcccattgattctgggatggaattacaggctgatttgaagcacaaagtccagttgcatcccagacccttgtctctaaacagccagtgccacaggatgtttcgtgaccacagcatgtccatcatcttactttccaaatgcagtgatgaaggttgaatgggtggagctttttatctggagctcaagaaaaatatagtgacaaggtgtgttagactgcctctcgtccacaggagaaaagacagaccaacctggatttccactttatatctaccactgatgagctgtgtgaccttgggcaagtgaactaacctctctggtcctgttttctcatctgcaaaaagcaaacaagacttgagctcctcaccctcaccacctcacaatctatggagatgccaggcagtgcacaaaccactcagccatatgcagcactctgcaggcatgaagactcagaggcaaaaaaacaagaagtgaaaaactccatttggctagagtggaggctttctgaagcagatataaaagtctaagacttgtgctgtccaatataatagccccttaccacacgtggctatttaaatttcaatgaattaaaattcaatacaattgaaatatctgttc

SEQ ID NO: 463803 - DNA, 2105 bp, Homo sapiens
caacagcaggaagctggtgtatatggcttgttagtctactcaatgtgttgagatcctgaaatggatctcaatggattgtgtagacaatgaaaaagaatggaattctgctgttgagaagctgaagagtgaggcactgagaattctgctgtcaaaggactacgtggagaaagaacacctccagctctctcaccagaaactcagtcagcttcaagaagaatttggtcaactcatggtggaaaggaatacctggttaaagaaggcgaatgaattttttaacagtgctaacaaggaagttatcaaatgtacatatgagcatcttatatggcataccagcaccaggcctcagggacaatcaaagccatataaaactgaccccaaatccccagaacctgtcccgcgtccagtcagggagctgcacatcaaggaagtgtgctccaggcacgaggggcccatgagtacagtggatgttgcggtcacttcttcagagaagggagacacaatccgaaagtctgagatcaagacaggccaaatgaaaggctctcaggtgtccggcatccatgagatgatggggtgcattaagagacgagtggatcatctgaccgaacagtgttcagcgcacaaggaatatgctcttaagaaacaacaactaacagcctcagtggagggttacctacggaaggtagagatgcagtttcagagcttaaaagaattttatgaaaccgaaatccctcagaaggagcaggatgatgctaaagccaagcattgttctgactcggctgagaagcagtggcagctatttttaaagaagagttttataacacaagatctagggcttgagttccttaatttaataaatatggcaaaagagaacgagatattagatgtgaaaaatgaagtgtacctcatgaagaacaccatggaaaaccagaaagcagaacgggaagaacttagcctccttcggctggcatggcagcttaaagccacggaaagcaagcctggaaaacagcagtgggcggcattcaaagagcaacttaaaaagacttctcacaacttaaaacttcttcaggaagcacttatgcctgtgtctgcacttgacctcggagggagcctccagttcattttagatctacgacaaaaatggaatgacatgaagcctcagttccagcaattgaatgatgaggttcagtacattatgaaagaatcagaggagttaactggcagaggagcccctgtaaaagaaaagtctcaacaactgaaggaccttattcacttccatcaaaaacagaaagagagaatccaggattacgaggatatcctgtacaaggtggtccagttccatcaagtcaaggaagagctgggacgtctcatcaaatcaagagagctggagtttgtagagcagccgaaggaactgggtgatgcccatgatgtgcagattcacctccggtgctctcaggaaaagcaagcccgtgtagaccatctccacagactggccctttccttaggagtcgacatcatctcatcagtgcagcggcctcactgctctaatgtttctgcaaagaacctacagcagcagctggagctccttgaggaggacagcatgaagtggcgtgccaaagctgaggagtatggacggaccctgtcccgtagtgtggagtactgcgccatgagagacgagataaatgagctcaaagactcattcaaagatatcaaaaagaaattcaataatttgaagtttaattacactaagaaaaatgaaaaatctcggaatctgaaggcgcttaaatatcaaattcagcaagttgatatgtatgctgaaaaaatgcaggctttgaaaaggaaaatggaaaaagttagtaataaaacctctgattctttcttaaattatccaagtgataaagttaatgtccttttggaagtcatgaaggatttgcaaaaacatgtggatgactttgacaaagttgtgacagattacaagaagaatttggacctgactgagcatttccaggaggtgatagaagagtgtcatttttggtacgaagatgcaagtgccacagttgtaagaagattggagtaatgcagctgctataagccaaggtgcaccagag

SEQ ID NO: 463804 - DNA, 3676 bp, Homo sapiens
caacagcaggaagctggtgtatatggcttgttagtctactcaatgtgttgagatcctgaaatggatctcaatggattgtgtagacaatgaaaaagaatggaattctgctgttgagaagctgaagagtgaggcactgagaattctgctgtcaaaggactacgtggagaaagaacacctccagctctctcaccagaaactcagtcagcttcaagaagaatttggtcaactcatggtggaaaggaatacctggttaaagaaggcgaatgaattttttaacagtgctaacaaggaagttatcaaatgtacatatgagcatcttatatggcataccagcaccaggcctcagggacaatcaaagccatataaaactgaccccaaatccccagaacctgtcccgcgtccagtcagggagctgcacatcaaggaagtgtgctccaggcacgaggggcccatgagtacagtggatgttgcggtcacttcttcagagaagggagacacaatccgaaagtctgagatcaagacaggccaaatgaaaggctctcaggtgtccggcatccatgagatgatggggtgcattaagagacgagtggatcatctgaccgaacagtgttcagcgcacaaggaatatgctcttaagaaacaacaactaacagcctcagtggagggttacctacggaaggtagagatgcagtttcagagcttaaaagaattttatgaaaccgaaatccctcagaaggagcaggatgatgctaaagccaagcattgttctgactcggctgagaagcagtggcagctatttttaaagaagagttttataacacaagatctagggcttgagttccttaatttaataaatatggcaaaagagaacgagatattagatgtgaaaaatgaagtgtacctcatgaagaacaccatggaaaaccagaaagcagaacgggaagaacttagcctccttcggctggcatggcagcttaaagccacggaaagcaagcctggaaaacagcagtgggcggcattcaaagagcaacttaaaaagacttctcacaacttaaaacttcttcaggaagcacttatgcctgtgtctgcacttgacctcggagggagcctccagttcattttagatctacgacaaaaatggaatgacatgaagcctcagttccagcaattgaatgatgaggttcagtacattatgaaagaatcagaggagttaactggcagaggagcccctgtaaaagaaaagtctcaacaactgaaggaccttattcacttccatcaaaaacagaaagagagaatccaggattacgaggatatcctgtacaaggtggtccagttccatcaagtcaaggaagagctgggacgtctcatcaaatcaagagagctggagtttgtagagcagccgaaggaactgggtgatgcccatgatgtgcagattcacctccggtgctctcaggaaaagcaagcccgtgtagaccatctccacagactggccctttccttaggagtcgacatcatctcatcagtgcagcggcctcactgctctaatgtttctgcaaagaacctacagcagcagctggagctccttgaggaggacagcatgaagtggcgtgccaaagctgaggagtatggacggaccctgtcccgtagtgtggagtactgcgccatgagagacgagataaatgagctcaaagactcattcaaagatatcaaaaagaaattcaataatttgaagtttaattacactaagaaaaatgaaaaatctcggaatctgaaggcgcttaaatatcaaattcagcaagttgatatgtatgctgaaaaaatgcaggctttgaaaaggaaaatggaaaaagttagtaataaaacctctgattctttcttaaattatccaagtgataaagttaatgtccttttggaagtcatgaaggatttgcaaaaacatgtggatgactttgacaaagttgtgacagattacaagaagaatttggacctgactgagcatttccaggaggtgatagaagagtgtcatttttggtacgaagatgcaagtgccacagttgtaagagttggaaaatattccacagagtgcaagacaaaggaagctgtgaaaattctccaccagcagtttaataagtttattgcaccctcagtgccgcagcaagaagaaaggattcaggaggccactgaccttgctcagcacttatatggtttggaagaaggacagaaatatattgagaaaatagtgacaaaacacaaagaggttcttgaatctgtgactgaattatgtgagtccctcacagagctcgaagaaaaactgaagcagggagatgttttaaagatgaatccgaatttggaagacttccattatgattacattgacttgctaaaggaaccagcaaaaaataagcagacaatattcaatgaagaaaggaataaggggcaggtgcaggtggcagatcttttgggcatcaatggaacaggggaagagcgactaccacaagacctgaaggtgtccactgacaaggagggtggcgtccaggacctgctcctgcctgaagacatgctctcaggggaagaatatgagtgtgtctcacctgatgacatctccttgcctcctctcccaggaagccctgagtcccctcttgcaccatctgacatggaggtggaagagcctgtcagctcctccctcagccttcacataagcagctatggggtgcaggctgggaccagcagcccaggggatgcccaggaatctgttcttccaccacctgttgcctttgcggatgcatgcaatgataagagagaaacattttcaagtcattttgagaggccttacctccagttcaaagctgagcccccactaacctccagaggattcgtggaaaagagtactgccttacacagaatcagtgctgaacatccagagagcatgatgagtgaagtgcatgagagagctttacagcagcaccctcaggctcagggtggtttgctagaaacacgggagaaaatgcatgctgataataacttcactaaaacccaagataggctgcatgcttcctctgatgcattctcgggcctcaggtttcaatcaggcaccagcaggggctatcagaggcaaatggttcctcgagaagagattaaaagcacatcagcaaagagcagcgtggtcagcctagctgaccaggcacctaatttctccaggctcctgtctaatgtaactgtcatggaaggttctccagtgactttggaagttgaagtaacaggatttccagagcctacactgacatggtacaagaagggccagaaattgtctgcagatgggcacttacaggttttacacaaggagacaaggcattcggtgttcattccaaaggtatgcaaggcagacgcaggcctctatgtggctcgggcccaaaactctagcggcgctctctcttccaatgtcatcctccacgtgacagaatttgtctagcaggttttctggtgaaaattaaactcaagattttcaccagaaaacgttttaaaacttctaaactcttaaacaaattataaatacttgatactttgaagaactgcaaaacaaaatgtttttaagttttcataaggcaaaatcattgagttttccagctttgattttccaataaaaggatgtataaatatttggtggtagtttttcaca

SEQ ID NO: 463805 - DNA, 1109 bp, Homo sapiens
ccggggtcctcatggattccgggtcccatggatgaaggaccagatcttgatctaggcccacctgtagatccagatgaagactctgacaacagtgcaatttatgtacaaggattaaatgacaatgtgactctagatgatctggtagacttctttaagcagtgtggggttgttaagatgaacaagagaactgagcaacccatgatccacacctacctggacaaggaaacaagaaagcccaaaggtgatgccacagtgtcctgtgaagactcacctactgccaaagctgccgtggaatggtttgatgggaaagattttcaagggagcaaacttaaagtctctcttgctcggaagaggcctccagtgaacagtatgcagggtggtatgccaccccatgagggcagagggatgccaccaccactctgcggaggtccaggaggcccaggaagtcctgggggacccatgggtcacatgggaggccgtggaggagatagaggaggcctccctccaagaggaccccagggttcccgagggaacacctctggaggaggaaacgtccagcaccaagctggagacaggcagtgtcccaatccgggttgtggaaaccagaacttcgcctggagaacagagagcaacaagtgtaaggctccaaagcctgaaggcttcctcccgccacccttcccacccccgggtggtgatcatggcagaggtggccctggtggcatgtggggaggaagaggtggcctcatggatcatggtggtcccggtggaatgttcagaggtggctgtggtagagacagaagtggcttctgtggtggctgggcatggaccgaggtggctttggtggaggaagacaaggtggccctggggggcccccggacctttgattcaaatccagagatagaaagcagaatggtgactgccaggggccggaggaaggaaagaatgaagaattgttcagtgtacgtagagtttcagtttcacaagatggaaaggttcaggaggttggttgcataaggaatatatttaacactactgaactgtacacttaaaaatggttaaaatagtacttttatgttagtgtatttcattgcaataatttgttttagaaa

SEQ ID NO: 463806 - DNA, 1318 bp, Homo sapiens
acgggcagcagagttcattctgacaggaccaccccagtagcatgggtgtttatgggcaggagtctggaggattttccggactaggagagaaccggagcatgagtggccctgataactggggcaggggaagagggggatttgatcgtggaggcatgagcagaggtgggcggggaggaggatgcggtggaatgggcagcgctggagagcaagttggcttcaataagcctggtggacccatggatgaaggaccagatcttgatctaggcccacctgtagatccagatgaagactctgacaacagtgcaatttatgtacaaggattaaatgacaatgtgactctagatgatctggtagacttctttaagcagtgtggggttgttaagatgaacaagagaactgagcaacccatgatccacacctacctggacaaggaaacaagaaagcccaaaggtgatgccacagtgtcctgtgaagactcacctactgccaaagctgccgtggaatggtttgatgggaaagattttcaagggagcaaacttaaagtctctcttgctcggaagaggcctccagtgaacagtatgcagggtggtatgccaccccatgagggcagagggatgccaccaccactctgcggaggtccaggaggcccaggaagtcctgggggacccatgggtcacatgggaggccgtggaggagatagaggaggcctccctccaagaggaccccagggttcccgagggaacacctctggaggaggaaacgtccagcaccaagctggagacaggcagtgtcccaatccgggttgtggaaaccagaacttcgcctggagaacagagagcaacaagtgtaaggctccaaagcctgaaggcttcctcccgccacccttcccacccccgggtggtgatcatggcagaggtggccctggtggcatgtggggaggaagaggtggcctcatggatcatggtggtcccggtggaatgttcagaggtggctgtggtagagacagaagtggcttctgtggtggctgggcatggaccgaggtggctttggtggaggaagacaaggtggccctggggggcccccggacctttgattcaaatccagagatagaaagcagaatggtgactgccaggggccggaggaaggaaagaatgaagaattgttcagtgtacgtagagtttcagtttcacaagatggaaaggttcaggaggttggttgcataaggaatatatttaacactactgaactgtacacttaaaaatggttaaaatagtacttttatgttagtgtatttcattgcaataatttgttttagaaa

SEQ ID NO: 463807 - DNA, 2423 bp, Homo sapiens
ccgcccgagctcctcctcctgtcagatcagcggtggcattagattgtcctgagtgtgacctgaaccctgttgttcctggaaaaattatcttccacaaaaccagtccctggtgccagcatggttggggacacctgtgacgaacaaaatgatactcagaagcaattttgtgaagaacagaacactggaatattacacgatgagattctgattcatgaagaaaagcagatagaagtggttgaaaaaatgaattctgagctttctcttagttgtaagaaagaaaaagacttcttgcatgaaaatagtacgttgcgggaagaaattgccatgctaagactggagctagacacaatgaaacatcagagccagctaagaaaaaagaaatatttggaggatattgaaagtgtgaaaaaaaagaatgataatcttttaaaggctctacaattgaatgagctcaccatggatgatgataccgccgtgctcgtcattgacaacggctctggcatgtgcaaggccggctttgcgggcgacgatgccccccgggctgtcttcccttccatcgtggggcgccccaggcagcagggcatgatggggggcatgcatcagaaagagtcctatgtgggcaaggaggcccagagcaagagaggcatcctgaccctgaagtaccccatggaacacggcatcatcaccaactgggatgacatggagaagatctggcaccacaccttctacaacgagctgcgtgtggcccctgaggagcaccccatcctgctgaccgaggcccccctgaaccccaaggccaaccgcgagaagatgacccagatcatgtttgagaccttcaacaccccagccatgtacgtggccatccaggccatgctgtccctgtacacctctggccgtactactggcatcgtgatggactctggtgacggggtcacccacactgtgcccatctatgatgggaatgccctcccccatgccaccctgcgcctagacctggctgggcgggaactgactgactacctcatgaagatcctcaccgagcgtggctataggttcaccaccatggccgagcgggaaatcgtgcgtgacatcaaagagaagctgtgctatgttgccctggacttcgagcaggagatggccatggcggcctccagctcctccctagagaagagctacgagctgcccgatggccaggtcatcaccatcggcaacgagtggttccgctgccccgaggcgctcttccagccttgcttcctgggcatggaatcctgtggcatccatgaaactaccttcaactccatcatgaagtctgatgtggacatccgcaaagacctgtacaccaacacagtgctgtctggcggcaccaccatgtaccctggcatggcccacagaatgcagaaggagatcgctgccctggcgcctagcatgttgaagatcaggatcattgctcctcccaagcgcaagtactccgtgtgggtcggtggctccatcctggcctcgctgtccaccttccagcagatgtggatcagcaagcaggagtatgatgagtcaggcccctccattgtccaccgcaaatgcttctaggtggactctgacttagttgcgttacaccctttcttgacaaaaccaaacttctcagaaaacaacatgagattggcatggctttatttgttttcttgtttcattttttgttttgttttttattggcttgactcaggatttaaaaaccggaatggtgaaggtgacagcagtcggttggaggaagcttcctccaaagttctacaatgtggccaaggactttgattgtacattgttcttcttttcaatagtcattccaaatattgtgagacgcattgtttcaggaagccccttgccctgctaaaagccaccccacttctctctaaggagaatggcccagtcctctccctagttcacacaggggaggtgatagcattgcttttgtgcagattacataatgcaaaattttttgaatcttcgccttaatactttttaattttgttttattttgaatgatcagccttcgtggcccccctcttttgtaccccaacttggggtgtatgaaggcttttggtctccctgagagtggctggaggcagccagggcttacctgtactctgacttgaggagagttggataaaagtgcacaccttaaaaaaaattgaggaagcacagtatttcagtacagtggacagcttagcatgttgacaactgagaataaaatgctcagttctgaactggacaatgtaagacacaacgaggaaacaccggaaatggaaattcaattacgtcattgtagactggctgctgctctacatgattgtgaccaaagtcagatagctgaaagagacttctttccagagaacaagacatgaacaggtttatttacagaagacaatgaattc

SEQ ID NO: 463808 - DNA, 770 bp, Homo sapiens
ccaaatggatatggaggtcttgggccaggaacaaagctccgaacagctggatttagaggagatctcaaggaaaatttcattccttgacaaatggagggaaatctttagttatcacagagagaaaaagagaaaatttaaaacaaggtcatcaccagctctgtttgctttgtcttttgtgggggtgatatttgcacagaatcatgaaggcaaccatacatctgctgatgaaaatgaagatggaacaggactatctcagcccaaaggacaaggacatttgccatcaagtggcctttgttctattcccaacccctctatcatctcttcaaaattgggtggctttcctatctccctagcaatggccacgatgcctgaagccacaggaagatgggcaggtatgcagagctcccggaacactgcactcagctcactggccttcaagcctctggatggagccttaacttgtatcttatatagatacttaatcgctgtcctttcaagcaacgaagatagataatatgtaatccttgccagggcccccagccctcagtgattctgctgcctacactgtggtatagaccagaagttagagcaactatctgcattttacttgacaaggaaatgtttttaatgaaaaactttaataaaaatgtattcttggcttctgcaatgaatttctttagagaatgtcattttaaaatttacacgtatctgaaaaataggctaccttttatgtgaaaatgagagacaattatgattctatattgatactt

SEQ ID NO: 463809 - DNA, 1734 bp, Homo sapiens
gctaaagggaagccaacatgcattttctgcacacctggcttctgggtctaagatttttgtctgctcctaaaatgcaagccttgttgaattggtgtgggcttctccttaatcgctgggtaaagcagagggctggggcacagccatatgcagtaatcagcctgcccttaaccaaagggcccgaggaagaggtgagaccaaagaaggtgaatcacaggttcaaaagcgaagcaaataaaagcagtggggagagacggggtatgaatatggagcacactttgagacacagacacttcccaggaccctgcagccctctgagcatccctccaccctactcagaggcatttttcccatatcgaactcctcggggttggggattctggatcctcctatgtaaccactccttcctgcttcatctcaacatctgtgttgtttgcaaagaaagtgggctccataaggtcaagggttgccccaggtgcatttgggtgtttaacagggttttgggtgatgactgtgtaaaaggaacaatattagagtttttgaccagagtgactgaggagctcacaggagtacagggtgtataagtcccaccaaagattccatgtgccttgggactgccccatcccattgggaattccagtctggcttcttggcaatgggtgcctgggcaacagagcaacagagcaacagagcaaggtggaggagagaagccctcctggtacccatccccacaccagcaagagggagcgccagactcacagcctcccatcccctccagccccagcccacctgacctacatcagccaccttctgattgattctgttttttcctggggaaaaggccaaaaagccatctaggcctcaaccccagcatctctgaacctctgacccagccctggacttccaaatttcagacttctttcagctcctgcttcttcgtcacaggtacaccagggcatccagcacattgatttgtccccactcgccttagcctgtctcctgccacagttgtctcattttggtgaagtgcgtgtccagatttccccatgctcccagctgcaacatggatctgtgaaagacagtacagcagaaaagtattcacatcctggctctctctgcccttcattgtctttaagctctttaacaacttttacttggagaggaaaacaactatctagacaggaacacggagcagcagagggagaaattgtgtctttactgatttcagtcaattattgcagtgaccacatgtctcaggagtgttgatgtccagatgagggctgacccatgaaaggtcagcaaggaaaaaggaggacctaaactttcctcggtttgcaagttgtaaaagacccatggaatgccaactatccttgtccatggacatgtggacagactgtccagtggctatcatcaattttgcatctatttgtaaattctatgtcagcattcctattgtcctagctatgcgtggcatttttaattctcctttgggctggttgtagcatcttactggttccctcattaattaatgaactaaataaaatctttgacatgtgttcattttacatttgtgtaagagtcatgattttacctttaaaaaaaaaagtcattttacaggtctcaggagagaggcagctgcatcaacaaacacaaggactagctctcctctagagaattcacagctgaagggtagattaaacgcaccctttgcctttcccacctttcattccctttacc

SEQ ID NO: 463810 - DNA, 1508 bp, Homo sapiens
atagtgctgcagcggcaattagctttaatctccgcccacgtccagtggctgagctacaacgaactgccccacctcttttaaagcgtctttctctgaactgtgcaaggaagagagcatcgcctgacagtggcgcaaggggcaacgccactcgccctgtccctctagcgtggcctctgtttgggggtctggggtggaggtcgtcccggcccgggtggttccggacgccggctttccgcacctggctcggtgacggcctcggcgccccgccctcttggccacggtccgcagccatcgccccagtgagggcgcggtctgtgggcggggccggctccaggagccgcgctgtgattggccgtgtccaggcaaccgcggagacgccgtcgtcaacagaccgcgctcggaaccagaggcgcgggtcacagagacctagaacatctggaatccttcgcccccggcgcgcagccttcgcccgccggaatcgctgccttatccaccagcgggatgcttacctcgcccgccctctcgggtcaggcgggcccgggaggatgggagggtggctgctgagcgggagccgccacgtcttccacccgacatattgcctagagtttgctgtgacttagatcttgattcagagatggagaaatcaggcccatcttctaccatctctgagcagcagctgcagaggcaagagggatggattaacaccaaaacagacttggctgagcagagtctcatttcatctgagaaatggcttcaactgcatgggcttaagagcaacaaattgaccttgaaacagattttgtcacagatcggattcccacattgtgaagattatgtggcgtctctggggagacctgtggcttctcggtatgctgatggtctgtttccacagctctacagagcagaagatggcagagtatacaatctgacagctaaatcagaactgatttatcagtttgtggaacatttaacacaagctgtggagagctacaagcagcgaatggactggctcaccagcaagagccggcagattttggtgtcatcttggaacagtgcgtcaccatagtgctggattttggcggcattctggagggggagcttgatctgtgccgagaggctctaacaatggttctccaggagcaggtggctcacataaccgagttcaatatcatacgggtttctcaagagcctgtgaagtggcaggaaaatgctactcctgtgaccgaacagtccatagctactgccatcagttgggttgagaaactgacggttgagctgactgtgagcgaggctggccgcctggatgctctgctggaagccgggagagacaagactttactcttcttcacagatggatctgtcatctgtcacacactttccaaggtgaagtacgcgcaagctgatgactccatccatttttggatgtcaatgtattgacatgaattttgatagggacatttttggaaataaagctttacctggaagaagtgattagatggtggtgtgtt

SEQ ID NO: 463811 - DNA, 1625 bp, Homo sapiens
atagtgctgcagcggcaattagctttaatctccgcccacgtccagtggctgagctacaacgaactgccccacctcttttaaagcgtctttctctgaactgtgcaaggaagagagcatcgcctgacagtggcgcaaggggcaacgccactcgccctgtccctctagcgtggcctctgtttgggggtctggggtggaggtcgtcccggcccgggtggttccggacgccggctttccgcacctggctcggtgacggcctcggcgccccgccctcttggccacggtccgcagccatcgccccagtgagggcgcggtctgtgggcggggccggctccaggagccgcgctgtgattggccgtgtccaggcaaccgcggagacgccgtcgtcaacagaccgcgctcggaaccagaggcgcgggtcacagagacctagaacatctggaatccttcgcccccggcgcgcagccttcgcccgccggaatcgctgccttatccaccagcgggatgcttacctcgcccgccctctcgggtcaggcgggcccgggaggatgggagggtggctgctgagcgggagccgccacgtcttccacccgacatattgcctagagtttgctgtgacttagatcttgattcagagatggagaaatcaggcccatcttctaccatctctgagcagcagctgcagaggcaagagggatggattaacaccaaaacagacttggctgagcagagtctcatttcatctgagaaatggcttcaactgcatgggcttaagagcaacaaattgaccttgaaacagattttgtcacagatcggattcccacattgtgaagcttgaagaattccctttagcatttcttataaggcaggtctggtagtgatgaactccctcggcttttgtttatctgtgaaagtctttatctctccttcatttgggaaggacagctttgattatgtggcgtctctggggagacctgtggcttctcggtatgctgatggtctgtttccacagctctacagagcagaagatggcagagtatacaatctgacagctaaatcagaactgatttatcagtttgtggaacatttaacacaagctgtggagagctacaagcagcgaatggactggctcaccagcaagagccggcagattttggtgtcatcttggaacagtgcgtcaccatagtgctggattttggcggcattctggagggggagcttgatctgtgccgagaggctctaacaatggttctccaggagcaggtggctcacataaccgagttcaatatcatacgggtttctcaagagcctgtgaagtggcaggaaaatgctactcctgtgaccgaacagtccatagctactgccatcagttgggttgagaaactgacggttgagctgactgtgagcgaggctggccgcctggatgctctgctggaagccgggagagacaagactttactcttcttcacagatggatctgtcatctgtcacacactttccaaggtgaagtacgcgcaagctgatgactccatccatttttggatgtcaatgtattgacatgaattttgatagggacatttttggaaataaagctttacctggaagaagtgattagatggtggtgtgtt

SEQ ID NO: 463812 - DNA, 692 bp, Homo sapiens
actgctaccaacagttctgatgctcaaaccacacccatctggagccacctgctgcctgggcccaaggagcctctgtaccctgctgggcaactttgaggaatcattgctgcaaggacgctttgcaccatctggccacattgagggcttcacagcagagactggagctagtgggtcctactgcccccaccatgtcacactgcctgtcactgtcaccttctttgaggtttctgagcaaaatgcccccacccacttcctgggctttgtggatctgaacctcctggggaggaagagttacagcgtgcccaaagtgggcaccacacaagtaacatttaaccccaaccagactgtggtgaagatgttcctggtgacctttgacttcttggacatggctgctgccacatgcccttattgtgccattgcctctttttggtgcctgtgggtgaggagaaaaatgctaaccccacctactgcctcctctgctactcgctgcaccttgggttctggagctcccgctcaggcctcttaagcctgaatggagatctctgccagcttttttcctgctagagcctggagctggacgcagggctcccctgcgaacttcaggctgtgactggggcccctcttaacccacgttattcacttttgccctgattgccattactctgaaccaatgtggatcaatgacctgccca

SEQ ID NO: 463813 - DNA, 886 bp, Homo sapiens
agacgatgtttcccacatataattcagagacccctgaaattaggtatccctcttgtagatgtccttgagatgctgctggacctgggaaagaggaaactgggatatgggtctatgccaaaaggtgcttctagttacaggacagagaggaaaggggcagagggagaaaaacctgaagtctgagaatctggattgcagaagactaccgaggtcgtgggagaagggagagaaaacaaggatgaaaaccgaaaggggaagaggcatgaaatgttgccagatgtcaaaaggcatttggagagaagggactggcagactattgcaaaaagggcacggggcagagggactatgttgtgagcctgcgaaagaagtttgtgtggggactgtgggcagtgaatgcgttgggaacaatatggaaaactgggagctgccttggaatctacagggccgggctgaagaaaagaagaatggtattcatgcagttcccattttacagatgaaaacaagaggactttttctgtgaagtcaagaaagtggttacaatggtactttcagcctgtccgaattatgtattgcccctcccctttttattaataacattgaagtgtgatgggacaaccactgaagccgtctgttgaaacctgctgggactttttagccattctcttcaacataaagaatgggtgtttttggagggggtgagaggaatggggaaatgttgtcaaagagtacaatgttttagttgagacaggaggaatatattttgttgagatctacagcacagcatggtgactgtagttaacaatgaagtattgtgtatttccaaattgctaagacaataaatttcaaatgttctcaccacaaaaaagataggttttgaggtgatgaatct

SEQ ID NO: 463814 - DNA, 712 bp, Homo sapiens
tgcggccgcgttgccgacctccagcagcagtcggcttctctacgcagaacccgggagtaggagactcagaatcgaatctcttctccctccccttcttgttttcggctttgtgagaaaccttaccatcaaacacaatggccagcaacgttaccaacaagacagatcctcgttccatgaactcccgtgtattcattgggaatctcaacactcttgtggtcaagaaatctgatgtggaggcaatcttttcgaagtatggcaaaattgtgggctgctctgttcataagggctttgccttctttcagtatgttaatgagagaaatgcccgggctgctgtagcaggagaggatggcagaatgattgctggccaggttttagatattaacctggctgcagagccaaaagtgaaccgaggaaaagcaggtgtgaaacgatctgcagcggagatgtacggctcctcttttgacttggattgtgactttcaacgggactattatgataggatgtacagttacccagcacgtgtacctcctcctcctcctattgctcgggctgtagtgccctcgaaacagaaaaacagtgcctctcatactttgatatatgtatgatttacctaggaccttgttaaaatctagattctaagtcaatagttctagggatcaggtagtaatattttaatattttaggctttgcaggacaagaagcaaaatcaagg

SEQ ID NO: 463815 - DNA, 3460 bp, Homo sapiens
agcggaagaatcctgatgcccaagccatgctgcacacatattaagtcaaattctggagagtgggcagctggatccacgtctaccctaatggatccctgtttattggatcagtaacagaaaaagacagtggtgtctacttgtgtgtggcaagaaacaaaatgggggatgatctgatactgatgcatgttagcctaagactgaaacctgccaaaattgaccacaagcagtattttagaaagcaagtgctccatgggaaagatttccaagtagattgcaaagcttccggctccccagtgccagagatatcttggagtttgcctgatggaaccatgatcaacaatgcaatgcaagccgatgacagtggccacaggactaggagatatacccttttcaacaatggaactttatacttcaacaaagttggggtagcggaggaaggagattatacttgctatgcccagaacaccctagggaaagatgaaatgaaggtccacttaacagttataacagctgctccccggataaggcagagtaacaaaaccaacaagagaatcaaagctggagacacagctgtccttgactgtgaggtcactggggatcccaaaccaaaaatattttggttgctgccttccaatgacatgatttccttctccattgataggtacacatttcatgccaatgggtctttgaccatcaacaaagtgaaactgctcgattctggagagtacgtatgtgtagcccgaaatcccagtggggatgacaccaaaatgtacaaactggatgtggtctctaaacctccattaatcaatggtctgtatacaaacagaactgttattaaagccacagctgtgagacattccaaaaaacactttgactgcagagctgaagggacaccatctcctgaagtcatgtggatcatgccagacaatattttcctcacagccccatactatggaagcagaatcacagtccataaaaatggaaccttggaaattaggaatgtgaggctttcagattcagccgactttatctgtgtggcccgaaatgaaggtggagagagcgtgttggtagtacagttagaagtactggaaatgctgagaagaccgacatttagaaatccatttaatgaaaaaatagttgcccagctgggaaagtccacagcattgaattgctctgttgatggtaacccaccacctgaaataatctggattttaccaaatggcacacgattttccaatggaccacaaagttatcagtatctgatagcaagcaatggttcttttatcatttctaaaacaactcgggaggatgcaggaaaatatcgctgtgcagctaggaataaagttggctatattgagaaattagtcatattagaaattggccagaagccagttattcttacctatgcaccagggacagtaaaaggcatcagtggagaatctctatcactgcattgtgtgtctgatggaatccctaagccaaatatcaaatggactatgccaagtggttatgtagtagacaggcctcaaattaatgggaaatacatattgcatgacaatggcaccttagtcattaaagaagcaacagcttatgacagaggaaactatatctgtaaggctcaaaatagtgttggtcatacactgattactgttccagtaatgattgtagcctaccctccccgaattacaaatcgtccacccaggagtattgtcaccaggacaggggcagcctttcagctccactgtgtggccttgggagttcccaagccagaaatcacgtgggagatgcctgaccactcccttctctcaacggcaagtaaagagaggacacatggaagtgagcagcttcacttacaaggtaccctagtcattcagaatccccaaacctccgattctgggatatacaaatgcacagcaaagaacccacttggtagtgattatgcagcaacgtatattcaagtaatctgacatgaaataataaagtcaacaacatctgggcagaatttattttttggaagaagtttaatcaaaggcagccataggcatgtaaatgaatttgaatacatttacagtattaaatttacaatgaacatgcaaaataaaaggacttgtaaataaatgcattatgaactgatgatactgatttatttaatggatctcaaaacaaacttttaacttaaggcacttttattttgccaacaaataacaataaacaaacattgaaacggttcactataaaataacaaatggctaatgtacctgaatttttcagtaaaaaaatgaacttctaataccagttgcctagtgtccacctcctatcaatgttacaagcatggcactcagaacagagacaatggaaaatattaaatctgcaatctttatgatgtaaatttaccatcctgatgtataaatattttgtggtttataaatttttttgctaaaacctacagaaaataagcactgaactgtcttatgattcaccatttgttcacactgaaaattttcattgatggggaatacaaaaatgttttaataactgcatttaaaaataaatgcaggctcacttttccacatgtaaaaagcaatgtaatacctgcacatcataaaatgtgaaaagggggttatttttgtccaaatacacccattaaaaaggttttaaaaatacaatgaaacttctttataactttaaaatctagctcaggcacccctggtttggagctgtttataaggaaatttttctgagcaggaatcgttgctctataagcatttcatttcattaattctttatgggatgggaaaatgcttgggagggtctaggtctattatatataatgaagtttcactgtatttaaaatctgatcaatcctacacaaaatgtgtttttgtaattcactgaatttatattacatgcttaattcaacctgaattaatttggggaatattaaatgattgatcttatctaaatctaggggtggggttttccagtgtaatttctccagcatctattcaaacattcacctagtacttacttaagaattataggagctttataaatgggaaaaaaatgccataggtcttagatatctcagtgcacaaaaccgagaattactaataagttagcccctgccaatcatttgagacatgtggaatagcgcccttgggttttcatcacactgactttcagttagccccatctcagcctaaaatgtgacctggttgcaacttatgtctgatgttagtaccctgtggctggaagtggtcaaagctacgcattgatctcctctacttccaggccaagaagggtaaatgcaatgactgacaaatgcaaccctattaagaaaaagcctacagtgtaaacaagagagtctatgggcttcttatatccaagaactgtgattgataggtatagctgactccatttgatttcaaggtcttgtctttaaggggagctggggtctcgc

SEQ ID NO: 463816 - DNA, 3552 bp, Homo sapiens
agactcagacatcattattattttaaactccacaagtgttttaatgtttagccaagtttaagaaccaatacttttagaaagcattaggaaagaatgccagtatagcatggtggaaagcgtaaggcttgagaaccagccctgtgacctaagagtgggcagctggatccacgtctaccctaatggatccctgtttattggatcagtaacagaaaaagacagtggtgtctacttgtgtgtggcaagaaacaaaatgggggatgatctgatactgatgcatgttagcctaagactgaaacctgccaaaattgaccacaagcagtattttagaaagcaagtgctccatgggaaagatttccaagtagattgcaaagcttccggctccccagtgccagagatatcttggagtttgcctgatggaaccatgatcaacaatgcaatgcaagccgatgacagtggccacaggactaggagatatacccttttcaacaatggaactttatacttcaacaaagttggggtagcggaggaaggagattatacttgctatgcccagaacaccctagggaaagatgaaatgaaggtccacttaacagttataacagctgctccccggataaggcagagtaacaaaaccaacaagagaatcaaagctggagacacagctgtccttgactgtgaggtcactggggatcccaaaccaaaaatattttggttgctgccttccaatgacatgatttccttctccattgataggtacacatttcatgccaatgggtctttgaccatcaacaaagtgaaactgctcgattctggagagtacgtatgtgtagcccgaaatcccagtggggatgacaccaaaatgtacaaactggatgtggtctctaaacctccattaatcaatggtctgtatacaaacagaactgttattaaagccacagctgtgagacattccaaaaaacactttgactgcagagctgaagggacaccatctcctgaagtcatgtggatcatgccagacaatattttcctcacagccccatactatggaagcagaatcacagtccataaaaatggaaccttggaaattaggaatgtgaggctttcagattcagccgactttatctgtgtggcccgaaatgaaggtggagagagcgtgttggtagtacagttagaagtactggaaatgctgagaagaccgacatttagaaatccatttaatgaaaaaatagttgcccagctgggaaagtccacagcattgaattgctctgttgatggtaacccaccacctgaaataatctggattttaccaaatggcacacgattttccaatggaccacaaagttatcagtatctgatagcaagcaatggttcttttatcatttctaaaacaactcgggaggatgcaggaaaatatcgctgtgcagctaggaataaagttggctatattgagaaattagtcatattagaaattggccagaagccagttattcttacctatgcaccagggacagtaaaaggcatcagtggagaatctctatcactgcattgtgtgtctgatggaatccctaagccaaatatcaaatggactatgccaagtggttatgtagtagacaggcctcaaattaatgggaaatacatattgcatgacaatggcaccttagtcattaaagaagcaacagcttatgacagaggaaactatatctgtaaggctcaaaatagtgttggtcatacactgattactgttccagtaatgattgtagcctaccctccccgaattacaaatcgtccacccaggagtattgtcaccaggacaggggcagcctttcagctccactgtgtggccttgggagttcccaagccagaaatcacgtgggagatgcctgaccactcccttctctcaacggcaagtaaagagaggacacatggaagtgagcagcttcacttacaaggtaccctagtcattcagaatccccaaacctccgattctgggatatacaaatgcacagcaaagaacccacttggtagtgattatgcagcaacgtatattcaagtaatctgacatgaaataataaagtcaacaacatctgggcagaatttattttttggaagaagtttaatcaaaggcagccataggcatgtaaatgaatttgaatacatttacagtattaaatttacaatgaacatgcaaaataaaaggacttgtaaataaatgcattatgaactgatgatactgatttatttaatggatctcaaaacaaacttttaacttaaggcacttttattttgccaacaaataacaataaacaaacattgaaacggttcactataaaataacaaatggctaatgtacctgaatttttcagtaaaaaaatgaacttctaataccagttgcctagtgtccacctcctatcaatgttacaagcatggcactcagaacagagacaatggaaaatattaaatctgcaatctttatgatgtaaatttaccatcctgatgtataaatattttgtggtttataaatttttttgctaaaacctacagaaaataagcactgaactgtcttatgattcaccatttgttcacactgaaaattttcattgatggggaatacaaaaatgttttaataactgcatttaaaaataaatgcaggctcacttttccacatgtaaaaagcaatgtaatacctgcacatcataaaatgtgaaaagggggttatttttgtccaaatacacccattaaaaaggttttaaaaatacaatgaaacttctttataactttaaaatctagctcaggcacccctggtttggagctgtttataaggaaatttttctgagcaggaatcgttgctctataagcatttcatttcattaattctttatgggatgggaaaatgcttgggagggtctaggtctattatatataatgaagtttcactgtatttaaaatctgatcaatcctacacaaaatgtgtttttgtaattcactgaatttatattacatgcttaattcaacctgaattaatttggggaatattaaatgattgatcttatctaaatctaggggtggggttttccagtgtaatttctccagcatctattcaaacattcacctagtacttacttaagaattataggagctttataaatgggaaaaaaatgccataggtcttagatatctcagtgcacaaaaccgagaattactaataagttagcccctgccaatcatttgagacatgtggaatagcgcccttgggttttcatcacactgactttcagttagccccatctcagcctaaaatgtgacctggttgcaacttatgtctgatgttagtaccctgtggctggaagtggtcaaagctacgcattgatctcctctacttccaggccaagaagggtaaatgcaatgactgacaaatgcaaccctattaagaaaaagcctacagtgtaaacaagagagtctatgggcttcttatatccaagaactgtgattgataggtatagctgactccatttgatttcaaggtcttgtctttaaggggagctggggtctcgc

SEQ ID NO: 463817 - DNA, 1110 bp, Homo sapiens
gaaagacagagaggcaaatgcagcgggttgggggtggtcagcagagaggggtcggtccattccagcttcctgtggacactgctggctgagggttggaggtggggcaggaacagactgcacctggcacacaggccagaccccctcaagcccctccatggcaggaactggtattgatcccattttaaagctgtgaaaactgcggggaaaaaaatgaagtgacttgcttgaggtcccagagctagtggcaaaaaggagcaatgaagtccatgacggcctgagtctgctggatgtcaagaccctcagttccaacgattcgacctcattcagcatcatctgctgtgctgatgtccaggggccagagcagttattgcaaaggaagatttctctaaggctcttcctatttttctgttagccatgcaaagtttataaacttttattaggatagcagtaaattgcagagcagtgacaatatgtgaaaaaggtcttgcttcactcaattaagtatgttctggatggttacagacttcatgtaggaaagagtttgcatccccttcagtctcctagcacctacccaaatacgtggagtggagtgaatttatgtataatgctggctatgtctaatcttggactattccctcacctcctaaataaaccacttgactttgaattcaacctgagacacaggcttcaagttcatggcttcaagttcatggctttggtgagggggagggagaagaaggacaaaccatggggactggggcccagtcagcctccaggcttcttcccagaacattttgggattggccacctccaggtccaaaccagggacagtagccagcatagcctcccgggccattcagcagaactgggggcctctgtgacctgggattctgctcagcaccatcctgtctaccccatgtggatgccctgttccagcagcacagaacccttggagccccttactgcaggttcattgcaagcagttaaatgggaaccttcacaggctccacctgcaagtgtgctgccaaagagcattgaaggaaaccactagggaccagcagcctcagcactgccagggaaaatgacagaaatgcacattcttggcccggc

SEQ ID NO: 463818 - DNA, 2441 bp, Homo sapiens
gcagagcctcagagaagttaaacgattgatcctatgtcagggggtagagtcaagactcatacctatgccttttaacttcaagattggacgactgattattggacagaatggcatcttgtcgacacctgcggtctcctgcattatcaggaagatcaaggcagctggtggaatcattctaacagccagccactgccctggaggaccagggggagagtttggagtgaagtttaatgttgccaatggagttctaaatggtgcactggatgttgaaaaagttgatgatgagcaagaacaaaattcctcctttcaggagacttacagttcaatatgggaaatgtaatttgttaaaatataaaagtgcaattgtgttacatgctgtacgaagtacatgttgacatgggcatctggcatccggcaagtggcagctccctcatcatcctgtctgatccaaattcaacccacattcagccaggtgaccatggtggctcccccccagggtggagctgatcccctccatgaggcagcttgcaacatggcagcctgcttcttcaaaggcgtcaagagagagtccccagaaagacagtcccgaatctcatctaaatcgggtttaggtgtagaacagatttccttggatgttcctctgatctggaaaactaaagatacaagctatctgccccctacatatgcaacacacaatggtctctggagcccaacgcacacttcagcccactctcacaggcattctctctgtccacaaaatatcaccgaagagtcttctgtgagtgcagcatggtgtgaacactgggagtacaaggagaaataagacacagttgctgtgctggagaagcttgtgcccagtggtggtgatactgccggagctcccacacaacggggtttcggggctgtggaccctgtgccaggaaaggaagggcgcagctcctgcaatgcggagcagccagggcagtgggcaccaggctttagcctccctttctcaccctacagagggcaggcccttcagctccattctcctccaaggctgcagagggggcaggaattgggggtgacaggagagctgtaaggtctccagtgggtcattctgggcccagagatgggtgctgaagctcccacgcctgcctgtgaaaatggagtcctctctcacctgggagagccaggtgctgccccgagaaggatgcatttatggcttcatgaagtctttcctgacccccgatgctgctgactatagagacaaagtctcactatgttgctcaggctggtcttgaactcctggcctcaagcgatcctcccaccttagcctcccaaagagttgggattatagacatgagccactgcacctggccgaccttgggcaagttcttaaacccttcaaagcctcatttttctccaatcataaaagggaaagatggtaatattttcccctccaaattcttgtaagtattaaacattgtatatgtattttgaacacgattaagctctaaacacttgttaggaagcaggagtagcatttgaaacaaacagctcttttcccacaggtcggatgccctcacagaattgagattatgtacgtaaaacaccaggtgcctaacccggcacagagcaggagggctaagcgtgacatccagcacgtggtcagtggaatccagtattcctacccacctctctagtctcccctccacccctctccctttcagaggcaccaagctgcttgtggtcttgtctattcccactccctgcctgactgaacattttctccacctcctgatcatcagcagcagaaactggctgctcttcctcctgggtagacagccagactgtatttcccagctgcccctgcagtgagatgtggccatcggagccagcattggccaatggactctgcatgggagtgacgcatgctgcctccaggcttgtccctaaaacctcccacgtgtcctccgcctgctcttcccacttccaaggagcacggcaattgtggaagacccagattagtgatggcagaaccatagatgggaggaacctgggtccctgacttaaagtatcatggatttggatgttcccttagtgagaaataaacttccattgtgtttaagcctttatttgtttatagttggttacagcaactgccttcttttaattaaaacactcctgctgcttcatgttgctggaatgcttgtaaccctgccctgcttcaccagggtaactcctacttggcctttaagtttatctctgctgtcacaccgtccagaaagccttctcccagcaccacaacccctccaccaagggttaggtgtctccagcagatgctgcacagctggctgccctttgcccaccctccccttctttctcatagaatcctaggactcctatgtatctagaaggagttgtgtggtccagtgctggccaagaagatgtgagagcaagtc

SEQ ID NO: 463819 - DNA, 1459 bp, Homo sapiens
cggggtcgcgcggacgcggctcgggccgcgggtgccgagaggtcgccgggccacccgcacccccgctccccgcctgacgcacggaggggccgggacgcgatttgccgcgagtgactggagccgcagccgtcgccgctgctgccgccgccgcccgggcccgctccgcccccagcccgccttcctcccgccgcgccctccgcctccgcccgcacctcgatagcgttcccctgtcttccccaacgccccggagccgccggccgctagcgtcagcgccagccaggtgagtgtggccgccgctcggcccgggcgggagaagcgcgcaggccccgcggccgggtggccggcttgggccggtgcagtcggcggcggcggcggtagcgggcccggctttcttcccctgcgcgggccgcggggcggaggggctacgcagtgaaggaggggcgcccccgccccgccaccgcctctgctcccaacgccccgaccgcccccaccgccttgccgccacagacaaagcgccggaggtgggagccctgcgggccgcctttgcctccgcgccgtctgccgggtgcggccgcggcccgcagagaccgggccgcgcgcttttccgttcctgagcgcccttgttcatttctgggtgaaagggacccgaattgtgcaacaggtttgggcgttagtccttattttccagcgggtctcttttgccagcgtgcaggaaccagatgtggctccctgctctcgggcgagtcccgcgtccagcgcccgcgactggctcctttgtgtgaccggtgaccggccctgtcgggtgggtggaggacacgggctcgaggccccagggctgcgccgaggctcctggacgcctcctcaggtcgcggggcttggcttccacgggcctgccagagatcattctaacagcgccccttgtgggctccactgggctccactcacacaacagggatgggggatgttggagctgcaggtctgttggagtttgctggaggtccactccagaccctgtttgcctgggtatcaccagcggaggctgcagaacagcaaatattgctgcctgatccttcctccggaagcttcgtcccagaggagcacccacctgtacaaggtgtctttgggctgctactgggaggtgtctcccagttagatgccaggcacaagtattgggtccgcaggttacccacacttctgtctgacttggctgcaaatcaaggttctcatcacccacaaccccttcaggaaggcactcatcagagaggggaagcatgtcaagatgaaactggtgaccagctgaatccaggagagattcgtgaaggtagcaggcatctttggggagagaatgattccattcacagtatcatttaaaagtgaaactgttgaattctagaagataaagttttgttttttaaagccgttggccaaaaagggagacaaacctcttgctttgtgactg

SEQ ID NO: 463820 - DNA, 6206 bp, Homo sapiens
ctttgagtaaccagcagctagtgaggacctaaggtacaatgagcatgcataagagaaaacagagaatcccctcttggggaccatccgttggctctgaagaaataaaaaagctacggaaacaactggaagaaatccaaaaagaaaatggccgatatattgaattactgaaagctaatgacatatgcttatatgatgacccgacaattcactggaaaggaaatcttaaaaactcaaaggtctctgttgttattcctagtgaccaggttcaaaaaaaaattattgtttattccaacgggaatcagcctggtggaaacagccagggaacagctgttcaggggataacttttaatgttagtcataatttacaaaagcagaccgccaatgtggtgccagtacagaggacttgcaatcttgtgactcctgtatctatttctggagtttacccttctgaaaacaagccatggcatcagaccacagttcctgcattggctaccaaccagcctgttcctctttgtcttcctgctgccatttctgctcagagtattctcgagcttcccacctctgaaagcgaatcaaatgtgcttggtgccactagtggctcactgattgctgtttcaattgaatctgagcctcaccaacatcattctttgcacacatgcctaaatgatcaaaattcttctgaaaataagaatggacaagagaaccccaaagtattgaagaaaatgaccccttgtgttacaaacatcccccacagctcctcagcaactgccactaaagtgcaccatggaaacaagtcctgcctgagcatacaggacttcagaggtgattttcaaaacacttttgttgtttcagttaccaccacagtctgctcgcagcctcccagaactgcaggtgattcttctccaatgagcattagtaagagtgcagacttgacaagtacagctacagtggtggcatcatctgcccctggagtagggaaggccaccattcctataagcactctttcgggaaaccctttggacaatggttggactctttcttgttctttgccttcttcaagtgttagtacttcagatttgaaaaacattaatagccttacacgaatctcttcagctggaaacacacagacaacgtggactactttgcaactggcaggaaacactattcagcccttaagccagacaccatcttctgctgtgactccagtattaaatgagtctggtactagccccaccacaagcaaccacagtagatatgtggctacagacatcaacttgaataattcctttccagcagatgggcagccagttgagcaagtagttgtaacattgccttcttgtccatctttacctatgcagccactaattgcccagccacaagttaaatctcagcctcccaaaaatatccttccactgaattcagcaatgcaagtgattcagatggctcagccagttgggtcagctgttaattcagctccaactaatcaaaatgttataattcttcagccacctagcaccaccccatgcccaacagtgatgagggcagaagtttccaaccaaacagtaggtcaacagatagtaatcatacaggctgctaatcagaatcctttgccactcctccctgctccacctcctggttctgttcgactccccatcaatggagccaatactgtaatagggtctaataattcagtgcaaaatgttccaacaccacagacttttggaggaaagcatcttgtccacatattaccaagaccttcatctttatcagcgtctaactcaacacaaactttttctgttaccatgtcaaaccaacagcctcaaaccatttctttaaatggacagctctttgctttgcagcctgtgatgtcttcatcaggaactacaaatcaaacccctatgcaaattattcaacccaccaccagcgaagatccaaataccaatgttgccctgaatacatttggtgctttggccagcctcaatcaaagcatatcacagatggctgggcaaagctgtgtacaattgtctattagccagcctgccaattctcaaactgctgcaaatagtcaaaccactacagctaactgtgtttcattaacaacaactgcagcacctcctgtgacaacagatagttcagccacactagctagtacttataatctagtgagtacttcctcaatgaacactgttgcttgtttgcctaacatgaaatctaaaaggttgaataagaagccaggtggcaggaaacacttagcagcaaacaagtcagcgtgtcccctgaattcagtcagagatgtgagcaagttagactgccccaacactgaaggctcagcagagccaccctgtaatgatggactgctagaaagcttccctgctgtgttaccatctgtctctgtgtctcaggcaaatagtgtgagtgtttctgcttcacattctttgggtgttctaagctctgaatcattaatacctgagtctgtatcgaaatctaagtcagcagaaaagtccagcccaccctcccaagaatctgtaacaagtgaacattttgcaatggccgcagcaaaatccaaagattctacccctaatctacaacaagagacatctcaggataaaccaccaagtagtttagcattatcagatgctgccaaaccctgcgcttcagccaatgtattgattccatctccaagtgatcctcacattttggtttctcaggttcctggtttgtcatctacaacaagcactacaagtactgactgtgtttctgaggtagaaatcattgctgaaccttgcagagttgagcaagattcatcagatacaatgcaaaccacaggtctcttaaaggggcaaggtttaactacattgctatctgatcttgctaaaaaaaaaaaccctcagaaatcatctctttctgatcagatggatcatcctgacttttcttcagaaaatcctaaaatagttgattcaagtgtgaatttacatcccaaacaggaactattactgatgaacaatgatgatagagatcctccacagcatcattcctgcctccctgatcaagaggttattaatggttctttgatcaacggtagacaggccgactctcccatgtcaaccagctctggcagtagtcgtagtttctcagttgcatccatgcttcctgaaacaacaagagaagatgtgaccagcaatgcaacaactaatacatgtgacagctgtacctttgattcaacttctcagccaccaagcatcaccagtttaagtgtgaataatcttatccatcagagcagcatcagccatcctctggccagctgtgcgggtttatccccaacttcagagcaaacaactgtgcctgcaacggttaatctgaccgtttcatctagctcctatggcagtcaacctcctggaccatctctgatgactgaatattcccaagaacagctaaatactatgactagtaccataccaaattcacagattcaagagccactcttaaagccaagccatgaaagccgtaaggattctgctaagcgtgctgtccaagatgaccttttactgtcttcagctaaacgtcaaaagcactgtcagccagcccccctcaggcttgaaagtatgtccctgatgagcagaactccagacaccatttctgaccaaactcaaatgatggtcagtcagatccctcctaattcttcaaactcagttgtgcctgttagcaacccagctcatggagatggccttacacgattatttccacctagtaacaactttgtgactcctgcattgaggcaaactgaagttcagtgtggttctcagccttcagttgctgaacagcagcaaacccaggcaagtcagcatctacaggccctgcagcagcatgttccagctcaaggtgtatctcaccttcatagtaaccatctctacataaagcagcagcagcagcagcagcagcagcagcagcagcaacagcaacaacaacaagcagggcagttaagagagaggcatcacttatatcaaatgcagcatcatgtacctcatgcagagagctctgtccactctcagccccataatgtccaccaacagaggactctgcaacaggaagttcagatgcagaaaaagaggaatcttgttcagggcacccagacctctcagctttccttacaaccaaagcaccatggaactgaccaatcccgatccaagactggccagccacatccccaccatcagcagatgcagcaacaaatgcagcaacactttggaagctcccagacagagaagagctgtgaaaacccttcaactagtcggaaccatcataaccatccccagaaccatctcaatcaagatattatgcaccaacagcaggatgttggaagcagacagcaaggttcaggggtttcatctgaacatgtatctggccataatccaatgcagaggcttttgacatcaagaggcttagagcagcaaatggtgtcccaaccaagtattgtgactagatcttcagacatgacctgtactccacacaggccagagagaaatagagtttcaagttattctgctgaggcactcattggaaagacatcttctaattcagagcagagaatggggatatcaattcagggttccagagtttcagatcagcttgaaatgagaagctatcttgatgttcccagaaataagagtttggctattcataatatgcagggtcgtgtggaccatactgtggcctcagatatccgcctttctgattgtcagacgtttaaaccaagtggagctagtcaacagccccagagtaattttgaagtacaatcttcaagaaacaatgaaataggtaaccctgtatcatcattgcggagtatgcagtcccaggcttttcgaattagtcaaaacactggccccccaccaattgaccgtcaaaagagattatcttacccaccagttcagagcatcccaacaggaaatggtattccatcaagggacagtgaaaatacttgtcaccaaagtttcatgcagagcttacttgcccctcacctcagtgatcaggtcattgggagccagaggtcactctcagaacatcagaggaatacacagtgtggtccatcctctgcaattgaatataattgtcccccaactcatgaaaatgtccatattagaagagagagtgagagtcagaatagggaaagttgtgacatgtcgttaggtgcaattaacaccaggaacagcaccttgaatattcctttttcaagttcctcttcctcaggagatattcaaggtcgaaacacaagccccaatgtttctgtacagaaatccaatcccatgaggattactgagagtcatgccaccaagggccacatgaaccctccagtcacaaccaacatgcatggggttgcaaggccagcgttgccacatccatctgtgtctcatggaaatggcgatcaaggccctgctgtacgtcaagctaattcttcagttccccagagatcaaggcatcccctgcaagacagcagtggttccaaaattcgtcagcctgaaaggaatcgttctggaaaccaaaggcaaagtactgtctttgatccaagtcttccccatcttcctctctctactggtggcagtatgattcttggacgtcaacaacctgccacagagaagagaggaagtattgttcgtttcatgcctgatagcccacaagtacctaatgataattcaggtcctgaccagcatacactatcacaaaattttggtttttcttttattcctgagggtggcatgaatccaccaataaatgctaatgcttctttcattccacaggttactcagcctagtgccactcgaactccagccctcatcccggtagatccgcaaaatactctgccctccttctatcctccatactctcctgctcatcctacactgtccaatgatatttcaatcccctattttcctaatcagatgttctcaaatcctagcacagagaagcgggatgattactcctttgccttgaaacatttattgggcccaccatgtatggatcagcatgtggtggataatggctacttcttagaaaaggataaagggatgatatcaaggagggaggagtacttcaaaagtattgttatattctattgcactgggtagcagatgctcagatgttgatctcatttatgcctgaagtctttgttctatgaatgtctaaaatatatcctaatgttttaaaaggtaaaa

SEQ ID NO: 463821 - DNA, 411 bp, Homo sapiens
ccagtatctgcatctgacatggcttccctacattcagaagataactgaaaactgattatacagacacacacacacaatccttctcttcatgtacatgtctggcacatgcacgcacaaatacatttgtaatctcctcccagacctgttgggtttgctcaaccaagttttcctcttctcccagatatgccaccaatgcacatgaccaactctcacttatccaattttaatatgacatctttgtttccagaaatagccacagcgcttcctgatggctcagcaatgtcacctttgcttacaatagcaaattcctctgcctctgactcttccaagcagtcctcaaacagacctgcccataacataagccatattctaggtcatgattgcagttcagctgtttaaatactgataaac

SEQ ID NO: 463822 - DNA, 5874 bp, Homo sapiens
ctttgagtaaccagcagctagtgaggacctaaggtacaatgagcatgcataagagaaaacagagaatcccctcttggggaccatccgttggctctgaagaaataaaaaagctacggaaacaactggaagaaatccaaaaagaaaatggccgatatattgaattactgaaagctaatgacatatgcttatatgatgacccgacaattcactggaaaggaaatcttaaaaactcaaaggtctctgttgttattcctagtgaccaggttcaaaaaaaaattattgtttattccaacgggaatcagcctggtggaaacagccagggaacagctgttcaggggataacttttaatgttagtcataatttacaaaagcagaccgccaatgtggtgccagtacagaggacttgcaatcttgtgactcctgtatctatttctggagtttacccttctgaaaacaagccatggcatcagaccacagttcctgcattggctaccaaccagcctgttcctctttgtcttcctgctgccatttctgctcagagtattctcgagcttcccacctctgaaagcgaatcaaatgtgcttggtgccactagtggctcactgattgctgtttcaattgaatctgagcctcaccaacatcattctttgcacacatgcctaaatgatcaaaattcttctgaaaataagaatggacaagagaaccccaaagtattgaagaaaatgaccccttgtgttacaaacatcccccacagctcctcagcaactgccactaaagtgcaccatggaaacaagtcctgcctgagcatacaggacttcagaggtgattttcaaaacacttttgttgtttcagttaccaccacagtctgctcgcagcctcccagaactgcaggtgattcttctccaatgagcattagtaagagtgcagacttgacaagtacagctacagtggtggcatcatctgcccctggagtagggaaggccaccattcctataagcactctttcgggaaaccctttggacaatggttggactctttcttgttctttgccttcttcaagtgttagtacttcagatttgaaaaacattaatagccttacacgaatctcttcagctggaaacacacagacaacgtggactactttgcaactggcaggaaacactattcagcccttaagccagacaccatcttctgctgtgactccagtattaaatgagtctggtactagccccaccacaagcaaccacagtagatatgtggctacagacatcaacttgaataattcctttccagcagatgggcagccagttgagcaagtagttgtaacattgccttcttgtccatctttacctatgcagccactaattgcccagccacaagttaaatctcagcctcccaaaaatatccttccactgaattcagcaatgcaagtgattcagatggctcagccagttgggtcagctgttaattcagctccaactaatcaaaatgttataattcttcagccacctagcaccaccccatgcccaacagtgatgagggcagaagtttccaaccaaacagtaggtcaacagatagtaatcatacaggctgctaatcagaatcctttgccactcctccctgctccacctcctggttctgttcgactccccatcaatggagccaatactgtaatagggtctaataattcagtgcaaaatgttccaacaccacagacttttggaggaaagcatcttgtccacatattaccaagaccttcatctttatcagcgtctaactcaacacaaactttttctgttaccatgtcaaaccaacagcctcaaaccatttctttaaatggacagctctttgctttgcagcctgtgatgtcttcatcaggaactacaaatcaaacccctatgcaaattattcaacccaccaccagcgaagatccaaataccaatgttgccctgaatacatttggtgctttggccagcctcaatcaaagcatatcacagatggctgggcaaagctgtgtacaattgtctattagccagcctgccaattctcaaactgctgcaaatagtcaaaccactacagctaactgtgtttcattaacaacaactgcagcacctcctgtgacaacagatagttcagccacactagctagtacttataatctagtgagtacttcctcaatgaacactgttgcttgtttgcctaacatgaaatctaaaaggttgaataagaagccaggtggcaggaaacacttagcagcaaacaagtcagcgtgtcccctgaattcagtcagagatgtgagcaagttagactgccccaacactgaaggctcagcagagccaccctgtaatgatggactgctagaaagcttccctgctgtgttaccatctgtctctgtgtctcaggcaaatagtgtgagtgtttctgcttcacattctttgggtgttctaagctctgaatcattaatacctgagtctgtatcgaaatctaagtcagcagaaaagtccagcccaccctcccaagaatctgtaacaagtgaacattttgcaatggccgcagcaaaatccaaagattctacccctaatctacaacaagagacatctcaggataaaccaccaagtagtttagcattatcagatgctgccaaaccctgcgcttcagccaatgtattgattccatctccaagtgatcctcacattttggtttctcaggttcctggtttgtcatctacaacaagcactacaagtactgactgtgtttctgaggtagaaatcattgctgaaccttgcagagttgagcaagattcatcagatacaatgcaaaccacaggtctcttaaaggggcaaggtttaactacattgctatctgatcttgctaaaaaaaaaaaccctcagaaatcatctctttctgatcagatggatcatcctgacttttcttcagaaaatcctaaaatagttgattcaagtgtgaatttacatcccaaacaggaactattactgatgaacaatgatgatagagatcctccacagcatcattcctgcctccctgatcaagaggttattaatggttctttgatcaacggtagacaggccgactctcccatgtcaaccagctctggcagtagtcgtagtttctcagttgcatccatgcttcctgaaacaacaagagaagatgtgaccagcaatgcaacaactaatacatgtgacagctgtacctttgattcaacttctcagccaccaagcatcaccagtttaagtgtgaataatcttatccatcagagcagcatcagccatcctctggccagctgtgcgggtttatccccaacttcagagcaaacaactgtgcctgcaacggttaatctgaccgtttcatctagctcctatggcagtcaacctcctggaccatctctgatgactgaatattcccaagaacagctaaatactatgactagtaccataccaaattcacagattcaagagccactcttaaagccaagccatgaaagccgtaaggattctgctaagcgtgctgtccaagatgaccttttactgtcttcagctaaacgtcaaaagcactgtcagccagcccccctcaggcttgaaagtatgtccctgatgagcagaactccagacaccatttctgaccaaactcaaatgatggtcagtcagatccctcctaattcttcaaactcagttgtgcctgttagcaacccagctcatggagatggccttacacgattatttccacctagtaacaactttgtgactcctgcattgaggcaaactgaagttcagtgtggttctcagccttcagttgctgaacagcagcaaacccaggcaagtcagcatctacaggccctgcagcagcatgttccagctcaaggtgtatctcaccttcatagtaaccatctctacataaagcagcagcagcagcagcagcagcagcagcagcagcaacagcaacaacaacaagcagggcagttaagagagaggcatcacttatatcaaatgcagcatcatgtacctcatgcagagagctctgtccactctcagccccataatgtccaccaacagaggactctgcaacaggaagttcagatgcagaaaaagaggaatcttgttcagggcacccagacctctcagctttccttacaaccaaagcaccatggaactgaccaatcccgatccaagactggccagccacatccccaccatcagcagatgcagcaacaaatgcagcaacactttggaagctcccagacagagaagagctgtgaaaacccttcaactagtcggaaccatcataaccatccccagaaccatctcaatcaagatattatgcaccaacagcaggatgttggaagcagacagcaaggttcaggggtttcatctgaacatgtatctggccataatccaatgcagaggcttttgacatcaagaggcttagagcagcaaatggtgtcccaaccaagtattgtgactagatcttcagacatgacctgtactccacacaggccagagagaaatagagtttcaagttattctgctgaggcactcattggaaagacatcttctaattcagagcagagaatggggatatcaattcagggttccagagtttcagatcagcttgaaatgagaagctatcttgatgttcccagaaataagagtttggctattcataatatgcagggtcgtgtggaccatactgtggcctcagatatccgcctttctgattgtcagacgtttaaaccaagtggagctagtcaacagccccagagtaattttgaagtacaatcttcaagaaacaatgaaataggtaaccctgtatcatcattgcggagtatgcagtcccaggcttttcgaattagtcaaaacactggccccccaccaattgaccgtcaaaagagattatcttacccaccagttcagagcatcccaacaggaaatggtattccatcaagggacagtgaaaatacttgtcaccaaagtttcatgcagagcttacttgcccctcacctcagtgatcaggtcattgggagccagaggtcactctcagaacatcagaggaatacacagtgtggtccatcctctgcaattgaatataattgtcccccaactcatgaaaatgtccatattagaagagagagtgagagtcagaatagggaaagttgtgacatgtcgttaggtgcaattaacaccaggaacagcaccttgaatattcctttttcaagttcctcttcctcaggagatattcaaggtcgaaacacaagccccaatgtttctgtacagaaatccaatcccatgaggattactgagagtcatgccaccaagggccacatgaaccctccagtcacaaccaacatgcatggggttgcaaggccagcgttgccacatccatctgtgtctcatggaaatggcgatcaaggccctgctgtacgtcaagctaattcttcagttccccagagatcaaggcatcccctgcaagacagcagtggttccaaaattcgtcagcctgaaaggaatcgttctggaaaccaaaggcaaagtactgtctttgatccaagtcttccccatcttcctctctctactggtggcagtatgattcttggacgtcaacaacctgccacagagaagagaggaagtattgttcgtttcatgcctgatagcccacaagtacctaatgataattcaggtcctgaccagcatacactatcacaaaattttggtttttcttttattcctgagggtggcatgaatccaccaataaatgctaatgcttctttcattccacaggttactcagcctagtgccactcgaactccagcctgggcaacagagccagactccatctattaaaatttgaaaacttaaaaaa

SEQ ID NO: 463823 - DNA, 6284 bp, Homo sapiens
ctttgagtaaccagcagctagtgaggacctaaggtacaatgagcatgcataagagaaaacagagaatcccctcttggggaccatccgttggctctgaagaaataaaaaagctacggaaacaactggaagaaatccaaaaagaaaatggccgatatattgaattactgaaagctaatgacatatgcttatatgatgacccgacaattcactggaaaggaaatcttaaaaactcaaaggtctctgttgttattcctagtgaccaggttcaaaaaaaaattattgtttattccaacgggaatcagcctggtggaaacagccagggaacagctgttcaggggataacttttaatgttagtcataatttacaaaagcagaccgccaatgtggtgccagtacagaggacttgcaatcttgtgactcctgtatctatttctggagtttacccttctgaaaacaagccatggcatcagaccacagttcctgcattggctaccaaccagcctgttcctctttgtcttcctgctgccatttctgctcagagtattctcgagcttcccacctctgaaagcgaatcaaatgtgcttggtgccactagtggctcactgattgctgtttcaattgaatctgagcctcaccaacatcattctttgcacacatgcctaaatgatcaaaattcttctgaaaataagaatggacaagagaaccccaaagtattgaagaaaatgaccccttgtgttacaaacatcccccacagctcctcagcaactgccactaaagtgcaccatggaaacaagtcctgcctgagcatacaggacttcagaggtgattttcaaaacacttttgttgtttcagttaccaccacagtctgctcgcagcctcccagaactgcaggtgattcttctccaatgagcattagtaagagtgcagacttgacaagtacagctacagtggtggcatcatctgcccctggagtagggaaggccaccattcctataagcactctttcgggaaaccctttggacaatggttggactctttcttgttctttgccttcttcaagtgttagtacttcagatttgaaaaacattaatagccttacacgaatctcttcagctggaaacacacagacaacgtggactactttgcaactggcaggaaacactattcagcccttaagccagacaccatcttctgctgtgactccagtattaaatgagtctggtactagccccaccacaagcaaccacagtagatatgtggctacagacatcaacttgaataattcctttccagcagatgggcagccagttgagcaagtagttgtaacattgccttcttgtccatctttacctatgcagccactaattgcccagccacaagttaaatctcagcctcccaaaaatatccttccactgaattcagcaatgcaagtgattcagatggctcagccagttgggtcagctgttaattcagctccaactaatcaaaatgttataattcttcagccacctagcaccaccccatgcccaacagtgatgagggcagaagtttccaaccaaacagtaggtcaacagatagtaatcatacaggctgctaatcagaatcctttgccactcctccctgctccacctcctggttctgttcgactccccatcaatggagccaatactgtaatagggtctaataattcagtgcaaaatgttccaacaccacagacttttggaggaaagcatcttgtccacatattaccaagaccttcatctttatcagcgtctaactcaacacaaactttttctgttaccatgtcaaaccaacagcctcaaaccatttctttaaatggacagctctttgctttgcagcctgtgatgtcttcatcaggaactacaaatcaaacccctatgcaaattattcaacccaccaccagcgaagatccaaataccaatgttgccctgaatacatttggtgctttggccagcctcaatcaaagcatatcacagatggctgggcaaagctgtgtacaattgtctattagccagcctgccaattctcaaactgctgcaaatagtcaaaccactacagctaactgtgtttcattaacaacaactgcagcacctcctgtgacaacagatagttcagccacactagctagtacttataatctagtgagtacttcctcaatgaacactgttgcttgtttgcctaacatgaaatctaaaaggttgaataagaagccaggtggcaggaaacacttagcagcaaacaagtcagcgtgtcccctgaattcagtcagagatgtgagcaagttagactgccccaacactgaaggctcagcagagccaccctgtaatgatggactgctagaaagcttccctgctgtgttaccatctgtctctgtgtctcaggcaaatagtgtgagtgtttctgcttcacattctttgggtgttctaagctctgaatcattaatacctgagtctgtatcgaaatctaagtcagcagaaaagtccagcccaccctcccaagaatctgtaacaagtgaacattttgcaatggccgcagcaaaatccaaagattctacccctaatctacaacaagagacatctcaggataaaccaccaagtagtttagcattatcagatgctgccaaaccctgcgcttcagccaatgtattgattccatctccaagtgatcctcacattttggtttctcaggttcctggtttgtcatctacaacaagcactacaagtactgactgtgtttctgaggtagaaatcattgctgaaccttgcagagttgagcaagattcatcagatacaatgcaaaccacaggtctcttaaaggggcaaggtttaactacattgctatctgatcttgctaaaaaaaaaaaccctcagaaatcatctctttctgatcagatggatcatcctgacttttcttcagaaaatcctaaaatagttgattcaagtgtgaatttacatcccaaacaggaactattactgatgaacaatgatgatagagatcctccacagcatcattcctgcctccctgatcaagaggttattaatggttctttgatcaacggtagacaggccgactctcccatgtcaaccagctctggcagtagtcgtagtttctcagttgcatccatgcttcctgaaacaacaagagaagatgtgaccagcaatgcaacaactaatacatgtgacagctgtacctttgattcaacttctcagccaccaagcatcaccagtttaagtgtgaataatcttatccatcagagcagcatcagccatcctctggccagctgtgcgggtttatccccaacttcagagcaaacaactgtgcctgcaacggttaatctgaccgtttcatctagctcctatggcagtcaacctcctggaccatctctgatgactgaatattcccaagaacagctaaatactatgactagtaccataccaaattcacagattcaagagccactcttaaagccaagccatgaaagccgtaaggattctgctaagcgtgctgtccaagatgaccttttactgtcttcagctaaacgtcaaaagcactgtcagccagcccccctcaggcttgaaagtatgtccctgatgagcagaactccagacaccatttctgaccaaactcaaatgatggtcagtcagatccctcctaattcttcaaactcagttgtgcctgttagcaacccagctcatggagatggccttacacgattatttccacctagtaacaactttgtgactcctgcattgaggcaaactgaagttcagtgtggttctcagccttcagttgctgaacagcagcaaacccaggcaagtcagcatctacaggccctgcagcagcatgttccagctcaaggtgtatctcaccttcatagtaaccatctctacataaagcagcagcagcagcagcagcagcagcagcagcagcaacagcaacaacaacaagcagggcagttaagagagaggcatcacttatatcaaatgcagcatcatgtacctcatgcagagagctctgtccactctcagccccataatgtccaccaacagaggactctgcaacaggaagttcagatgcagaaaaagaggaatcttgttcagggcacccagacctctcagctttccttacaaccaaagcaccatggaactgaccaatcccgatccaagactggccagccacatccccaccatcagcagatgcagcaacaaatgcagcaacactttggaagctcccagacagagaagagctgtgaaaacccttcaactagtcggaaccatcataaccatccccagaaccatctcaatcaagatattatgcaccaacagcaggatgttggaagcagacagcaaggttcaggggtttcatctgaacatgtatctggccataatccaatgcagaggcttttgacatcaagaggcttagagcagcaaatggtgtcccaaccaagtattgtgactagatcttcagacatgacctgtactccacacaggccagagagaaatagagtttcaagttattctgctgaggcactcattggaaagacatcttctaattcagagcagagaatggggatatcaattcagggttccagagtttcagatcagcttgaaatgagaagctatcttgatgttcccagaaataagagtttggctattcataatatgcagggtcgtgtggaccatactgtggcctcagatatccgcctttctgattgtcagacgtttaaaccaagtggagctagtcaacagccccagagtaattttgaagtacaatcttcaagaaacaatgaaataggtaaccctgtatcatcattgcggagtatgcagtcccaggcttttcgaattagtcaaaacactggccccccaccaattgaccgtcaaaagagattatcttacccaccagttcagagcatcccaacaggaaatggtattccatcaagggacagtgaaaatacttgtcaccaaagtttcatgcagagcttacttgcccctcacctcagtgatcaggtcattgggagccagaggtcactctcagaacatcagaggaatacacagtgtggtccatcctctgcaattgaatataattgtcccccaactcatgaaaatgtccatattagaagagagagtgagagtcagaatagggaaagttgtgacatgtcgttaggtgcaattaacaccaggaacagcaccttgaatattcctttttcaagttcctcttcctcaggagatattcaaggtcgaaacacaagccccaatgtttctgtacagaaatccaatcccatgaggattactgagagtcatgccaccaagggccacatgaaccctccagtcacaaccaacatgcatggggttgcaaggccagcgttgccacatccatctgtgtctcatggaaatggcgatcaaggccctgctgtacgtcaagctaattcttcagttccccagagatcaaggcatcccctgcaagacagcagtggttccaaaattcgtcagcctgaaaggaatcgttctggaaaccaaaggcaaagtactgtctttgatccaagtcttccccatcttcctctctctactggtggcagtatgattcttggacgtcaacaacctgccacagagaagagaggaagtattgttcgtttcatgcctgatagcccacaagtacctaatgataattcaggtcctgaccagcatacactatcacaaaattttggtttttcttttattcctgagggtggcatgaatccaccaataaatgctaatgcttctttcattccacaggttactcagcctagtgccactcgaactccagccctcatcccggtagatccgcaaaatactctgccctccttctatcctccatactctcctgctcatcctacactgtccaatgatatttcaatcccctattttcctaatcagatgttctcaaatcctagcacagagaaggtaaacagtggaagtttaaataaccgatttggatcaattttatctcctcccagacctgttgggtttgctcaaccaagttttcctcttctcccagatatgccaccaatgcacatgaccaactctcacttatccaattttaatatgacatctttgtttccagaaatagccacagcgcttcctgatggctcagcaatgtcacctttgcttacaatagcaaattcctctgcctctgactcttccaagcagtcctcaaacagacctgcccataacataagccatattctaggtcatgattgcagttcagctgtttaaatactgataaac

SEQ ID NO: 463824 - DNA, 2082 bp, Homo sapiens
gaagaacctggcaaggccggaagagccgtagttaatgggtcatgtgtgcagtacccgcccgactttgcggtcggtcctttcacagacctccctttatcctcccagaagtttttcttggaaagcttcctggccacttgccctgagcgctggcttgctgtttagcactttcaaatactagtgcgaatgttgcagcgggacagtgtgagccgaggacattggatttggcaacagcaggacctgatatgaccttaatttagatgtagaggttcacgtttcaatggtgggtctgaaggcagactgagggaggtcaaggaaaggttccagaggagacctggcctccgcggggaactcagggggccaaggaggaagggcactgaggtggtggagaagagtcaggaccgccagggtcacggtgtcaagggcggcgcctctgtggcatccagggatcagtcactcggcttcgcttccttgcctttttcctgaagacagaaaagaaggaaaccatgcattgctatctaattccaggcagcgcccgttctgttggtgaggagaccgaggcccaaggcacagggaaagaccccagaagagggcctctcttggaacaggcctggggcccttcactgatctgtggctccaccacccccaccgtgatcggcaggtaccagggccacgtccccactgtggccttctcctttggcgctccctacggcaccaccaccctcaagtacttccaggaccaccgcaacagagccatggagaagagccacactcccttcagccaaggcggccatttccccaccatcttctccaccaaccccaacctcctgctgatggagcgcgccagcacccgggaccgctggctgcacaagcccagctacactcgcttcaacctggacagccatcgctccacagagcttacgaatttctaccagatggtccagcagcatcggaagtactatcaagacaagacgggcacagtgcctcgagtcccctactttgcgatgcccgtgagggagccggaacggtaccccctccccaccgtcctgtgagtgcctgccctcccttcatctacgcagtcaagaaacgcacccatggggcacctgctctcggccaggcatgcacagcacacagactgagaaatgagttgaggatcttgccctaaaacgtgcagtgcagagagtgatggttacagagcaagggggtcagggcattggcagcctcaggggggatggtggtagcctgaatgggcgaatcaggaagagtgctttcccggccagatgcactgggagtttgggagaagctccgtaagcttagtgggcctgaatctgcggactgatgccccgcctgcaaaggcagcctggcagctacactagtcctaacgtgggcgccgatgcagagcgcagtaaggagctgctgccctctggtggatacagagggcactacaccgagcaggaatctcccccggtcccgttcacatttggaaaatgttctcctaaggactttctgtccatctaactaaataggaaagttccttgcctcctgcccctctctgcttttatctaggagagctcctttctccagggaaggcccactctgccctgaaagatgacttgggtactgtggtttctgtgctctctccttcctgaagcgcaggcagggggatcattggctcacacgaggtgtcctggagtggggtagggtggtgggtggtgcctggcctgggaggtcagtggatagagcttgggatttagctccatgccaaccactcccggcttgcctcagagtcctaagattcaccatcatccttactgataaaacagcatctgttttcataagtttaatggtttttaaagaaacaggcttcactgcatctaaaagttcctttttgcaaagccctgacttggcgtcgttttgtccacacgatcacttgtgagggaagaggtgttattatccccactttactgataaagatattgaggctcagagaaggtgagaaagttgcccaagcttacatagttgggaagtaacacagccagaatttgaattcaggtctttctgactcccaagccctggtttttccac

SEQ ID NO: 463825 - DNA, 640 bp, Homo sapiens
agaggatccccccgcgcagtgcatttcttagaatatttgttgtgtgtttactccttgtccagagcttcacatgcattactgcatttattcctcaagtcaaagctaagagggggataccaccactgggccattcttaaatatgcacacttctagcaggagttaggaccagagtccgtcccaggtctgtctgacatctgtgtcctcactcttaaccactgtgccattatgtaaatacaggttattcccaccccaagtccagggggacttatcaggtgttaaactgacgagtagccggcaggtcagcttgagctggaaagtgggcacgtggggctgtgggtgggcacgcaccaccttccttccctggcacactgcataacaccagtcccatcctcacccctaggcctcctctgtgcccaaagaagaagtggcaccttttaagactagcccccgagaacctgaagacctaccagaccttcccatcagggaagagggtctctccacaggagcggaaaaagagagactgctactttgagttcagagcatgagacttttagttcagagcagagcctgatgcctgagatcctgggtcgtgaccagcctggcttgcttggaataaaatctttagccatgaaaaaaaaac

SEQ ID NO: 463826 - DNA, 1362 bp, Homo sapiens
gaagaacctggcaaggccggaagagccgtagttaatgggtcatgtgtgcagtacccgcccgactttgcggtcggtcctttcacagacctccctttatcctcccagaagtttttcttggaaagcttcctggccacttgccctgagcgctggcttgctgtttagcactttcaaatactagtgcgaatgttgcagcgggacagtgtgagccgaggacattggatttggcaacagcaggacctgatatgaccttaatttagatgtagaggttcacgtttcaatggtgggtctgaaggcagactgagggaggtcaaggaaaggttccagaggagacctggcctccgcggggaactcagggggccaaggaggaagggcactgaggtggtggagaagagtcaggaccgccagggtcacggtgtcaagggcggcgcctctgtggcatccagggatcagtcactcggcttcgcttccttgcctttttcctgaagacagaaaagaaggaaaccatgcattgctatctaattccaggcagcgcccgttctgttggtgaggagaccgaggcccaaggcacagggaaagaccccagaagagggcctctcttggaacaggcctggggcccttcactgatctgtggctccaccacccccaccgtgatcggcaggtaccagggccacgtccccactgtggccttctcctttggcgctccctacggcaccaccaccctcaagtacttccaggaccaccgcaacagagccatggagaagagccacactcccttcagccaaggcggccatttccccaccatcttctccaccaaccccaacctcctgctgatggagcgcgccagcacccgggaccgctggctgcacaagcccagctacactcgcttcaacctggacagccatcgctccacagagcttacgaatttctaccagatggtccagcagcatcggaagtactatcaagacaagacgggcacagtgcctcgagtcccctactttgcgatgcccgtgagggagccggaacggtaccccctccccaccgtcctgttgcctggccacttgcactgctgctgacagtttcacaacgaacgcaaagggccaaccaggtggttgggagaagagggcctcctctgtgcccaaagaagaagtggcaccttttaagactagcccccgagaacctgaagacctaccagaccttcccatcagggaagagggtctctccacaggagcggaaaaagagagactgctactttgagttcagagcatgagacttttagttcagagcagagcctgatgcctgagatcctgggtcgtgaccagcctggcttgcttggaataaaatctttagccatgaaaaaaaaac

SEQ ID NO: 463827 - DNA, 1802 bp, Homo sapiens
gaagaacctggcaaggccggaagagccgtagttaatgggtcatgtgtgcagtacccgcccgactttgcggtcggtcctttcacagacctccctttatcctcccagaagtttttcttggaaagcttcctggccacttgccctgagcgctggcttgctgtttagcactttcaaatactagtgcgaatgttgcagcgggacagtgtgagccgaggacattggatttggcaacagcaggacctgatatgaccttaatttagatgtagaggttcacgtttcaatggtgggtctgaaggcagactgagggaggtcaaggaaaggttccagaggagacctggcctccgcggggaactcagggggccaaggaggaagggcactgaggtggtggagaagagtcaggaccgccagggtcacggtgtcaagggcggcgcctctgtggcatccagggatcagtcactcggcttcgcttccttgcctttttcctgaagacagaaaagaaggaaaccatgcattgctatctaattccaggcagcgcccgttctgttggtgaggagaccgaggcccaaggcacagggaaagaccccagaagagggcctctcttggaacaggcctggggcccttcactgatctgtggctccaccacccccaccgtgatcggcaggtaccagggccacgtccccactgtggccttctcctttggcgctccctacggcaccaccaccctcaagtacttccaggaccaccgcaacagagccatggagaagagccacactcccttcagccaaggcggccatttccccaccatcttctccaccaaccccaacctcctgctgatggagcgcgccagcacccgggaccgctggctgcacaagcccagctacactcgcttcaacctggacagccatcgctccacagagcttacgaatttctaccagatggtccagcagcatcggaagtactatcaagacaagacgggcacagtgcctcgagtcccctactttgcgatgcccgtgagggagccggaacggtaccccctccccaccgtcctgttgcctggccacttgcactgctgctgacagtttcacaacgaacgcaaagggccaaccaggtggttgggagaagagggtcagtgacaggcctggggcaagcccctccctcccggaatcccctccatcagcaccatcaccatttcttagaatatttgttgtgtgtttactccttgtccagagcttcacatgcattactgcatttattcctcaagtcaaagctaagagggggataccaccactgggccattcttaaatatgcacacttctagcaggagttaggaccagagtccgtcccaggtctgtctgacatctgtgtcctcactcttaaccactgtgccattatgtaaatacaggttattcccaccccaagtccagggggacttatcaggtgttaaactgacgagtagccggcaggtcagcttgagctggaaagtgggcacgtggggctgtgggtgggcacgcaccaccttccttccctggcacactgcataacaccagtcccatcctcacccctaggcctcctctgtgcccaaagaagaagtggcaccttttaagactagcccccgagaacctgaagacctaccagaccttcccatcagggaagagggtctctccacaggagcggaaaaagagagactgctactttgagttcagagcatgagacttttagttcagagcagagcctgatgcctgagatcctgggtcgtgaccagcctggcttgcttggaataaaatctttagccatgaaaaaaaaac

SEQ ID NO: 463828 - DNA, 1285 bp, Homo sapiens
gaagaacctggcaaggccggaagagccgtagttaatgggtcatgtgtgcagtacccgcccgactttgcggtcggtcctttcacagacctccctttatcctcccagaagtttttcttggaaagcttcctggccacttgccctgagcgctggcttgctgtttagcactttcaaatactagtgcgaatgttgcagcgggacagtgtgagccgaggacattggatttggcaacagcaggacctgatatgaccttaatttagatgtagaggttcacgtttcaatggtgggtctgaaggcagactgagggaggtcaaggaaaggttccagaggagacctggcctccgcggggaactcagggggccaaggaggaagggcactgaggtggtggagaagagtcaggaccgccagggtcacggtgtcaagggcggcgcctctgtggcatccagggatcagtcactcggcttcgcttccttgcctttttcctgaagacagaaaagaaggaaaccatgcattgctatctaattccaggcagcgcccgttctgttggtgaggagaccgaggcccaaggcacagggaaagaccccagaagagggcctctcttggaacaggcctggggcccttcactgatctgtggctccaccacccccaccgtgatcggcaggtaccagggccacgtccccactgtggccttctcctttggcgctccctacggcaccaccaccctcaagtacttccaggaccaccgcaacagagccatggagaagagccacactcccttcagccaaggcggccatttccccaccatcttctccaccaaccccaacctcctgctgatggagcgcgccagcacccgggaccgctggctgcacaagcccagctacactcgcttcaacctggacagccatcgctccacagagcttacgaatttctaccagatggtccagcagcatcggaagtactatcaagacaagacgggcacagtgcctcgagtcccctactttgcgatgcccgtgagggagccggaacggtaccccctccccaccgtcctgcctcctctgtgcccaaagaagaagtggcaccttttaagactagcccccgagaacctgaagacctaccagaccttcccatcagggaagagggtctctccacaggagcggaaaaagagagactgctactttgagttcagagcatgagacttttagttcagagcagagcctgatgcctgagatcctgggtcgtgaccagcctggcttgcttggaataaaatctttagccatgaaaaaaaaac

SEQ ID NO: 463829 - DNA, 582 bp, Homo sapiens
gagtgttatggtgaaaggggagagaaaatggtatggaaggaagggtcagcaacaaatgaggaatctaggctataatggtgttcaaatttttttttccatttcagggacaccctctttttaaaggacattcaattcaaatgtatcttctctggttaaagtatggtgaagtctgtcctgtgggcactccccattgactcctagcagctcttgagccccatcttcaggatccgtactttgatagtcactgacaattagctttgaaaatctatagttccaatcctgtgaaatgagaagaatgttgaagctataaaggaggtctttgcctgcattcagattctgacaccaaagactcctctgattatactgaagtatgtaagaaaaccttctcttgaaatcaaggaccatttctcttcatcttatcttgagctacataccaaatatgagtacacatagttaggattcaataaataatttaagatacttgtgaaaaccttgctctgactggttctatttttacattcagagaggaaagcatcctgtattctccctataaacaaatctaggagaatagggtcatggaca

SEQ ID NO: 463830 - DNA, 1061 bp, Homo sapiens
cattacttcatcaagtcatgaatgagagaggccagtaggatttttttaaaggaggatgaaggaaggtttgggaaacaaggaacaaagagcttcataagtgttgtcaggttctgcagccttttcataggatttagccaggagcaagtcttccagctcttggaaagtgtgaatgcaggctgtagtgtttactctggttccccatggcagtctgtgctggcgcaggaaaggaaaggaaggaggggtgaagaggagaggttggctagtgttaaagggagagcttttccacagggttctatggttgctatagtaacagcttcttttgtttgtacatattcagaacagctgcttctttttggttgctggtggcagggatattatggaggcaacagacgcatgagagtgaggtatttatctgagggcgattgaagtcaccagcttaacagtagtggaaagaccttaagccagagaactccaggttcaagaaccaccacctgcaaacttggcaaatttggacaaatgtctctctgagtttcattgtcttcatccacaaataaagcaagattacttcgcctacagaattgcgggacaccctctttttaaaggacattcaattcaaatgtatcttctctggttaaagtatggtgaagtctgtcctgtgggcactccccattgactcctagcagctcttgagccccatcttcaggatccgtactttgatagtcactgacaattagctttgaaaatctatagttccaatcctgtgaaatgagaagaatgttgaagctataaaggaggtctttgcctgcattcagattctgacaccaaagactcctctgattatactgaagtatgtaagaaaaccttctcttgaaatcaaggaccatttctcttcatcttatcttgagctacataccaaatatgagtacacatagttaggattcaataaataatttaagatacttgtgaaaaccttgctctgactggttctatttttacattcagagaggaaagcatcctgtattctccctataaacaaatctaggagaatagggtcatggaca

SEQ ID NO: 463831 - DNA, 1229 bp, Homo sapiens
cattacttcatcaagtcatgaatgagagaggccagtaggatttttttaaaggaggatgaaggaaggtttgggaaacaaggaacaaagagcttcataagtgttgtcaggttctgcagccttttcataggatttagccaggagcaagtcttccagctcttggaaagtgtgaatgcaggctgtagtgtttactctggttccccatggcagtctgtgctggcgcaggaaaggaaaggaaggaggggtgaagaggagaggttggctagtgttaaagggagagcttttccacagggttctatggttgctatagtaacagcttcttttgtttgtacatattcagaacagctgcttctttttggttgctggtggcagggatattatggaggcaacagacgcatgagagtgaggtatttatctgagggcgattgaagtcaccagcttaacagtagtggaaagaccttaagccagagaactccaggttcaagaaccaccacctgcaaacttggcaaatttggacaaatgtctctctgagtttcattgtcttcatccacaaataaagcaagattacttcgcctacagaattgcgaaattatgaccagaccatgagggtatgaaggatgaggaaaagggagcagtcatggagctgttttggagggagtcataattccttagacctctgacaactggaactctcaatctgccagtgaaagctgacatgagcccaataaggatggtcttttctattcaaagatagggacaccctctttttaaaggacattcaattcaaatgtatcttctctggttaaagtatggtgaagtctgtcctgtgggcactccccattgactcctagcagctcttgagccccatcttcaggatccgtactttgatagtcactgacaattagctttgaaaatctatagttccaatcctgtgaaatgagaagaatgttgaagctataaaggaggtctttgcctgcattcagattctgacaccaaagactcctctgattatactgaagtatgtaagaaaaccttctcttgaaatcaaggaccatttctcttcatcttatcttgagctacataccaaatatgagtacacatagttaggattcaataaataatttaagatacttgtgaaaaccttgctctgactggttctatttttacattcagagaggaaagcatcctgtattctccctataaacaaatctaggagaatagggtcatggaca

SEQ ID NO: 463832 - DNA, 994 bp, Homo sapiens
cattacttcatcaagtcatgaatgagagaggccagtaggatttttttaaaggaggatgaaggaaggtttgggaaacaaggaacaaagagcttcataagtgttgtcaggttctgcagccttttcataggatttagccaggagcaagtcttccagctcttggaaagtgtgaatgcaggctgtagtgtttactctggttccccatggcagtctgtgctggcgcaggaaaggaaaggaaggaggggtgaagaggagaggttggctagtgttaaagggagagcttttccacagggttctatggttgctatagtaacagcttcttttgtttgtacatattcagaacagctgcttctttttggttgctggtggcagggatattatggaggcaacagacgcatgagagtgaggtatttatctgagggcgattgaagtcaccagcttaacagtagtggaaagaccttaagccagagaactccaggttcaagaaccaccacctgcaaacttggcaaatttggacaaatgtctctctgagtttcattgtcttcatccacaaataaagcaagattacttcgcctacagaattgcgaaattatgaccagaccatgagggtatgaaggatgaggaaaagggagcagtcatggagctgttttggagggagtcataattccttagacctctgacaactggaactctcaatctgccagtgaaagctgacatgagcccaataaggatggtcttttctattcaaagataggtccgtactatttccaatttagttttaagaatcaacttaaaatgttgttaactatacatatatttcacttttgaaagaaaatattagcttgtcatcaaacaggataaaccaagagacatcagtctttttgactgatatgaatcacatttagctaaatacaccagttagcaatatctgtccttaagattgacagtcttaaatataacagtttaataaagctcttacttttctatttgtttcttt

SEQ ID NO: 463833 - DNA, 1300 bp, Homo sapiens
gtgacgtttcacaattttgtgctttatattagtgatactgctgtttaaaatggcccccaagcgtaatgctgaagggctgtctactgtttctacatgcaagaaggctgcaatgtgccttatagagaaaggatgtgagttaggtgaacaggtgctccagatgcctggagatcttcctgagcatagagtggagagaaccctgcttcaccacacctctgcacaggaaggatgggtggctcaggccatccagctcagtgaaacacctgcaatttctagggccctacagtgtgttcagcctctacgtctcatgcagaaaatcagcaaatcctcaaagggaagacggagaaaatggaggactctccttattatgtatgataccttcatgacgattaagaagaaaaccagttgccacattatgagctacactttggagaaattcccttgcaacatggatgcagctggaggccattatcttaaccaattactgcaagaacagaaatgccaaccacatgttctctaacttacaagtgggagataaacattgagtgcacatggacacaaacatgtgaatagacactagggcttacttgagggtggagggtgagaaaagaatgagagttgaaaagctacctctcgggtactatgttcactgcctgggtaataagctcatttgtacatcaaaccctagcgacatgtgacttacccatagagcaaacctgcacgtgtacctaatgaacctaaaataaaggttgaaaaaggaaaaaaaattgctagtaagaagctgaaatgaaatggctacttattgaatatctctggtctgcaaggaaaaaaaatctactatgagaaaatacctactctgaaagagactctctgtatagctctgccctcctgaattgcatgtccaaattgcattggaaaaaaatgaggaaaaattctggactcccaaggtagtagttggaaaagggagggcttcataagccccccagaagtgtcttgtggaccccctgaaaatgcttccagatccccagtcctcagatcacaccttgggaactactgtctgtcaccctacagtaagggaggaaacaacagcagaacttcatgttagctcagaccagctgcagatgctcatctgaactttgagaatggtcaaataaaagtaaaacctgatggaacaccactgtgactgtctatgctttcctgttttggagataggtctgccacaggacttcatatttctgccagagatccatgcatacttctctttgttctatgtttgacactgtaataagcaacagccattgct

SEQ ID NO: 463834 - DNA, 739 bp, Homo sapiens
atccccagcttaattactattctctggcatgttatttcagtacataaattatcaatatgattttgtgtcaaaaccaacaatttgaccaggcatgttggctcacacctgcaatcccagcactttgggaggctgaggcaggagaataatttgaaccctggaggcggaggttgcagtgagctgagatcatgccactgcactccagcctaggcaacagagtgagactctgtctcaaacaaacaaacaaacatcccccaacaatttatgcaaacaacatcagggaagctaggaagctctatgagctattctctgccgaggcttttagatcaagttccatacccatgtgtctctggaattctacagtgagaagcaaaagtgctcaggagttaagagaagcagacgtccgaaattatctccatgcattaccaaaaaccgtgggcaccacggcacggggaaaacttaccaggtacaatgagccagtgactgttactgaatttcttaagattacacttttcccaactactgcagactgcttcagaatagaagaagctcccagagctgtctaccctcatccacaaaatctgttgcacctggatcctccccattcctcctattaccgcccccttcaggtcaccaatagtgtgaaatactgacagtgctgtctggaccctctccttcctccagttgctccttctcacatccaggctgccaaattagatcttctcaaaatcttgctcatggt

SEQ ID NO: 463835 - DNA, 280 bp, Homo sapiens
atccccagcttaattactattctctggcatgttatttcagtacataaattatcaatatgattttgtgtcaaaaccaacaatttgaccaggcatgttggctcacacctgtaatcccagctactcgggaggctgaggcaggagaatcgcttgaacctgggaggcagagattgcggtgagttgagatcgtgccattgcactccagcctgggcaacaagagtgaaaactctgtctcaaaaaaaaaaagaaaaaaggatacccaaagaaaaagttccaagctggc

SEQ ID NO: 463836 - DNA, 966 bp, Homo sapiens
tgcacccatgatgtgctacacacttgccattgcacctttcacttttaagtcaagacaagagactgcaaataccttacaatggctttcaaggttctctaagaggtctttcccagcccacctttacttcctaataagcactttattaagcaatatcagattattgtctattcccagaatttttcaaagccatcctagttcgctgcccttgctatttccagtacttggcattccctctacttctctatgcctgaaaatgatggaaatggctttggaattgggcaatagccaacaaaagggaacctcacttctacagcagcaaggaactgcattctgccaaaaacctaatgaacttggaagcagattattttctggagtctgtagaaaattctcatccactcctaatacattttgtctgatacattatttctgccctctcctcctggatattgaattagatgaatgttagatattttcatcattgtccttaggttgcttatgttttgacatgtttcatgtgtatcgttcatctttctttctcactagtgttcagagagacaggaggggtggggaggagggtgaggtgggtgtttagggattaactttgtctttaatttttagagcacatgtaaaactctttggaggtgtttcataagtgtaggaggaggtccagatgtccaactgggtattcaaaagcattcagaacgcattccctgtttactcttttctaaaacatcatctattacatttattactgtacacatacctgtctactttctgttcctcaaactcccctcagactctcataccttctttccttctgtacattgttctaattagaatgccttgctttgaattcacctggacacattttctgaagactgtgcgggcagacaagagtctgttgactttgcaagtgatttgtgatgtccatgtgattggtgacattgagaacagcagtttctgtaa

SEQ ID NO: 463837 - DNA, 1068 bp, Homo sapiens
cttaactgtgaagagagtgtgaaaattggaggctgtcgaggggaatgtggctgaggaaagatgatgctgcaggagtgccccagggtgaacaagcccatcagggaggcctgagtcagaggcccgcggggtcccaggctgatccagcatcagccatcctggacctgcctcatctgcccaggcagcatcctgcctacccccaccctggatcctggaccgggcccccagttgctcgcatctgcatgtctttgcctgggggtctctcaggatggcagttgtgggaaaaccaggaggcagagggtttcctgaagaatcccagcgctgctgcagctgccggcaacaggaagccacttgatcacatgtccaacctggggaaggggacccaaaacccaatctacaatgggagtctgaactggggccacttgagggggtcttgtagaagaggaaaacttgtggcgcaatgggatgtccagggacacagatagccaggtgctgggcctcaggatggaatccagccacccctgctgggtgacacacagtgaccttcctcaggagagtggaagctctgcagggtgagaatgaaacatgggtggtcagtggggataataggacctacctagctgggctgttatgaaggctaaacgaggaaacacttgtaaagttctcagaactgtgcctcgaacaagtgggagatgtcagtcaccatcacccccattcaccaggacagaggggctacagaaaaagctgaactgtgctgagccatctgctgcctcttcccagtgacagcatctgaatctgaaagaaaaaaagaatgtcacatccatttgtcatggctcttgggaccctgactttatgcaggggtgctgggagctaagtaaaacacctcaagccagtaagtccccccgcaacacaccttagaaatataaaattgacttgctacagacttgtttctagacctgaactcacctgcagttcttggaaaagaaaattaaatgggtatgttattatttaaaatattatggttattagcatttatgtgtatatgaaagtattgtttcatcaaatacatag

SEQ ID NO: 463838 - DNA, 1331 bp, Homo sapiens
gggctcccactcggcaagggaggaaaataaaaggagaatcaagtgaagggaaaggagaaaggaggcagaagagaacacaagaagttccctttaacaggaggaaaatggctttttaggaaacagcgatgatctaaaggacaaagaagttgattctacagaaaaccatgagaatctacaaattccaccgtttaaacaggtcagcttcacctgttatgattagagttaacagagaaatggatatcaacaggtttccaggaaataagtctggtgatgcaatcacaaaagatgatacctcactttaaatctgatgacttcaaagtaggcctgagatgactaccctcaaataggttgattttggcatcagtaacactacaggtaaaagcgtgcattaaaactgaagccacagcctgcacatttgcttctgtagtccagcatttagcttgtctgctgaagaacggttttaaaaatatcccagagaagatgacaccacttatactctttgacaaatgaattgggagatgaacagacattgaaaagaatataggaaatgtatcacattgtttaaaaataaagtcaaaaacatcctttagaagcttcagaaacaaaagcatgagaaccgaagcaggggcggcggcagcaaagcgcctgttccctgaaaagcagacctcagaacaggaggaacgcagcctgggcctgcaggtgggcatgtgggtaaggaagccattgacgccgccgccgccgcactcctcaaaggaagagcttaacaggccagtcgggagggggctcaacatgaacccgttctgtgaaaatgcttcaacgcagagttgcatgctctttattgtgggttcagtctattatttaatagacagcacaatattaaaaagagttgaagttctcccacttctattcacaattttaaatccaaagtgtgagcggaacgagagcaaaaagaagcctccagaaagcaccgaactgattaaaagcagcaagattacagtagcagcaaaagcatcaatactagtagaagctgtagcatcagctataatagtagtagtagtagcagtaataataaaagtactactagtagtcgaagctgctagcagcagcagtaacagtagtactagtaatagtagtgagagccgtagtagtagaagtacaagcttcagcagcagtagtaactgtagtaatagtaatagaagctgcagcataagggtaagcatcaaatgcaatgaaaatccataaggaaaacacctcaagcccagaattaggaagattagagaagatgtcccagacaaagtgaaatgtaaggtgatggctgaaacgtgagtagg

SEQ ID NO: 463839 - DNA, 659 bp, Homo sapiens
aagaagagtgatatggtttggctgtgtccccacccaaatctcaacttgaattgtagttcccataatctccacatgtcatgggagagacctggtaggagtctatttcctatcattaaatacttacaagaagtaaaagataaaaagaaagagattaatgaattgcgagtgaatacagatgaaggagaagacgtaataaaaaataatgggtattctgagcctggagaaggctatctgagagatactgcttcccgcaaacagtttgcctctgtgatccttatttacctctaccttttccatgagattgagaacactataagaaagcctacaaatgctatggttgcacatacagaaaaatccaagacctcagagacttcttcccatcactctttgatgtaactgatttctccccatcagtatcctgatcatctggttccttcatttcctctgatccaggatgacccaccagtaggagggtgcaactaccaccagagacctctgacctctgcaagacagctaattataatcacagattctctttctctaggtaaattgtcattgtggtgcactttggttttccagaggtccactaccaaagttcatcttttccccagatgcttcaccattaaaattaactttctgccatcctacctttggtccat

SEQ ID NO: 463840 - DNA, 2661 bp, Homo sapiens
gacaaggaaaccggcagtcttccgcttccggttgctctgttgccatagtaaccgcacccataacagccgtggtggttatggctggcctgagcggcgcgcagatccccgacggggagttcaccgcggtcgtgtaccgcctcatccgcaatgcacgctacgccgaggcggtgcagctgctgggcggagaactgcagcggagccctaggagccgcgccggcctgtcgctgctaggctactgctactaccgcctgcaggagttcgcgctggcggccgagtgctatgagcagctgggccagctgcacccggaactggagcagtaccgcctgtaccaggcccaggccctatacaaggcctgcctttatgcggaggccacccgggtcgccttccttctcctggataaccccgcctaccacagccgggtcctccacctgcaagctgctatcaagtacagcgagggcgatctgccagggtccaggagcctggtagagcagctgccgagtagggaagggggagaggaaagtgggggcgagaatgagaccgatggccagatcaacctgggttgtttgctctacaaggagggacagtatgaagctgcatgctccaagttttttgccgccctgcaggcctcgggctaccagcctgacctttcctacaacctggctttggcctattacagcagccgacagtatgcttcagcactgaagcatatcgctgagattattgagcgtggcatccgccagcaccctgagctaggtgtgggcatgaccactgagggcattgatgttcgcagtgttggcaacaccttagtcctccatcagactgctctggtggaagccttcaaccttaaggcagctatagaataccaactgagaaactatgaggcagctcaagaagccctcactgacatgccacccagggcagaggaagagttggaccctgtgaccctacacaaccaggcactaatgaacatggatgccaggcctacagaagggtttgaaaagctacagtttttgctccaacagaatccctttcctccagagacttttggcaacctgttgctgctctactgtaaatatgagtattttgacctggcagcagatgtcctggcagaaaatgcccatttgatttataagttcctcacaccctatctctatgacttcttggacgctgtgatcacttgccagacagctcctgaagaggctttcattaagcttgatgggctagcagggatgctgactgaggtcctccggaaacttaccatacaagtacaggaagcaagacacaatagagatgatgaagctatcaaaaaggcagtgaatgaatatgatgaaaccatggagaaatacattcctgtgttgatggctcaggcaaaaatctactggaatcttgaaaattatccaatggtggaaaagatcttccgcaaatctgtggaattctgtaacgaccatgatgtgtggaagttgaatgtggctcatgttctgttcatgcaggaaaacaaatacaaagaagccattggtttctatgaacccatagtcaagaagcattatgataacatcctgaatgtcagtgctattgtactggctaatctctgtgtttcctatattatgacaagtcaaaatgaagaagcagaggagttgatgaggaagattgaaaaggaggaagagcagctctcttatgatgacccagataagaaaatgtaccatctctgcattgtgaatttggtgataggaactctttattgtgccaaaggaaattatgactttggtatttctcgagttatcaaaagcttggaaccttacaacaaaaagctgggaacagacacctggtattatgccaaaagatgcttcctgtccttgttagaaaacatgtcaaaacacacaatcatgcttcgtgatagtgttattcaagaatgtgtccagtttctagaacactgtgaacttcatggcagaaacatacctgctgttattgaacaacccctggaagaagaaagaatgcatgttggaaagaatacagtcacatatgagtctaggcagttaaaagctttgatttatgagattataggatggaatatatagtaatagctgatagtggcatttatcaaatggctttgttatgtaaatttgcatcgctttatttaccctttggcatctttatatttgttacatgttgaactttgtacacttatgcattataaaaaaaaaagtagctaaaacttttgctgttaaatttcccagaaagtgacatattctaagaacttttaccccaggagttatgaaaaattccaaacttatgaggaatgtttatatcagaagttgtaatacgtttgtttcctttcctctgttatcttttgtgctttgacgtatcttgaggggtctttgcacaaggattacatcattcagggaccaagcactatctcagtaatagttaagagtagtctttaaataatcatttcagggattgtgtgagagtagtctcacaatttacactcattaatttggggaaaaaaaagcataaagtgtaactaatgttaaccacccaaaaacaaatgttttccagattcccttttgcaaatagcctggtctttatttggccacaatttatttacccaggtgctatgtgtttgtggttttcatgtatgtgtaatttaacttttcagaacat

SEQ ID NO: 463841 - DNA, 824 bp, Homo sapiens
caagtctcagccaccagctggcagagtggcctcgccttccttctccagcctgtgtctccatcagagtggcaaatggcttggcgtgatggctgaggctcctctccaccggattaaagcatggcctggcacatgctcagatgccatcgatatttggtttgctgttgttatttggtctccctgggtctgtggaagaagatcctctggggttgatacaatgggcagatggtgtccttcgaaaaatatcactcttgggatgttggtagcaagcctggaaccccggttggaaattgaaggaaagtgggagaaaaacagaggactggactcggatccaggagccttgatctctgtggacgtggacttgggcccttaccgctctgctttggatattgtaggttctgggtcaatgagaatgagaaacccagtgttcgggagagaggaggcagctgaaatgagcctgcatctctacaaaggaaaatgcagcccaggtcctctgatgcagagaagttagtgttcttcgggacaaggtgaaaaataggcggctggtgtagggagctgaggactggacatccagaataaagctcatccaccaccgttagggatgtcagtacctgccaacgccactggggacagctggtccctcagtaagctgccagagatcggatccaaccacagaggcccaaacgcagttggatccaggaatctgatcattgttcttccatacctcaaccaactctagctatgatgtccgtaactacgtaaaaaaccagaactgcttttaaaccccatttagtgtctgagtgtccagattgggaagttcactttgc

SEQ ID NO: 463842 - DNA, 1584 bp, Homo sapiens
  misc_feature (1582)..(1583): n is a, c, g, or t
gaaaactaaaatgttaaggattttgactcggatggcaaaaatcatgtcatttataacatttcaagacacagagatgaggagcccaagagatgaaactggagagctcctaaaacccaggaggctcttaaaactcctctaccaacatctcccctccatgaaaaaaggaagggtcagcccaagaagcaggaagcagcagtgcagggagaaaagagtactggatttagagtcagacacccaggttcaagttctagtttgcagttcatagaagcagtcttcccagcttgattttattcacagaagaaaaaaggcacccctgggaagtgcctgacaaaagcttgaagagagaagaggctctgctgtggtttgaatgcgtcccccaaagttcatgtgttggaaacttgatccccgatgcagcagtactgggaggatgccctttgccatgttatgatcctgcaggaagaccctcaccagatatggccccttgatcttggacttcccagcctccagaattgtgagaaataaatttctgtttttaataaagttcctagtttgttgcattctgttatagctgcacaaagcagactgagacaggctcctttactcatggtgaagaaggtaagtcccttatgactttatcaaataaaaataatgactacaggtaaagggctagaaatttttagacaaaaggccagtgggtatcacagggagctttccagttggctgttttggcagaatggcaagactttccttcctcattctcaaagcttcctgacatttacagctttggaaggtggtgagtgagaaaattttccaagggactctagacattctcagaatcccctggttccacacttgctagattatggaagagagaagagacacctaaaaggaaaaaaaaaaggaaggagaaaggggaatcagctctttagtcccctaagacccacttggctgtggctcctggctgccaagggttgcctgtgagtggttctccaggcatgaactgtgaccaccctgctatagattaatcctttcctcctacaaagttggtcttcagtatacttaatgagggagaaatgggatgtctttttttccttccagaatcactctagtatgacctgcagaatgattagcgtggctcagcctcagttgggatatcatggcttaaattattcctattagtttccagctgaccttggaacacaagcattacatgtgatttcaatgaaactttagactttgttgttctcagttaactagtgaaacagttgaaccttcccatgacttgtggtaattataataaaggattgggttaatttgaagaccttgtcttcaacctctgaatttctttattctacttgttcaattgtattgctaagactttccagagcattttgcattttaaaagtgtgtccattattttgtgaagttttgaatgttttttatttattccatctatttccttgaatatttctcccttcacttcttgtatcattttttggatttccttgcattgggcttagcctttctctggtccctcactgattagcttaataactaacctcctaaattctttttcaggtannt

SEQ ID NO: 463843 - DNA, 1687 bp, Homo sapiens
  misc_feature (1685)..(1686): n is a, c, g, or t
gaaaactaaaatgttaaggattttgactcggatggcaaaaatcatgtcatttataacatttcaagacacagagatgaggagcccaagagatgaaactggagagcagaacatctccagcagcagctgggatgatgaagcatcttctcttggcaaagaagaacaccaaaatcagagaggccagttaggaggctactgcaatatttcagctcctaaaacccaggaggctcttaaaactcctctaccaacatctcccctccatgaaaaaaggaagggtcagcccaagaagcaggaagcagcagtgcagggagaaaagagtactggatttagagtcagacacccaggttcaagttctagtttgcagttcatagaagcagtcttcccagcttgattttattcacagaagaaaaaaggcacccctgggaagtgcctgacaaaagcttgaagagagaagaggctctgctgtggtttgaatgcgtcccccaaagttcatgtgttggaaacttgatccccgatgcagcagtactgggaggatgccctttgccatgttatgatcctgcaggaagaccctcaccagatatggccccttgatcttggacttcccagcctccagaattgtgagaaataaatttctgtttttaataaagttcctagtttgttgcattctgttatagctgcacaaagcagactgagacaggctcctttactcatggtgaagaaggtaagtcccttatgactttatcaaataaaaataatgactacaggtaaagggctagaaatttttagacaaaaggccagtgggtatcacagggagctttccagttggctgttttggcagaatggcaagactttccttcctcattctcaaagcttcctgacatttacagctttggaaggtggtgagtgagaaaattttccaagggactctagacattctcagaatcccctggttccacacttgctagattatggaagagagaagagacacctaaaaggaaaaaaaaaaggaaggagaaaggggaatcagctctttagtcccctaagacccacttggctgtggctcctggctgccaagggttgcctgtgagtggttctccaggcatgaactgtgaccaccctgctatagattaatcctttcctcctacaaagttggtcttcagtatacttaatgagggagaaatgggatgtctttttttccttccagaatcactctagtatgacctgcagaatgattagcgtggctcagcctcagttgggatatcatggcttaaattattcctattagtttccagctgaccttggaacacaagcattacatgtgatttcaatgaaactttagactttgttgttctcagttaactagtgaaacagttgaaccttcccatgacttgtggtaattataataaaggattgggttaatttgaagaccttgtcttcaacctctgaatttctttattctacttgttcaattgtattgctaagactttccagagcattttgcattttaaaagtgtgtccattattttgtgaagttttgaatgttttttatttattccatctatttccttgaatatttctcccttcacttcttgtatcattttttggatttccttgcattgggcttagcctttctctggtccctcactgattagcttaataactaacctcctaaattctttttcaggtannt

SEQ ID NO: 463844 - DNA, 674 bp, Homo sapiens
tgttttagaacatggtagcttcaaagacgtttgttaaaaggataggctggtctgcatggtggctgttttactgcttttctaaacttgggtgaacccctggaggagaagccccaaacagggtagttccaccagcccaggatgcagcaaggtggacaaatcacagacaggacgggggaggagccaagatgaccgaataggaacagcttcggtccacagctcccagcgtgagcgatgcagaagacgggtgatttctgcatttccaactgagggacatggatgaaactggaaaccatcattctcagcaaactattgcaaggacagaaaaccgaacaccccatgttctcactcatagaaaaaaaaaaaaacaaagaaaaaaaaactttttgggccggcttgggccttggaaaaggttttctacccctttcctggggggcgcgcgggggcgccaagatgggtagtcgagacacttggggcaaaagcgtggtccccagagggagaacccggggccaacagaccagtggggtgcgtttcctccaccaaatgaaaaaaaccgcgcgggggacaacccggagggtctctggacaattcccaaagaggagttccaggagggccatagcgggctcctacacacgacggggcccagtggaggccgaataaatacgcggagggtgggg

SEQ ID NO: 463845 - DNA, 895 bp, Homo sapiens
tgttttagaacatggtagcttcaaagacgtttgttaaaaggataggctggtctgcatggtggctgttttactgcttttctaaacttgggtgaacccctggaggagaagccccaaacagggtagttccaccagcccaggatgcagcaaggtggacaaatcacagacaggacgggggaggagccaagatgaccgaataggaacagcttcggtccacagctcccagcgtgagcgatgcagaagacgggtgatttctgcatttccaactgagggacatggatgaaactggaaaccatcattctcagcaaactattgcaaggacagaaaaccgaacaccccatgttctcactcatagatcagagcctccccaaggggacaggaccacagccctccctaaaaggtcctggatctggtataaatctaaccatgggagaaaacagaattcagttacagacaacatcaagggcaaacttgaaggggagcaaaaatcacaatatggtgacagctggagagcccctgcacactacagactccctcctgctgcagatcagacttctggacaagtccagccctggctttgtggctgtcatgactactgaaaatgtcaaaggagaactcagccacaacacaggggctacaggccccatgcaagtccgaaacccagcaggacggtcattaaatcttaaagctccaaaataatcttgactctgtgtctcacatccaggccatgctgatggagggggtgggcttccaaggccttgggcagctctgcagggtacatcccctgtggctgctttcatggactgatgtgagtgcctgtggattttccaggtacacagtgcaagctggggtctggaggaggatgaccttcttttcagagctccactaggcagtgccc

SEQ ID NO: 463846 - DNA, 1448 bp, Homo sapiens
ctttctgagctcctcttttggctcctatagcctgcagctctgcttgcatgtgcctatgtgatttctcattccagtcatattacaaactaaccgagacacagatcttgtgcaaaaattttctgctgccatctcagcatctacttcagtgtcttcccaagcatcataagcacctggactctccatgttcttcccacctggactctccacctaaccctagatcccactcccatgacacagtgggccatctacttggccagccgccacctccagtaggctgctcagcctgcagcctgccacctgcttggactgctgtctccagctctcagcgatcctcctttcacctttcacttattttcccccttcttatcactttctttctttgttcttctcctgatctctctttcacctgtccaaaggccctccgtcccacttgtctatggctcacaatgtaaacacattgcctgctaatgatctatgatcttattttaaatggaaaatattttcttttgacctaaataattaaatgcaaagtatttgctgtgataaaagtcttggaatccacaataaaaatatttgtacctaccagtcatgactgagcatgggatgactaatgggttacaatcagagttgggaaggtgggtcattatgatgtcatctggcatgtgataatatagatcaggcctgcactctcatgatttggagatagcctcgtagaaatgacaaccacaatgttaatactaacatatgtattacatggtttgtttgttctttcgcttaatattttcagagcacctacctattataggcactgtcacttctcacaaaactgggacaactaactgtttatccaacatctgctggctaaataaagacatgatcttcaccttttgggattgttaatttaaaatggttccataagagcaatgcaaagacagagatatttggcagcactgcagctggtgatttatatggctcttcacaaggtgttattttggggtatcaaggtatggatgcttaaatcagctgcaggaagtaagaaagaagaaaaaaggagtgataaagataaaaaaaaatcaaccttggtccttccaccaagacccattaatttccatatcatcatctgcataagagggaagattcctacatgaccaggttactgcaaggatgtgaattttgaatattaaaatattatacacaattggaaataactgaaatctaccaatgtttttacaatccagcatatttacaaaaacaaatccatcaagacatccaataaattagtcttgatgagatttgtaatgaggcattaaagataagctaagtaaactgttagaaacttagaaaaatatattgtagcgtaacatatctaatcttagctcatattttatgcaaataattagacaataaatatttaaaataaacaagaaatttaaatcttaaaagaaact

SEQ ID NO: 463847 - DNA, 1258 bp, Homo sapiens
agtagctattattattattgtcatttttattaaatgacagatccattttcagtttgttcagacagttgaatatattataatttacatcgtgataaccaacaactgttatcctcaacagatgcagatctgtggatccagcgtagcatctgtagcagctgggacatcattccaggttttgggcccggtgtgttggcaacaactggatctgaagatggcagtcagggtgctttggggtggtctcagcctgctccgagtgctgtggtgtctccttccgcagacgggctatgtgcacccagatgagttcttccagtcccctgaggtgatggcagaggacatcctgggcgttcaggccgcgcggccctgggagttttaccccagcagctcctgccgctcggtgctcttccccctgctgatctccggttccaccttctggctgctcaggctctgggaggagctggggccgtggcctggcctggtgagcggctatgcgctgctggtggggcctcgactcctcctcactgccctttcctttgctctggacggggccgtgtaccacctggccccgccgatgggggcggatcgctggaacgccctggccctgctgtctggttcctacgtcaccctggtcttctacacaaggaccttctccaacaccattgagggactcctcttcacgtggctgctggtgctggtatcctcccatgtaacgtggggccctacacgcaaggagccggcgccgggtccacggtggcgcagctggcttcttggaggcattgtggctgctggcttcttcaaccggccacctttctggcctttgctgtggtccccctctacctctggggcactcgtggagccacaaacctggtttgaagtctctgacccgggaggccctggtgctgctccctggggcgaacctcacagcagcggtgtttgtggccacggacagtggtattctccagccccgctacatccaggaaccttgtcctgacacctgtcaacttcttgcactacaacctgaatccccaaaacctggcgagacatggcacgcagggcgcggctcactcacctggcagtcaacggcttcctgctcttcggggtgctgcatgcccaggcctgccaggctgcgtggcaccggctgcaagtcggccttccaggcctctgcacaaatgggcctcctgagggcactgggtgcccggagcctgctgtccagccccaggtcctatctccttctcctctacttcatgcctctggccctgct

SEQ ID NO: 463848 - DNA, 638 bp, Homo sapiens
agtctccgcgctgctgaggcgcgcccggccgctcccacggcctcccctccgccctgcggtcccgccgcctccggggcctcctgggaccctggccctcgccgggcaggacgccgccagcgctgaaggcgcagcccggaggccgcgcggatgcagatctgtggatccagcgtagcatctgtagcagctgggacatcattccaggttttgggcccggtgtgttggcaacaactggatctgaagatggcagtcagggtgctttggggtggtctcagcctgctccgagtgctgtggtgtctccttccgcagacgggctatgtgcacccagatgagttcttccagtcccctgaggtgatggcaggtaaaactccgcatgtgtggctgagacaagctgcagcagagtctgcttgagaagctgacgggagactttgtggggagggagtagcatgtctgggtagatgagtagtaaatccacaagcagagcagcagcctctctctctggggtaagaacttggaagtggggacttcatatctccttcccgagtggtgacactgaccttctgggtaatgctaataaaccaccagtctctttgatgtatccctgcttggaccaacaatacaggtcattcagaatgagagct

SEQ ID NO: 463849 - DNA, 1287 bp, Homo sapiens
agtctccgcgctgctgaggcgcgcccggccgctcccacggcctcccctccgccctgcggtcccgccgcctccggggcctcctgggaccctggccctcgccgggcaggacgccgccagcgctgaaggcgcagcccggaggccgcgcggatgcagatctgtggatccagcgtagcatctgtagcagctgggacatcattccaggttttgggcccggtgtgttggcaacaactggatctgaagatggcagtcagggtgctttggggtggtctcagcctgctccgagtgctgtggtgtctccttccgcagacgggctatgtgcacccagatgagttcttccagtcccctgaggtgatggcagaggacatcctgggcgttcaggccgcgcggccctgggagttttaccccagcagctcctgccgctcggtgctcttccccctgctgatctccggttccaccttctggctgctcaggctctgggaggagctggggccgtggcctggcctggtgagcggctatgcgctgctggtggggcctcgactcctcctcactgccctttcctttgctctggacggggccgtgtaccacctggccccgccgatgggggcggatcgctggaacgccctggccctgctgtctggttcctacgtcaccctggtcttctacacaaggaccttctccaacaccattgagggactcctcttcacgtggctgctggtgctggtatcctcccatgtaacgtggggccctacacgcaaggagccggcgccgggtccacggtggcgcagctggcttcttggaggcattgtggctgctggcttcttcaaccggccacctttctggcctttgctgtggtccccctctacctctggggcactcgtggagccacaaacctggtttgaagtctctgacccgggaggccctggtgctgctccctggggcgaacctcacagcagcggtgtttgtggccacggacagtggtattctccagccccgctacatccaggaaccttgtcctgacacctgtcaacttcttgcactacaacctgaatccccaaaacctggcgagacatggcacgcagggcgcggctcactcacctggcagtcaacggcttcctgctcttcggggtgctgcatgcccaggcctgccaggctgcgtggcaccggctgcaagtcggccttccaggcctctgcacaaatgggcctcctgagggcactgggtgcccggagcctgctgtccagccccaggtcctatctccttctcctctacttcatgcctctggccctgct

SEQ ID NO: 463850 - DNA, 885 bp, Homo sapiens
ttgtcacaaagccaggcagtggccccaacctctgtgcttaggggaatgctgctccacctttacggtgacccccaggtctgtgctgagcagaacgcagctccgccctcgcggtatcctcagcccgcccgcccgcccgggtctgacctgaggagaactctgctccgccttcgcagtaccactgaaatctgtgcagaggacaacgcaggagaacgcaactccgccgtcgcaaaggcaccccgcgccgcgccggcgcagagaggcgcgccgcgccggcgccggcgcagagaggcgcagggctctcttgcttacagtggtcgccagcgccccctgctggcgccggggcactgcagggccctcttgcttactgtgtctgacttccagcaactgctggcctgtgccagggtgcaagctgagcactggagtggagttttcctgtggagaggagccatgcctagagtgggatgggccattgttcatcttctggcccctgttgtctgcatgtaacttaataccacaaccaggcataggggaaagattggaggaaagatgagtgagagcatcaacttctctgacaacctaggccagtgtgtggtgatgccaggcatgcccttccctagcatcaggtctccagagctgcagaagacgacggccgacttggatcacactcttgtgagtgtccccagtgttgcagaggtgagaggagagtagacagtgagtgggagtggcgtcgcccctagggctctactggaccagcgtctcctgtctcctggagaggcttcgatgcccctccacaccctcttgatcttccctgtgatgtcatctggagccctgctgcttgcggtggccttataaagcctcctggtctggctccaaggcctggcagag

SEQ ID NO: 463851 - DNA, 2264 bp, Homo sapiens
  misc_feature (1)..(3): n is a, c, g, or t
  misc_feature (7)..(7): n is a, c, g, or t
  misc_feature (11)..(11): n is a, c, g, or t
  misc_feature (13)..(13): n is a, c, g, or t
  misc_feature (17)..(20): n is a, c, g, or t
  misc_feature (22)..(22): n is a, c, g, or t
nnngggngggnangggnnnngnaggacctgcacttggagtggccggccggcaccactcggccccgggcagtgaggggcttagcacccaggtcagcagctcagcacccagatgctccagctcccccagcattgctggcccgcccacgccccgctcgaattctcgctgggcctcagccgcctccccgcggggcagggctcgggacctgcagcttgccatgccagagtccccccacccccatgggctcccacgcagtccgagtctccccgacgggtgccaccccctgctccatggcacccagtcccatcgaccacccaagggctgaggagtgcaggcgcgctgcgtgggactggtgggcagctctgcccacagccccagcagaggatccactaggctaagccagctgggctcctgagttgggtggggacttggagaacttttatgtctagctggaggattgtaaatgcaccaatcagcactctgtgtctagctcgggcttcactcctgaagccagcaagaccacgaacccaccagaaggaagaaactctggacacatctgaacatgtgaaagaacaaactccggacacaccatctttgagaactgtaacactcactgtgagggatgacagaaatgtagttgcagtggcacttcgattaataaaacccatgggaaacatgcccttttacaaggaaatcatcatgcttgagaaaatacgaaacaaaaacgactgtaaatcacaaagttgcctggataaagaagctaccagagacattgtgatcaagggtagtaaatctgaatccaaaataagtgagggcaaagtaatcacaaataccttctccctccatgatagaatgaatataaggaaatcaaagcgccagcaagtggcccagaggaagaactgcttaaagttctacttgctgcagcagtctacgtctggtgccagcaggttagataaaagtatctatgggtttgatgcaggtccaggcaatacctgctgcaccactgactctggagggccaatctgtcagccaggcagcaacactgttctgtggcccattggctctttaccagtggttttggtttacttggtgaaaacccagagaaaatatccactaaaggattgtaaatgcaccaatgaacgctctgtgtctagctaaaggtttgtaaacacaccaatcagcactctgtaaaaacacaccaatcagcgcgctgcgtctagctaaaggtttgtaaacgcactaatcagcactctgtaaaaatggaccaatcagcactctgtaaaatggaccaatcagcactctgtaaaatggaccaatcagtgctctgtaaaatggaccaatcagcaggatgtggggtgcttctttcactgtcttcctgagcagtaatgcttcaaagaacacagcttgggaattgacttagacttcattcagtgtcaggacataaagcaaattctaagatccttgagtgttctgattttatttttttccctggaagtaacacagagaatgcattataggaatcatgtttgttttgtgagatgttaattaatctccaagtatttgtgttgtcttagaaaaatagtatctctggttttctttattagtctattatgactctattttcccatcctaaaaattttctaagtctttcttgaatccattggatttttaaaaattatgaataattaaaaaatttactgttttataagcataacattccttatttgccctcaaatttcttgtctcagacttcaagttgagcctcatttgagtgttctaggactctatttttgcagaatgtcagatacggatcccttattaaatcaataaaccaattgattaaaaaaactgaatattctaaatttctctgctctggaagatcaataatggtgtaaaattcacaagggagtatacgttaaatatcaataacgaatgacaaaatatgatctttttctatttataggttatgaagtgttccttttttgcttccataaaggacttgagaaatttacaatcaaagatacattttcaatactatttttaagcagaaagaagataatcaacaccaccaccaataaactatacagatgggagaaataagtgtgccaaaatgtaggttaatgttacagcagttgaaaattaaattaggttcaggtcttcctggaagccaagggaagacaaaaggagcagggcagggacaaggcattatgaggttataacataaatctttaattagcaaaggtatttctttgagggtttgcaaatg

SEQ ID NO: 463852 - DNA, 1018 bp, Homo sapiens
ctgcctgtccggggaccctggggctgctgttcctgtggtaatgtggcagctgggaccatggccagcttcagtctgcctggcgtcacataagccagcccacagggtcctgcagcttgtcctttctggctggaagctctgggcatagcctgggactgggtctttccagagagggctgcagccagggccctgccagcctcgggggccacagcggctctcacaccagcatcttgctggataggagcagttccaggactctctgatcacacctgatcatcgtcactgccagaattcaaggtagctgcctgccatggctgagaggtgtgcctcagcttaacccactcagtgatggactccagtgcctgcaagaagtctcaccagagtaagaagtggaggatccaggcccaggagaattttgccaagaagtttccgtacaggttgtcgtggctgacagagcccgaccctgagcccctgcagccctgggaggtcacaaacgactcgaacacggtgcagctgcccctgcagaagaggttggtgccaacgaggtccatcccagtccgaggggttggtgtgaggattaaaaagagcatgaatgtcacttctaggactttatcccaaatgtacactcacacaggtaagtaaatgctgttcactccagtgctgctggaaacagcaaaggattggaaagcagctaaactgtttgctaaacactcacaggaaactgctaaattatacaactactcccggaaatcttaggcagccattcaaatgtagaggcagctctttatagactgatctgaatgatgtacagatgcattcggctgtgcttccaaaacaataatgcattacatctcgctgtttgtgagaaaccagggatttattttaaattttaagcattggaaacatccctctcaggaagctgcctgaatgacaaagccacagaataaaactgaaaagaaaaacaagccctaccccataactgcagaaagttggttaacattttcctgacaatgaaagccag

SEQ ID NO: 463853 - DNA, 1489 bp, Homo sapiens
ctgcctgtccggggaccctggggctgctgttcctgtggtaatgtggcagctgggaccatggccagcttcagtctgcctggcgtcacataagccagcccacagggtcctgcagcttgtcctttctggctggaagctctgggcatagcctgggactgggtctttccagagagggctgcagccagggccctgccagcctcgggggccacagcggctctcacaccagcatcttgctggataggagcagttccaggactctctgatcacacctgatcatcgtcactgccagaattcaaggtagctgcctgccatggctgagaggtgtgcctcagcttaacccactcagtgatggactccagtgcctgcaagaagtctcaccagagtaagaagtggaggatccaggcccaggagaattttgccaagaagtttccgtacaggttgtcgtggctgacagagcccgaccctgagcccctgcagccctgggaggtcacaaacgactcgaacacggtgcagctgcccctgcagaagaggttggtgccaacgaggtccatcccagtccgagggctcggggctccagattttacatcaccgtctggctcctgcccggcaccactaccagcaccatcaccacctccactgtgcaacctttgggaactcaagttgctgagtcgccgcttccccagacaactcgccttcctgctgtccacccggcacactgaggctgcctgcccccagaccagcaaggcggcagggctgtccaggggcctctcctagagactgggctctgtgtgtggccttcttattggccaccttctccttggcaggctctgggcagtagccacagagactttagtaaagggatcagccttcatggccatcatagaccgggagtggtttgtggtccccccaaaaagctacaccaagctaataaactgcgagttcccaccccacttccagctggaatgatcactttgcctccctgagccttcattttctcatctctaaaattgttgtaataatgtttaatcttgcagggttggtgtgaggattaaaaagagcatgaatgtcacttctaggactttatcccaaatgtacactcacacaggtaagtaaatgctgttcactccagtgctgctggaaacagcaaaggattggaaagcagctaaactgtttgctaaacactcacaggaaactgctaaattatacaactactcccggaaatcttaggcagccattcaaatgtagaggcagctctttatagactgatctgaatgatgtacagatgcattcggctgtgcttccaaaacaataatgcattacatctcgctgtttgtgagaaaccagggatttattttaaattttaagcattggaaacatccctctcaggaagctgcctgaatgacaaagccacagaataaaactgaaaagaaaaacaagccctaccccataactgcagaaagttggttaacattttcctgacaatgaaagccag

SEQ ID NO: 463854 - DNA, 850 bp, Homo sapiens
cacgccagcaggtgaggaggctggggccagatgacagctagtgagggagcagagacaagacaaggcgagcctgtgacagagcgagaccctgtctcaaaaaacaaaaacaagacatgtgagcttggactccagtgtggaatcccatgtccgctcagtgcacctttctgccgctgaaagtacaagaggagaggggaaacccacaggtggagctgaccatgaggactgtcacagggaactctttgaataagaggacaccagatcatgcctgcagttccagcccaggagcaactagcaccagcctcagcatggagcaggacttcagttccagcagcgaggactgagatcagacacaagagaaagctccctgatgaggaggggtgattctaaaacgaagggcggaaattatctggggaatttccttcccgtgaagcctcaggaacatgccagtcccctacttcggtctgtcctggggggtctcacgcccctgtcctcctagggaaatctagatcctccaaactctgcctgggttcttcctggggagtcttgacccctgccttgtggttgatgtgggataggggacccgggaacagggctgccttcctctggccaaggcctggcaagcaagtgtgggatgggtgctgtcttcctgagagggacaatagaagtgacagagccccctaattcaagaccctgcagaggtggtgtgagatcttataatatcagtctctaagccagtgcctctcaagctctctttggtgaagaatcaatttttaaaatatataatcagtcacagatcaatgcttttgtaaaatgcaataaaagttaatttccaaaaaaatcacatacttgg

SEQ ID NO: 463855 - DNA, 7089 bp, Homo sapiens
ggtccctagatgaggtctgacacgtggctttgtggcactagctccaagggagaccttcataccacgcacattctgggacaatctttggttctcctctcagcctggacaagcagtgaaatacagcatccagccactgcctggctcagtcagccatgctatcttgggacagaaaccttgacaggaatcccagctctagccaaggaaaacatgagtcaggcctggctaagccaggtggcttccctctctccaccttccatccccacacccccaactccacagccaatgagctgtttgggtaaccccaagaccccactcccacacagcctacggccagcaaaggcatgcaggcaggattctagaaccttggcccggctttgggttgctgcctttgaaagtgtagcaggtgtggggctctagctccggccctcctcaaaggagacaggagcattccctgtgtctttccggccttccacctaccctggccttctctgcacagggttcccttttggggcactgtgattgttctcaaaggcagagcccaccctggccaggagtggcacaagattcttatcccacttgtagtagaagacttttcctgattcctcttcccagcctatccaggggcttccgttctcctgccggtctcacctcaggctgaaatgttgatatttcctcgtgtctggggacactgctgctggactttgtggaaaaacctttcctgcctttgtgtggcttctgttttgtttgtttgtttatgtatttatgtatttatttattttgaaacatagtctcactctgtcacccaggctggagtgcagtggcgtgatctcagctcactgtagcctccgcctttgggttgaagccgttctcctgcctcagcctcccgagtagcttgggttacaggtcaggtctcagaatgttctggtgagaatccagaactctcctcccaggacctcagggcatttcaggaactgtaataatacaatcacttcgtatagcaagaatcagcccctgaggtctccaggaagtaccttgatttgaaagagctgtgaccaacctcagtggcatgtccaactaccacgctgcagaagtctgtgaggccgtggtcctcagccctttgcacagattaaaaccccaatcccagccgcaccccagaccaatcaatcaggatctctggagatggggcccaggcatctatatatatgtatatatatatatttttttaattcctcagatgattccaatgtacagccaatgatgagcagctgctgggctgaagggactggggccattttataccagttgtaggatgttacacagaaatgcctgaaaagcaaggagcagctatcagaatgtttggtgacacagctcctcctgtcgtggttccttcggcatggacttcacattcagcagatccatgaggtgttccctttcggatgagctccaaggtcttaagagagcatctctagtctgcgtgagtccgtctgaacgacggtcctgagcaagaaccacctataaccatctgctcaaaataactcaggggaagtcaaagctttctatgtggaaggtgactgaaaccacatacacagaccactgcagcattcctgacattatggaacttggaaatgattccaaacatggccatagcttgagtaacatgttttgctatgacaagaacttggactgtagtccttccccctctcaagaatgtgacatcacaccttatcagatcctacgagtgagctactgacctcaaccactgaacttcaaactatgtaaaaacctaagggttcgacagacactttgagagcttgggctgtggcaagctacactctgtcagcctctcttcgacagggccccaccctgctagcctttgaacttggaagcatcgcccacaaacaccagtgccaccctctagccttgagggaccatatatgtctctgtgaatctccgttgcattggacagcttctctcccaagagctgctcttataaaagagacacaccacattttaatgaggttcgctctccacagaggcctgcttccatcctaattgagcaagtagactttagtaactttggaactcactcaccccgtgactaatacaccctgtctacccagcgcattccctgtgagatttgttcatgttgttctccccctccttaagcattgtgaacctaggaaaaatatcatctctgtagggcaataaaccatgtgatttgtgaaatcatactttgagcatctcctaattttaaccatacacaatgcctgagaactgggaaatgaagaaaggaggaattggatctaaaaatgtgtttaacaaagtataaacgccatagatatccaacaacagggtgcctggacagataaacagaggcaggctacctcttccaaatgtcatagactacacaatacatagaaagagggtcatgggattatatgaggtaaaaagaggccataatgcggaaggaggagaatcgctggtttacaagacggtgcagagtctcccacagagagcatctgtttggcccagtactaggaggcctctttggtgtgaaatgtgaagcccccagggaatggccctgatgggctaaaatgtgaagaagggggatggctactgaattaaaagaagtagcaggaatttgagagactgggggctggcagctggaggaggcaggagctgcccagtaggacatccaggcatcgagcaagtgtctgtgaaggagcattcatggaggattcctcacgccagagtcttggaggtgcgggacgttgtgttttagtcatttgctctattatcacataaagtcatgcccctcttgaccttcatgcctttagtaagtgaccagggcagaatctcctggcgagggagagctgaactgggggtggcccccagccccacctcatggaaatcctcagagcagcctggacggctaacatacctgggtgtcaggcagggccagcaggaaacagcaccactcagagtggatgagtgagcagagttacggagggaccattttacaaaggtatgggtgggcttgggggaaaccagacgcagtgcagtcctcagaggtgggaaagctcagcaccgttaattccacctggctgggggcaggtggggaaagagagaaagtggtaggggcaagggagctgggatgctgcctgacaaagctgtgaccttctgtcataggacacagccggtcctcagtgaccccagaaggaggaaggagggaggtgatgttatggggctgaattgttcccccaaaacccatatgtggaagccataacccccagtacttcacaatgtgactgtgtttgaaaatggagcttagacagaaatgaataagttaaaaattgaggccctcatccaatctgactggtgtcattggaagaagaggtaatccagacatactaagagacaccagggtcacacacacagagaggagagactgtgtgaggacacagggagaaggcggaactgaaaggaatccatttctgttgtttaaggccctgagcctgcggtccactgttatggcagccctagcaagcagatacaatgaatccccaaacctccttccttcctccttattgcctctggctggggctccctactggccaaaccccaccaaggccagagggcaggggtgtgagtgggtacagtcaagacaggccagcctcccaggtccagagcagggtgacgaaggtggagagtaggcccagagcagcagacaggggtgtctgcacacctgggaggggtgtggagtcgaggtaatgtatcttcagatggatgacccaggctcctgacaacaccaggttcacaaataggacacagaacagcatggtgaaggcaggccaacatctggaccaagattgggagaaaagggaaacaatgacaatggttggtaggactgcagctgatttgttttccccaagcttttattttatttatttatttttttccgatatggttatgttgttttagactaaaaagagccaatccagaggcagacttttcagacgaaacagcttaatctagcctgagggcagggaggctgttggggcagaagggtggtggacgggggcaggcagcacccttgaattgcttaagctccatcagagaagagatatgcgtgtctcctgtgcccttcgcccctgggttctctcatgataaaggatagaccaagagcgtgaccttctgggtatgatgggtgcttcccccagccccggactccgtctcaacatgggtccaggcacccaaggcacagctctgagaggaacaaaagcttggggagctgtcctaagtatccctcacccctcgcttcttccccagagtcctggggagacatcatttgtgacatctgttgcctggtgttcttgccttaggttcacaggcatgtgagtttcctctctactggatgagaccggtggggctgtgggctgcctgccccagcccttctccctctccatctctgtggctggagcccttgctccggtgccccaggactgtccaccagcccatcctccctgtcagcccctggccctccacaccttggttttgcagactaggaggtgctgcctgttctcctctgttctcatggggaccgcaggcaggaccacatggcggggggttctaaagacatacccatccccctttcacagggttgctatggggacacatgctcagctgcccccaaaccttcttaacctctggaaattgctcaaatggaaacattaacacaggaccaccctccgcacaaagcccatatgagggcggaatgagagtcaggacggggctctgagcacaagacatgcaggtgtgtctgacagacggggtgggggcagataaacctcaaagcaaccaggtcaccaagtcctgggagagagcccagctttgtgatacccacatagtagctcacaactatgcgccagatccaaatgggctcctgtgccactttctttaacactcctggccactccatgagggacgctgtgatctccacattgtacagacaagaagccgagttgcagagtgatcgcataaagcccagggacacgcagatagtcatggtgcagccaggatttgaacctaggcagattccagaggctgctgtctgagttgctggtctgagtttccttctagctaaaggtagcagggaaagaacttaccgcctataggaaaacaagatctattttcataagcaacaagaagccctcatgaggacgacaggactggtagtgtgaagtccaaaagagctccctgccttctcctggcttaggtccacctctgtctgcaagctgatgagtctggccctgaagcgagcagatctttcttaccccactggggcttagctggactcggagctcctgcagccctgacctccccagggcatctgcgactcccagattcagcctaggacttacagagctccctagaaggaattaattgtggacagcagtggggacggtccattttcagtcttcctaatcttctctgggagctgtttgacttgaattctttgacctccagggtttttacagaagcctacttgtttaggatgtgttaatcaaataagggatgcaagctgtgagtcctcttgggcagaaatggactttttctgaccactgctgcactcctcccgctcagcatctcagaagtggacatgggaccaagcatctcagtggtctcagctgtctggcttggaggtgggggggagagggagaaggtatagccctttaatcttcctctttttgacaccagaaagtatcccacattaatcagtcccacattaatcagctccttcctcaggcaaaagctgagctgggaaagtcccagatggggcagtgtccccatcattcattattactaagccagagatatccagcagggatcagtggagttttcagtcctcatcttatatccagagagcacaagacattccaaggcaaaactagatagtggacacttaataattcatcgattccaacacaagcttgcatgtaacatatctcataataccaagtaactcataaaacaagcagtgagagacatttatcggacaaacacttcctcagatcacttcatctgcctgagagaacagacctgccataatgggccttatccagcaaaacaggctgcgtgttgggagggcaaaatggctgttacatgagcccacccatcttgccatcaaagggatgtatttgcaccctgagtggtagcagggacagcttgctatgtgaaagctataagacaatgacacctcagagaccaagccacccagctatgggatcgtctagtgtgggagagagaacatacttttcctacccctttttcagtgaggcaagaagcagtagggatgtttttaactgccattaacagaaaacccaactcaaaggggcttaaccaataagaaatttattatctcctataacaagaaaccgcaaggtaggctagctccagaaaaggttaatttagcagctcaatggcatcatcaaggacccagatgctatcctcagtgctgctgtcagcttcaggctggcagctggatgcctatagtggttccatgcacaatatccagagcgtctcgggagaatgaaatgagaaaccttcccaaagtaccccttatagacttcttcttgaatctcactggccaggattgggtcacaagcccatgcctaagccaatcacaggtaagagaagtggaacggctctcattggcttgaaccaatcgggatccaccttcaggggctacagatggccgcagctgggctaaagcccgaggctggctgggagaaggcggaagcccgaataaaatcagtctctgttggtgaggaagaaggtaaactccagctgagaagaccaaccccaggagctaacagatagcgggaactcaatacatagagttattttctttaagtgacttgccaaagggcacagagctataagtggcagaaccagaactcaaatccagaaagagaacaaggatgctaaagataaactgggcttagttcacagctgctcccatgacagtccccatggtggaggggcctcttcctctgggagtccggctgttttgtcaccctgaaagtgaag

SEQ ID NO: 463856 - DNA, 826 bp, Homo sapiens
gcccttagctttcgtctcatctccttgccaacagcacataagtgtgagtgactccttactgccgtccaggcagcctgggggctacgaggggcttcagaggtcctcatccccagcctgtaggcctggccatactggacccatgagatcagccaccctgtcagctggtacctcggggtcctacagtcctcctcgctcaagccctggtcctctaactcggaggtgatgaggtgttgggctggaagagacaggcagcagatgattccaatgtacagccaatgatgagcagctgctgggctgaagggactggggccattttataccagttgtaggatgttacacagaaatgcctgaaaagcaaggagcagctatcagaatgtttggtgacacagctcctcctgtcgtggttccttcggcatggacttcacattcagcagatccatgaggtgttccctttcggatgagctccaaggtcttaagagagcatctctagtctgcgtgagtccgtctgaacgacggtcctgagcaagaaccacctataaccatctgctcaaaataactcaggggaagtcaaagctttctatgtggaaggtgactgaaaccacatacacagaccactgcagcattcctgacattatggaacttggaaatgattccaaacatggccatagcttgagtaacatgttttgctatgacaagaacttggactgtagtccttccccctctcaagaatgtgacatcaccttattaatttagagaggatggctaagacatgatcaatttaaactaggtgccaaattgagtggggggaagaaacggactttaagcc

SEQ ID NO: 463857 - DNA, 1036 bp, Homo sapiens
cacgccagcaggtgaggaggctggggccagatgacagctagtgagggagcagagacaagacaaggcgagcctgtgacagagcgagaccctgtctcaaaaaacaaaaacaagacatgtgagcttggactccagtgtggaatcccatgtccgctcagtgcacctttctgccgctgaaagtacaagaggagaggggaaacccacaggtggagctgaccatgaggactgtcacagctttgagaggcaaatccagaaatcagccctccagcttcctctaccaagaagactggcggttacaaccctggctctgtggggcttctcttgccctctcttctgactgccctacttggctccaggtgagggtgagaggaagctggagatggaagatgcagctgggggaactcaccaggcaggtctcagggaactctttgaataagaggacaccagatcatgcctgcagttccagcccaggagcaactagcaccagcctcagcatggagcaggacttcagttccagcagcgaggactgagatcagacacaagagaaagctccctgatgaggaggggtgattctaaaacgaagggcggaaattatctggggaatttccttcccgtgaagcctcaggaacatgccagtcccctacttcggtctgtcctggggggtctcacgcccctgtcctcctagggaaatctagatcctccaaactctgcctgggttcttcctggggagtcttgacccctgccttgtggttgatgtgggataggggacccgggaacagggctgccttcctctggccaaggcctggcaagcaagtgtgggatgggtgctgtcttcctgagagggacaatagaagtgacagagccccctaattcaagaccctgcagaggtggtgtgagatcttataatatcagtctctaagccagtgcctctcaagctctctttggtgaagaatcaatttttaaaatatataatcagtcacagatcaatgcttttgtaaaatgcaataaaagttaatttccaaaaaaatcacatacttgg

SEQ ID NO: 463858 - DNA, 6086 bp, Homo sapiens
cacgccagcaggtgaggaggctggggccagatgacagctagtgagggagcagagacaagacaaggcgagcctgtgacagagcgagaccctgtctcaaaaaacaaaaacaagacatgtgagcttggactccagtgtggaatcccatgtccgctcagtgcacctttctgccgctgaaagtacaagaggagaggggaaacccacaggtggagctgaccatgaggactgtcacagatgattccaatgtacagccaatgatgagcagctgctgggctgaagggactggggccattttataccagttgtaggatgttacacagaaatgcctgaaaagcaaggagcagctatcagaatgtttggtgacacagctcctcctgtcgtggttccttcggcatggacttcacattcagcagatccatgaggtgttccctttcggatgagctccaaggtcttaagagagcatctctagtctgcgtgagtccgtctgaacgacggtcctgagcaagaaccacctataaccatctgctcaaaataactcaggggaagtcaaagctttctatgtggaaggtgactgaaaccacatacacagaccactgcagcattcctgacattatggaacttggaaatgattccaaacatggccatagcttgagtaacatgttttgctatgacaagaacttggactgtagtccttccccctctcaagaatgtgacatcacaccttatcagatcctacgagtgagctactgacctcaaccactgaacttcaaactatgtaaaaacctaagggttcgacagacactttgagagcttgggctgtggcaagctacactctgtcagcctctcttcgacagggccccaccctgctagcctttgaacttggaagcatcgcccacaaacaccagtgccaccctctagccttgagggaccatatatgtctctgtgaatctccgttgcattggacagcttctctcccaagagctgctcttataaaagagacacaccacattttaatgaggttcgctctccacagaggcctgcttccatcctaattgagcaagtagactttagtaactttggaactcactcaccccgtgactaatacaccctgtctacccagcgcattccctgtgagatttgttcatgttgttctccccctccttaagcattgtgaacctaggaaaaatatcatctctgtagggcaataaaccatgtgatttgtgaaatcatactttgagcatctcctaattttaaccatacacaatgcctgagaactgggaaatgaagaaaggaggaattggatctaaaaatgtgtttaacaaagtataaacgccatagatatccaacaacagggtgcctggacagataaacagaggcaggctacctcttccaaatgtcatagactacacaatacatagaaagagggtcatgggattatatgaggtaaaaagaggccataatgcggaaggaggagaatcgctggtttacaagacggtgcagagtctcccacagagagcatctgtttggcccagtactaggaggcctctttggtgtgaaatgtgaagcccccagggaatggccctgatgggctaaaatgtgaagaagggggatggctactgaattaaaagaagtagcaggaatttgagagactgggggctggcagctggaggaggcaggagctgcccagtaggacatccaggcatcgagcaagtgtctgtgaaggagcattcatggaggattcctcacgccagagtcttggaggtgcgggacgttgtgttttagtcatttgctctattatcacataaagtcatgcccctcttgaccttcatgcctttagtaagtgaccagggcagaatctcctggcgagggagagctgaactgggggtggcccccagccccacctcatggaaatcctcagagcagcctggacggctaacatacctgggtgtcaggcagggccagcaggaaacagcaccactcagagtggatgagtgagcagagttacggagggaccattttacaaaggtatgggtgggcttgggggaaaccagacgcagtgcagtcctcagaggtgggaaagctcagcaccgttaattccacctggctgggggcaggtggggaaagagagaaagtggtaggggcaagggagctgggatgctgcctgacaaagctgtgaccttctgtcataggacacagccggtcctcagtgaccccagaaggaggaaggagggaggtgatgttatggggctgaattgttcccccaaaacccatatgtggaagccataacccccagtacttcacaatgtgactgtgtttgaaaatggagcttagacagaaatgaataagttaaaaattgaggccctcatccaatctgactggtgtcattggaagaagaggtaatccagacatactaagagacaccagggtcacacacacagagaggagagactgtgtgaggacacagggagaaggcggaactgaaaggaatccatttctgttgtttaaggccctgagcctgcggtccactgttatggcagccctagcaagcagatacaatgaatccccaaacctccttccttcctccttattgcctctggctggggctccctactggccaaaccccaccaaggccagagggcaggggtgtgagtgggtacagtcaagacaggccagcctcccaggtccagagcagggtgacgaaggtggagagtaggcccagagcagcagacaggggtgtctgcacacctgggaggggtgtggagtcgaggtaatgtatcttcagatggatgacccaggctcctgacaacaccaggttcacaaataggacacagaacagcatggtgaaggcaggccaacatctggaccaagattgggagaaaagggaaacaatgacaatggttggtaggactgcagctgatttgttttccccaagcttttattttatttatttatttttttccgatatggttatgttgttttagactaaaaagagccaatccagaggcagacttttcagacgaaacagcttaatctagcctgagggcagggaggctgttggggcagaagggtggtggacgggggcaggcagcacccttgaattgcttaagctccatcagagaagagatatgcgtgtctcctgtgcccttcgcccctgggttctctcatgataaaggatagaccaagagcgtgaccttctgggtatgatgggtgcttcccccagccccggactccgtctcaacatgggtccaggcacccaaggcacagctctgagaggaacaaaagcttggggagctgtcctaagtatccctcacccctcgcttcttccccagagtcctggggagacatcatttgtgacatctgttgcctggtgttcttgccttaggttcacaggcatgtgagtttcctctctactggatgagaccggtggggctgtgggctgcctgccccagcccttctccctctccatctctgtggctggagcccttgctccggtgccccaggactgtccaccagcccatcctccctgtcagcccctggccctccacaccttggttttgcagactaggaggtgctgcctgttctcctctgttctcatggggaccgcaggcaggaccacatggcggggggttctaaagacatacccatccccctttcacagggttgctatggggacacatgctcagctgcccccaaaccttcttaacctctggaaattgctcaaatggaaacattaacacaggaccaccctccgcacaaagcccatatgagggcggaatgagagtcaggacggggctctgagcacaagacatgcaggtgtgtctgacagacggggtgggggcagataaacctcaaagcaaccaggtcaccaagtcctgggagagagcccagctttgtgatacccacatagtagctcacaactatgcgccagatccaaatgggctcctgtgccactttctttaacactcctggccactccatgagggacgctgtgatctccacattgtacagacaagaagccgagttgcagagtgatcgcataaagcccagggacacgcagatagtcatggtgcagccaggatttgaacctaggcagattccagaggctgctgtctgagttgctggtctgagtttccttctagctaaaggtagcagggaaagaacttaccgcctataggaaaacaagatctattttcataagcaacaagaagccctcatgaggacgacaggactggtagtgtgaagtccaaaagagctccctgccttctcctggcttaggtccacctctgtctgcaagctgatgagtctggccctgaagcgagcagatctttcttaccccactggggcttagctggactcggagctcctgcagccctgacctccccagggcatctgcgactcccagattcagcctaggacttacagagctccctagaaggaattaattgtggacagcagtggggacggtccattttcagtcttcctaatcttctctgggagctgtttgacttgaattctttgacctccagggtttttacagaagcctacttgtttaggatgtgttaatcaaataagggatgcaagctgtgagtcctcttgggcagaaatggactttttctgaccactgctgcactcctcccgctcagcatctcagaagtggacatgggaccaagcatctcagtggtctcagctgtctggcttggaggtgggggggagagggagaaggtatagccctttaatcttcctctttttgacaccagaaagtatcccacattaatcagtcccacattaatcagctccttcctcaggcaaaagctgagctgggaaagtcccagatggggcagtgtccccatcattcattattactaagccagagatatccagcagggatcagtggagttttcagtcctcatcttatatccagagagcacaagacattccaaggcaaaactagatagtggacacttaataattcatcgattccaacacaagcttgcatgtaacatatctcataataccaagtaactcataaaacaagcagtgagagacatttatcggacaaacacttcctcagatcacttcatctgcctgagagaacagacctgccataatgggccttatccagcaaaacaggctgcgtgttgggagggcaaaatggctgttacatgagcccacccatcttgccatcaaagggatgtatttgcaccctgagtggtagcagggacagcttgctatgtgaaagctataagacaatgacacctcagagaccaagccacccagctatgggatcgtctagtgtgggagagagaacatacttttcctacccctttttcagtgaggcaagaagcagtagggatgtttttaactgccattaacagaaaacccaactcaaaggggcttaaccaataagaaatttattatctcctataacaagaaaccgcaaggtaggctagctccagaaaaggttaatttagcagctcaatggcatcatcaaggacccagatgctatcctcagtgctgctgtcagcttcaggctggcagctggatgcctatagtggttccatgcacaatatccagagcgtctcgggagaatgaaatgagaaaccttcccaaagtaccccttatagacttcttcttgaatctcactggccaggattgggtcacaagcccatgcctaagccaatcacaggtaagagaagtggaacggctctcattggcttgaaccaatcgggatccaccttcaggggctacagatggccgcagctgggctaaagcccgaggctggctgggagaaggcggaagcccgaataaaatcagtctctgttggtgaggaagaaggtaaactccagctgagaagaccaaccccaggagctaacagatagcgggaactcaatacatagagttattttctttaagtgacttgccaaagggcacagagctataagtggcagaaccagaactcaaatccagaaagagaacaaggatgctaaagataaactgggcttagttcacagctgctcccatgacagtccccatggtggaggggcctcttcctctgggagtccggctgttttgtcaccctgaaagtgaag

SEQ ID NO: 463859 - DNA, 2048 bp, Homo sapiens
ggacacaaagtaaaagcgctgccagttcatttaggagtccaagatgcatcataaatacccatatttgaatatggatttggaaatgtctaaattttatcagaacattacctttggttctgttatgtccttgaactacatcactggagttcaagcaggatttgtgtttcagatcagcaaaacatttccttttctgaggctttttcaattttgtctcattcgaataatattaaactacttaaaatgtcaacaccaaaaatccagcagtacctgtagactagatataaatgcctatggaaccacagatctgaacaggagcagccctgtcacaacagcctccaaaggacagagagtgaaccacagaggaaattcgaatgcatgtacagtgggttccattaccagggagcctgagcttgggacaagaggagctcatcaccaccagaaaatactaccaacatgcccaagagtttgtttcccatacttttaaagaaaaagaaaaatggatggttctgaaatcacctgggtttgttttattacattatatcttctggcaagatcagtgatggcagatgtgattcagcaatagaagcatggctgtactggaggggactgacaagaacgtttgcagtcggtagtgttcctcagtactcatcaatttgtgagccacaagaaattctagctctggaggcggatggtgggagtgaagcggaccagccggccattccctgttgcctacctgtggtggctctgcccagtcatcggtgtccactgttcagcatgcattctttatggacaatcttattcaagaaaatagttgcaaaagagcaagacaaaattcaaatgatgtacacttgaacacttgcctacagaggtgacagttgccccaaaaagtttgctgtaaagtttggaggaggaagacacttcctgtcttgaaatataaatatgagtatcaaaaatatctgagcgatttcgtcaatatttcaggcagttgttggaatgatttgtacatgaagagcctgaattctttgctgaactggtaatgggtagatacagtctaatacatcactatttttgtaaaaacagatttgatagtgcagcaaccttcgagcattctttaatcctggaactccaccatccaccctgaaaacattggaaaagaatacacaacaaaaaacacacaacctaaaacacacaacctaacaaaaaaacttcctaatgtgtacaaatgagaacactatcttccttactgtagtttgatttctaccaaattctaattttaagccagcagacaaacaggttgtcctatctattcccttaggctaaggctaaagggagaaacaggcatctcatttctaactcctggtacatttggacttcgggcctctagagcaccaaaaagtttgatgggaccacgccaagggggtcccctgtaaccaggagttggttaatatcctcccatccctcattcagacagggaacagaggcaaaaaaaaaaaaaaaatagcagggcaacaaacgctgccttctgcaaatgctctgtaataaattgttctttcagtggtgcagaagacggatttttctttcctttgcctctttcctcctttgcggggaagcaccaatgggcggcttgctttcccacctggccctggctgcctgtgcccataaatttgcctatgcaatgcctgtttacgggtcgctgatggaacatggagacggtgcattttgtaagcgccgggtagataatcatggtaattgatgtttggagctgtgagctcctaggagcacagggtctctttctcccagtgaggccctgctctctgttatcagcccagcccataattaaatatcactcttttacaatatgtttcaggctccttaatgagtctaaagcagaaatagtcacctctttcccctcggagctttatttgcttgttattaaacaatgttattgagctgccttctttccctgtgttgccaaacctgcatcatttccgttttataattgcacaattagagcgaaggctttgcttccatacatcagcaggccctgc

SEQ ID NO: 463860 - DNA, 5823 bp, Homo sapiens
gagtcggagctcggcctctccccggcacgttctcagctgctcctggttcagacccagcgagggagccgcgagcgaggctcaccgtccccggcgtgcaggatccggggctgctgagcgctcgctcccgcgtgtccggcgcttggagtccccgcggcaggagaggagtcgggacactagagctccaggggcgcctgtgggctccagggcctccggcttccccagtccccttcagctaaagccccagagacgtgctcagccccaggacctctgcggaacaagatccggattgagaagccactgcaactaccgaaatgggcagcaaaaccttgccggcgccggtgcctatccacccttccctgcagctcaccaactactccttccttcaggcagtgaacggcctgcccacagtgccttcggaccatctgcccaacctgtatggtttcagcgcgttgcacgctgtgcacctgcatcagtggacgctgggctacccggccatgcacttgccgcgctcttctttctccaaagtgccgggcacggtgtccagcttggtggatgcgcgcttccagctgcccgcctttccctggttccctcatgtcattcaacccaagcccgagatcaccgctggaggcagcgttccagcgctcaagaccaagccgcgctttgattttgccaacctggccttggcagcaacgcaagaagatccggccaagctcggtcgcggggagggcccaggctcccctgcaggtgggctgggtgccctcctcgacgtgaccaagctgtctccagaaaagaagcccacaaggggacgtctgccttccaagaccaagaaggaattcgtctgcaagttctgtggccgccacttcaccaagtcctacaacctacttatccatgagcggacgcacaccgacgagcggccctacacctgtgacatctgccacaaagccttccggaggcaagaccacctgcgagaccacagatatattcactccaaagagaagcccttcaagtgtcaagagtgtgggaaaggattctgccagtccaggactctcgctgtccacaagacgctacactcacaggtgaaggagctcaaaacctccaagatcaaatgctaaatagaacctgtgggtcacaaggaccctaggcccagcggccctctcctccatagggaccagaagcctgactctggcgggcagcgggagaggcgctcgctcgggaccttccacctctccaacattgtcccctgggtccctggcgcacgcggcacttcagagccccgcccggggccgcgaccccgaccgtccctgctgctcccctaggacgcggctaaactcttggccaaaaggcggtactcacgtggcggaagggaaactgcattaaaaaaagaacgaaagctccgcggagccgcagcggcgcctctcccagaagtattactttttctattgttattttatacgttttcttttttatttttgtctttgaccatataagcttgtaactctgactgcggagagtgagtggagagaggagaggcaacgaagtccttagcactggcagctcccacctcctcctcccgcccctgcccccacccccggagcctgcaaaagtgtaatccctgtatctgcttcagcctcctgccctagggaccgcggggcagccccctcccagctcttgcagctcagctggcggccgtgggctccgggactaggagagcgggacggggacctcgggcctggggtctgcagggggcccggcctccgctgccgcgacactgcgagggagcagccagccaagagccgggcgttatattgcgattggcactttatgctgaccatcggtaacggacatttatcactggagttttttttttttttaactattaaataaacggttattttacaggcattgcaggatgggtaatttccctcctaaacgcaggaaaccggttgggtcctctctttgagaggaccaggtttctctgctggacgccagcgtgtccccctcctaccaccccgtcttattaggatgacagggctgagatgtgtggagcaacgtcctctctcccggttaggtctgcctccgccccaccatgtattgattttcctacttttctcctccgcctcagggatagggtctcagccttcccactcctcaccgctaaagtgctgtgagtttacgaagaacctaagcctgaaggcagaaaaccgcccgtgagaaatcccagagtctctgggtgctgagacagcgtctctgggtgctgagatcgcttagggtgcaagaagagaagagaatgtctttccccaccctaaccgaaggcctccctcctggcctctggctttggggtgggaaggacccgccctcacagagcctcagagctgtaatatttcccgttccccgggtctcaacactcgggtgcaaatacacaatgaccgctgcctccccggaaccccaaaccaacatcactccctcccttagggtccctcagacacaattctctgcttgggacttgtcccctcctaggatcgaggctctgcacccgcgaagattccctacaattttaaagccttgtcaggaatggtgggggcgggcgccctgggaggcccgggacgcttaggaggaaaaattcgagtccgccttccataagctgaaccttccctggggtgtctagttttcccacagttagaagccaggccgccggggctcttctccttggggcaaggcggggctccccccagctccagcgccctgaccgcgggaccgcgcaggcggtggcgcccgcggcctttcccaagcgcaggatggcctctccagcttcagcgcccggagcgcggcggccgcggatgacaactggactataagcttccctgctgcaggcaccaaaaatcccagcctcaagccgggccctgctggctgagaaagcggcaggggatgcagaagttaaaacgctctgggctttcaccaccccatccccacctcctccgggaacgctcctgagtcctgtgcgggctagaacttcgaggcccgggaacccaactgggcactggaggctggccctgccggcgcggaccagccctggcctccacgctcagagccacgctgccccctgctggccagccctggaggggcggcccaggacttggcacctcaaggggtcttgcccgcaacctcgcgaaaccaccaagcatctatgtgtttggtcccaaaatcttgactggccccaggacccactgtggatgaggggcagggcgctgctgagtctggtctggtctgagggatcttcattagttgggcactatcccaatccttcttccaagcagttcacaaggtcgcgcgcggcccaggattatgcccccattcctgagaactggggcctctgagtgcgtggaagtggggctagccagtaggtttgcgggtggtgtagacggtctgcgcccaagcggcgcacgcaggttgtggtgtggtttgtgcctgaccatagcttgtactagggtcaactgcagaatcttccttggtttctttatgaagccccaggaggctgcgggccatggttgctccaaaacaaccagagtgcatgggtgaacacacacacacacagggtgcccttcctagtcccttggctctttctgggatgctatccttggggttgtctatggctgctcttccctagcccctgacatccctccacctcccagaacacatcattccacctccctgaagatcgagcctctgcagttcccggggcctcaggaagctacaaatgcggtgaaatggggaggtttgccagccacgttaatcctttttgggtcaccccacctccagcactgtgaaaacccacccagtccaaggtctgcaactgaatgtcagtatcaagtgtgcatcctcaaaataacagatttccagtgcagaattttaaattggggatggggaatggagggtgggacaggatgatgcgcagcaactccctggccctctcagaatgcccctatttgctctactgatgtttgctgttatcccggtggactcagagatcacgtctccctgcagcttgttctagtgattcatagactgtgcagaaacagtaactacaggtggaaaggccggctgggcctgtgggccatccgaccctatccaggctacaattcccaggtgatgtggttggttgatgtggttggaaactagtgccccagtttcctgctcatactcagtgtgggttgcacaaaaagtgcaattgagagggtcagaaatgttgggtgggtttccttgcctgccccaatttttcccccaatgcatctctagaaagtcccagctcttgtctcctctccagacccccatcacaataagcttcgctggtcccagtgactgtgtggcgctcagcgttgctggggctatttttcaggagaaaaagaggccgatggtgctggccaggtggagttcagctggggcccttctcaaagctgctaggcctgaagtttttgtgtacggctggggaagctatctggcctaggacagcctcttgggcagggagggcggaaggtgccagagaccctgggcacagcccggaactgccagatgctgtctccggtaagatatcaggtgcttccagggaaaagaacagcttgcaggagcttcttcctgggagagagtgtttcaggttctaccccctatttccagagtgtagttaggggttagggacccactaaaaaatgttttcccgcgtacttccttgccgcggaattcactgctcacattgtggggagggacgcaatgtgatgctctgggactccctgacgtgacctcagctcccagaacctgaggacctgatatcctaaatcccctagaatcttggtgtccccatagccggctcaaaagagtcccgtcccacctctcagagcgcgaagcctctgtgacgtcatggtctcctcccgcagacaccgtgacgtcacagaggcctcgggctggaacacaaggcttgaatgaggtccacagaggcattccattacgtaacttcgtgacgtcacagatgggccccgcctcgggctaacatatccacacctctcagccccgccccgccccgccccgcgaatcggcccaggcaggcgccacgaatcggttcgtctccactaacacgatccgcagacccgaagcgttggcagctgtcctgagtgaagggcggtgccctgcagcgtcctcttcttgaatcagtggtttagagtggtctccctgcccgcggggtttcagggcagcagttgccgcggcgtactcatcccacccacttctgcgcccactatggccgcgcccactgcggccccgccctcctctcccactgcgcaagcgccacgcgcaggcgcaaaaggaactcgcaggccagtgctgctggtgccggagtccggaagctgacggcggtgcgtggaaatcgtcgcggagttcagtgttttgcttttggggatcacaaactcaggggcacactggcccggcgggcgcatccagccgttggcgtatgtgtgggcagaaaatgcagacgagaaagtgggtggcgcttggctaatgcgggctggagcccttgacttggagtgcccagtccagcgccgcggtcctacagaggcccctgggatctgagctggcgagggtggcgcggcgggtcctacccaaggccagaaagttcgctgcggtcccagctcttttgggcagcctctctgaggtagagctctcagacggtcttcagcccggtggaacgccctggtgtcccactccacccgttcatcccgacttcctgggccgtctctagagcccagttggtagttgggcccagttggcatatgtttcaga

SEQ ID NO: 463861 - DNA, 1902 bp, Homo sapiens
gagtcggagctcggcctctccccggcacgttctcagctgctcctggttcagacccagcgagggagccgcgagcgaggctcaccgtccccggcgtgcaggatccggggctgctgagcgctcgctcccgcgtgtccggcgcttggagtccccgcggcaggagaggagtcgggacactagagctccaggggcgcctgtgggctccagggcctccggcttccccagtccccttcagctaaagccccagagacgtgctcagccccaggacctctgcggaacaagatccggattgagaagccactgcaactaccgaaatgggcagcaaaaccttgccggcgccggtgcctatccacccttccctgcagctcaccaactactccttccttcaggcagtgaacggcctgcccacagtgccttcggaccatctgcccaacctgtatggtttcagcgcgttgcacgctgtgcacctgcatcagtggacgctgggctacccggccatgcacttgccgcgctcttctttctccaaagtgccgggcacggtgtccagcttggtggatgcgcgcttccagctgcccgcctttccctggttccctcatgtcattcaacccaagcccgagatcaccgctggaggcagcgttccagcgctcaagaccaagccgcgctttgattttgccaacctggccttggcagcaacgcaagaagatccggccaagctcggtcgcggggagggcccaggctcccctgcaggtgggctgggtgccctcctcgacgtgaccaagctgtctccagaaaagaagcccacaaggggacgtctgccttccaagaccaagaaggaattcgtctgcaagttctgtggccgccacttcaccaagtcctacaacctacttatccatgagcggacgcacaccgacgagcggccctacacctgtgacatctgccacaaagccttccggaggcaagaccacctgcgagaccacagatatattcactccaaagagaagcccttcaagtgtcaagagtgtgggaaaggattctgccagtccaggactctcgctgtccacaagacgctacactcacaggtgaaggagctcaaaacctccaagatcaaatgctaaatagaacctgtgggtcacaaggaccctaggcccagcggccctctcctccatagggaccagaagcctgactctggcgggcagcgggagaggcgctcgctcgggaccttccacctctccaacattgtcccctgggtccctggcgcacgcggcacttcagagccccgcccggggccgcgaccccgaccgtccctgctgctcccctaggacgcggctaaactcttggccaaaaggcggtactcacgtggcggaagggaaactgcattaaaaaaagaacgaaagctccgcggagccgcagcggcgcctctcccagaagtattactttttctattgttattttatacgttttcttttttatttttgtctttgaccatataagcttgtaactctgactgcggagagtgagtggagagaggagaggcaacgaagtccttagcactggcagctcccacctcctcctcccgcccctgcccccacccccggagcctgcaaaagtgtaatccctgtatctgcttcagcctcctgccctagggaccgcggggcagccccctcccagctcttgcagctcagctggcggccgtgggctccgggactaggagagcgggacggggacctcgggcctggggtctgcagggggcccggcctccgctgccgcgacactgcgagggagcagccagccaagagccgggcgttatattgcgattggcactttatgctgaccatcggtaacggacatttatcactggagttttttttttttttaactattaaataaacggttattttacaggca

SEQ ID NO: 463862 - DNA, 1095 bp, Homo sapiens
agggggaggcgggtcgggggagggcaggggaacggaaggggtacccggggagcatcctaagggaacctcttcgcttaaaagggcggccgctgaagtggctctgagaacaaaggagttaacactcggactccacaggtggcccggggtggccctggaggagcccgcctttaccttgccctagcccaccggcgcgtcccgcagttccgaactaaacgcgccaggccgggaaggctcgggctgtctgaagagaggcgtgacctcgcctacaccagatccaaggcgcacataccgagacacccctcaacctcactcagcagtgccgtttccaactccgcggcagagacagcgcctggcgaccccggggcctgcgtccccgcccggtcagcatcgcaggtgttacccaaactctgacggtccctttaagaactcacccggagtcgcgccctccgaagctgagccgccctcggccagcgctgcaggccccagcttataaatctatgaaggtgtccaggtcctgccagactccgctgcatcttttgctttcactccagcagggtagcagcatgctgcctgtgccaaggcaatcactaaaaggaaaggatttaatgctgtcaaaaaagcttatgccagcttaggctgcaggaagaggaacagtgtcaagtatgttgaaagtggacatattgggagctgcagtcatcaaacaggcttattctgtgtacccagtgggcaagtacagtcaatggatgaaaattcaaccaatggacaaacacaggaagtttttccttaacatgagttgtcagaaactgtccaaaattccaaagagctgcctcaagaattgtgcgatgccctttgtggtgctggtatggcatggtgtcaaacgtgtgggctccggcgtcatcctgcttggactggaatgtacgttaaagaactctggagagtcaatcaggtttgtgtgtgtgccacaatttcttgaggtggagaagctgagcttttttcctaaacaccagaatggaagaggtcataggacagtaagaatgattaataatgcccttagactctggtgcttatatgacccctagccaagtcacttcaata

SEQ ID NO: 463863 - DNA, 1217 bp, Homo sapiens
ggcaggtggggacccaacccaacatgagtgacaaccagcccgccctaccaagtcatcctgaggggcccagggacttcaacatcaagctgttctacttcaggttctccaagctctgcctgcgggatgacagtggccaacagagattaagcaagaacttctgcgggttggtggcatatgcagcccccgagctgctgcagggcatcccctaccagcccatggtgtatgacatctggagcctgggcatgatcctctacatcatggtctgcagctccatgccttacgactccaacatcaggaagatgctgcgtatccagaaggagcaccgcgtggacttcccacactccaagaacctgacagacgagtgcaaggacctcatctactgcatgctgcagcccgacgtcagccagcggctgcacatccatgacaccctcagccaatgctgggtgcagcccaaggcacagggactgccctctatggtcttcaacaaggagggggaaagctcccagggaactgaactcttgtggacccctgaacctggctctgccaagaggtctgccaccaagctggagcctggggaacagacacagcccgagggacagcctgagacaaaacctgaggggttggcaatgcaaatgtccaggcagtcggacatcctaggcttccccagcaagccgtcgaccagggagaaagaggaagggccccccagcagcctccagagatgcgcacctagtgagccgtttgtggcccagtgtgccagcggcgaatgagatggagctcacgccttcaggcccaagctctgaagaagtcaaggcacaaaccagagaaggaagacggtcccggatgagccgctgttttcatcaatttcttctctctccccttgaacttcataaccgacattgctaaaggagcaataaatcactatattaatgcagatgccaaagtgaatgtctttgcctcaactgactagtcctgggctcccctccactggtttcccactcagattgtgcaatgattcctcgtttgcttgggaaaacacatcccaacgtgcccagtccagaccatgacctcaggcccaggctggggctggggcttgggctggggctgggagagacctggaggggcaggggccagagctgaaagggccctccatggcctgtccgtgctcctgccaagccacatcccttcaaaccgtcacatgtaatagctatcctcatccc

SEQ ID NO: 463864 - DNA, 981 bp, Homo sapiens
caaccatctgaatgaacacctcctgtcagcgacggcattccaaacctgaaaaattggttcaggccaagacaggaagggagggtcagacatgcctcattttaccctactccctttcttttgctttctggaactttgtggaattctttttttcccaaatattgtcaatctgtggttggttgaatccacagatggcaaacccacaaatatggaggacaaactatgtggtaagcacatgctgaaagttgttgaatattattttcacccttatgaaaggcctgacataagcagtttcagattgtgtgaattcttaattctgcagtgggcttccaacagtggttctgttgccagtgataacaaaaacctgggagagaccttgggcggttttatctttcaggggtcagccaagccagtgggaagcctacgacattcccctgggtcacttagtgaactcctactctttcatcaggcctcacttgaacatgacttcctccagaagccttcccagacatctttgagctagaaagtcagaagagtagaattggaacccagctcagtctgatgccacatcctttgttgtttccattaaatcagagaatttcttagtgctgagaaactattctggaacttacaacaaaggcaagtgggaagggagtcgcctggaatttgatctctgtagatgcctttttcatttagtttatttttcatttttatctgttgctttgctcttatcaaatacagataaatagcagctgctactggtgctgttgattgcgatttctgtttgaaaatggaatcttgagcatctgttctctccttttatattttactgtgagagaaaatctatttttttcaaaaggtaattcatacacatggtaaaaatttaaacaatataaaaacctatttttaaaaaacatatactcttgagtatttctgtgtactttgctttcatcactaatacatctttaagtttattccatattg

SEQ ID NO: 463865 - DNA, 6150 bp, Homo sapiens
aatattgaggcctgaggaatttctcccatgagttatcacaggagcccaaaggacatgtaactgattccccaggatggaagagtgacttccacaagacctaaaaataaccgaaccacttaatactcggaacatagcctctcccacccgcccccaccacggcccacccactagccagcaagataaaggcagctgctggggctggcaggggacagagacctggagccagggcagcaagaaggtgtctgttggagccagcagaacagaaccaatttgaacaagaacctccagaggaacgacgaaccctgagaccacagctgctacagaccacaaacaccccatcagccaagagagacccttgcatccagcctctaccctgctgaacatctagatctaaggctcccaatcccatcctcatctctgccccttcttctcagaaggatggccgacacccagacacaggtggcccccacaccaaccatgaggatggcaactgcagaggacctgcccctccctccacccccagccctggaggacctgccactgccgccacccaaggaatccttctccaagttccatcagcagcggcaagctagtgagctccgccgcctctacaggcacatccaccctgagctccgcaagaatctggctgaggctgtggccgaggatctggctgaggtcctgggctctgaggaacccaccgagggtgacgttcagtgcatgcgctggatctttgagaactggagactggatgccattggagaacacgagaggccagctgccaaggagcccgtgctgtgtggtgacgtccaggccacctcccgcaagtttgaggaaggctcctttgccaacagcacagaccaggagccaaccaggccccagccaggtggaggagacgttcgtgcagcccgctggctatttgagacaaagccactggacgagctgacagggcaagccaaggaactggaggccactgtgagggagcctgcagccagcggagatgtgcagggtaccaggatgctctttgagacgcggccgctggaccgcctgggctcccgcccctccctgcaggagcagagccccttggaactgcgctcagagatccaggagctgaagggtgatgtgaaaaagacagtgaagctcttccaaacggagcccctgtgtgccatccaggatgcagagggcgccatccatgaggtcaaggccgcatgccgggaggagatccaaagcaacgcggtgaggtctgcccgctggctctttgagacccggcctctggacgccatcaaccaggaccccagccaggtgcgggtgatccgggggatttccctggaggagggggcccggcccgacgtcagtgcaactcgctggatctttgagacacagcccctggatgccatccgggagatcttggtagatgagaaggacttccagccatccccagaccttatcccacctggtccagatgttcagcagcagcagcatctgtttgagacccgagcgctggacactctgaagggggacgaagaggctggagcagaggccccacccaaggaggaagtggtccctggtgatgtccgctccaccctgtggctatttgaaacaaagcccctggatgctttcagagacaaggtccaagtgggtcacctacagcgagtggatccccaggacggtgaggggcatctatccagtgacagctcctcagcactgcccttctctcagagtgccccccagagggatgagctaaagggggatgtgaagacttttaagaacctttttgagacccttcccttggacagcattggacagggtgaggttctggcccatgggagtccaagcagagaagaaggaactgattctgctgggcaggcccagggcatagggtccccagtgtatgccatgcaggacagcaagggccgcctccatgccctgacctctgttagcagagagcagatagtcggaggtgatgtgcagggctacaggtggatgtttgagacacagcccctagaccagctcggccgaagccccagtaccatcgacgtggtgcggggcatcacccggcaggaagtggtggctggggacgttggcacagctcggtggctttttgagacccagcccctggagatgatccaccaacgggagcagcaggaacgacagaaagaagaagggaagagtcagggagacccccagcctgaggcacccccaaagggcgatgtgcagaccatccggtggttgttcgagacttgcccaatgagtgagttggccgaaaagcaggggtcagaggtcacagatcccacagccaaggctgaggcacagtcctgcacctggatgttcaagccccaacctgtggacaggccagtgggctccagggagcagcacctgcaggttagccaggtcccggctggggaaagacagacagacagacacgtctttgagaccgagcctcttcaggcctcaggccgtccctgtggaagacggcctgtgagatactgcagccgcgtggagatcccttcagggcaggtgtctcgtcagaaagaggtttttcaggccctggaggcaggcaagaaggaagaacaggagccccgggtaatcgctgggtccatccccgcgggttctgtccacaagttcacttggctttttgagaattgtcccatgggctccctggcagctgagagcatccaagggggcaacctcctggaagagcagcccatgagcccctcaggcaacaggatgcaagagagccaggagactgcagctgaggggaccctgcggactctgcatgccacacctggcatcctgcaccatggaggcatcctcatggaggcccgagggccaggggagctctgtcttgccaagtatgtgctctcgggcacagggcaggggcacccttatatacgaaaggaggagctggtgtcaggtgaacttcccaggatcatctgccaagtcctgcgccggccagatgtggaccagcaggggctgctggtgcaggaagacccaactggccagctccaactcaagccgctgaggctgccaactccaggcagcagtgggaatattgaagacatggaccctgagctccagcagctgctggcttgcggtcttgggacctccgtggcaaggactgggctggtgatgcaggagacagagcagggcctggtcgcactgactgcctactctctgcagccccggctaactagcaaggcctctgagaggagcagcgtgcagctgttggccagctgcatagataaaggagacctgagtggcctgcacagtctgcggtgggagcccccggctgacccgagtccagtgccagccagcgagggggcccagagcctgcacccaactgagagcatcatccatgttcccccactggaccccagcatggggatggggcatctgagagcctcaggggccaccccttgccctcctcaggccattggaaaggcagtccctctggctggggaagctgcagcaccagcccaattgcaaaacacagaaaagcaggaagacagtcactctggacagaaagggatggcagtcttgggaaagtcagaaggagccacgactacccctccggggcctggggccccagacctcctggccgccatgcagagtctgcggatggcaacagctgaagcccagagcctgcaccagcaagttctgaacaagcacaagcagggccccaccccaacagccacttccaaccccatccaggacggtcttcggaaagctggggctacccaaagcaacataaggcctgggggtggaagtgatccccggatcccagcagcccccagaaaggtcagtagggaagagcaagcactacccagagggctgcctggggggtgggtgacaattcaggatggcatctacaccgctcatcccgtgaggacctttgacccacctgggggtgtccagctttctcagagggaaccccagtcaaggcacagggagactgccctctcagtccaggctccccgcccactccagggaggcccaggtcagagtactgggccagggcgggaggagcctgggggctgcacacagatggcctgggggccaccagggaaggcgatggcagaagtctgcccagggggcctccaagctgcagagaccaccctgaagactgcccctctaggccgccacattctggcctctgggccccaagctgcaggtgccagcccgcacccccataatgcctttgttcctcctcctcctactctcccagctgctgtgacaggacctgactttccagctggagcccaccgtgctgaggactccatccagcaagcctctgagcccctgaaggacccccttcttcactcccacagcagccctgctggccagagaacccctggagggtcacagacaaagaccccaaaactggaccccaccatgcccccaaagaagaagccgcagctgccccctaaacctgcacacctaacccagagccaccctcctcagaggctgcccaagcccttgcctctatctcccagcttttcctcggaggtggggcaaagagaacaccaacgaggtgagagagatacagccatccctcagccagccaaggttcccactactgtagaccagggccacatacctctggccagatgtcccagtggacatagccagcccagcttacaacatggcctcagcaccacggcccccaggcccaccaagaatcaggctacaggcagcaatgcccagagctctgagccccccaagctcaatgccctcaaccatgatcccacctcaccacagtggggccccggcccctcaggagagcagcccatggaaggttcccaccaaggggcccctgagagccctgacagtctgcaaagaaaccagaaagagctccagggcctcctgaaccaggtgcaagccctggagaaggaggccgcaagcagtgtggacgtgcaggccctgcggaggctctttgaggccgtgccccagctgggaggggctgctcctcaggctcctgctgcccaccaaaagcccgaggcctcagtggagcaggcctttggggagctgacacgggtcagcacggaagttgctcaactgaaggaacagaccttggcaaggctgctggacattgaagaggctgtgcacaaggcactcagctccatgtctagcctccagcctgaggccagtgccagaggccatttccagggacctccaaaagaccacagtgcccacaagatcagtgtcacagtcagcagtagcgccaggcccagtggctcaggccaggaggtcggaggtcaaactgcagtcaagaaccaagccaaggttgaatgccacactgaggcccagagtcaagtcaagatcagaaatcacacagaggccagaggtcacacagcctcaactgccccttccaccaggaggcaggagacatcaagagagtatttgtgccctcctcgggttttaccttccagccgagattctccctcctccccaacatttatctccatccagtcggccacaaggaagcctctagagactcccagctttaagggcaaccctgatgtctcagtgaaaagcacacaactggctcaggacataggccaggccctgctccaccagaaaggtgtccaagacaaaactgggaagaaggacatcacccagtgctctgtgcaacctgaacctgcccctccctcagccagtcccctgcccagagggtggcaaaagagtgttctggagctacagacggggccagggagctcacaacactatggagccatgagaaccgtgactgaacagtatgaggaggtggaccagtttgggaacacagtcctcatgtcttccaccacagtcaccgagcaggcagagccacccaggaacccaggctcccacctcgggctccacgcctcccccttgctgaggcagttcctgcacagcccagctgggttcagcagtgacctgacagaagctgagacggtgcaggtgtcctgcagctactcccagccagctgcccagtgaggcccaccgcctcccaccacacctgccacctgttcctggcctccactgccccaggactgaagtgggtacctgcctcctgtacactggagcaaggaccaagaggaaatggcatcttcagaggattactgtgggccatttccctttcgcagttctttcaataggcccagttcttccaaatgg

SEQ ID NO: 463866 - DNA, 6016 bp, Homo sapiens
aatattgaggcctgaggaatttctcccatgagttatcacaggagcccaaaggacatgtaactgattccccaggatggaagagtgacttccacaagacctaaaaataaccgaaccacttaatactcggaacatagcctctcccacccgcccccaccacggcccacccactagccagcaagataaaggcagctgctggggctggcaggggacagagacctggagccagggcagcaagaaggtgtctgttggagccagcagaacagaaccaatttgaacaagaacctccagaggaacgacgaaccctgagaccacagctgctacagaccacaaacaccccatcagccaagagagacccttgcatccagcctctaccctgctgaacatctagatctaaggctcccaatcccatcctcatctctgccccttcttctcagaaggatggccgacacccagacacaggtggcccccacaccaaccatgaggatggcaactgcagaggacctgcccctccctccacccccagccctggaggacctgccactgccgccacccaaggaatcccaccgagggtgacgttcagtgcatgcgctggatctttgagaactggagactggatgccattggagaacacgagaggccagctgccaaggagcccgtgctgtgtggtgacgtccaggccacctcccgcaagtttgaggaaggctcctttgccaacagcacagaccaggagccaaccaggccccagccaggtggaggagacgttcgtgcagcccgctggctatttgagacaaagccactggacgagctgacagggcaagccaaggaactggaggccactgtgagggagcctgcagccagcggagatgtgcagggtaccaggatgctctttgagacgcggccgctggaccgcctgggctcccgcccctccctgcaggagcagagccccttggaactgcgctcagagatccaggagctgaagggtgatgtgaaaaagacagtgaagctcttccaaacggagcccctgtgtgccatccaggatgcagagggcgccatccatgaggtcaaggccgcatgccgggaggagatccaaagcaacgcggtgaggtctgcccgctggctctttgagacccggcctctggacgccatcaaccaggaccccagccaggtgcgggtgatccgggggatttccctggaggagggggcccggcccgacgtcagtgcaactcgctggatctttgagacacagcccctggatgccatccgggagatcttggtagatgagaaggacttccagccatccccagaccttatcccacctggtccagatgttcagcagcagcagcatctgtttgagacccgagcgctggacactctgaagggggacgaagaggctggagcagaggccccacccaaggaggaagtggtccctggtgatgtccgctccaccctgtggctatttgaaacaaagcccctggatgctttcagagacaaggtccaagtgggtcacctacagcgagtggatccccaggacggtgaggggcatctatccagtgacagctcctcagcactgcccttctctcagagtgccccccagagggatgagctaaagggggatgtgaagacttttaagaacctttttgagacccttcccttggacagcattggacagggtgaggttctggcccatgggagtccaagcagagaagaaggaactgattctgctgggcaggcccagggcatagggtccccagtgtatgccatgcaggacagcaagggccgcctccatgccctgacctctgttagcagagagcagatagtcggaggtgatgtgcagggctacaggtggatgtttgagacacagcccctagaccagctcggccgaagccccagtaccatcgacgtggtgcggggcatcacccggcaggaagtggtggctggggacgttggcacagctcggtggctttttgagacccagcccctggagatgatccaccaacgggagcagcaggaacgacagaaagaagaagggaagagtcagggagacccccagcctgaggcacccccaaagggcgatgtgcagaccatccggtggttgttcgagacttgcccaatgagtgagttggccgaaaagcaggggtcagaggtcacagatcccacagccaaggctgaggcacagtcctgcacctggatgttcaagccccaacctgtggacaggccagtgggctccagggagcagcacctgcaggttagccaggtcccggctggggaaagacagacagacagacacgtctttgagaccgagcctcttcaggcctcaggccgtccctgtggaagacggcctgtgagatactgcagccgcgtggagatcccttcagggcaggtgtctcgtcagaaagaggtttttcaggccctggaggcaggcaagaaggaagaacaggagccccgggtaatcgctgggtccatccccgcgggttctgtccacaagttcacttggctttttgagaattgtcccatgggctccctggcagctgagagcatccaagggggcaacctcctggaagagcagcccatgagcccctcaggcaacaggatgcaagagagccaggagactgcagctgaggggaccctgcggactctgcatgccacacctggcatcctgcaccatggaggcatcctcatggaggcccgagggccaggggagctctgtcttgccaagtatgtgctctcgggcacagggcaggggcacccttatatacgaaaggaggagctggtgtcaggtgaacttcccaggatcatctgccaagtcctgcgccggccagatgtggaccagcaggggctgctggtgcaggaagacccaactggccagctccaactcaagccgctgaggctgccaactccaggcagcagtgggaatattgaagacatggaccctgagctccagcagctgctggcttgcggtcttgggacctccgtggcaaggactgggctggtgatgcaggagacagagcagggcctggtcgcactgactgcctactctctgcagccccggctaactagcaaggcctctgagaggagcagcgtgcagctgttggccagctgcatagataaaggagacctgagtggcctgcacagtctgcggtgggagcccccggctgacccgagtccagtgccagccagcgagggggcccagagcctgcacccaactgagagcatcatccatgttcccccactggaccccagcatggggatggggcatctgagagcctcaggggccaccccttgccctcctcaggccattggaaaggcagtccctctggctggggaagctgcagcaccagcccaattgcaaaacacagaaaagcaggaagacagtcactctggacagaaagggatggcagtcttgggaaagtcagaaggagccacgactacccctccggggcctggggccccagacctcctggccgccatgcagagtctgcggatggcaacagctgaagcccagagcctgcaccagcaagttctgaacaagcacaagcagggccccaccccaacagccacttccaaccccatccaggacggtcttcggaaagctggggctacccaaagcaacataaggcctgggggtggaagtgatccccggatcccagcagcccccagaaaggtcagtagggaagagcaagcactacccagagggctgcctggggggtgggtgacaattcaggatggcatctacaccgctcatcccgtgaggacctttgacccacctgggggtgtccagctttctcagagggaaccccagtcaaggcacagggagactgccctctcagtccaggctccccgcccactccagggaggcccaggtcagagtactgggccagggcgggaggagcctgggggctgcacacagatggcctgggggccaccagggaaggcgatggcagaagtctgcccagggggcctccaagctgcagagaccaccctgaagactgcccctctaggccgccacattctggcctctgggccccaagctgcaggtgccagcccgcacccccataatgcctttgttcctcctcctcctactctcccagctgctgtgacaggacctgactttccagctggagcccaccgtgctgaggactccatccagcaagcctctgagcccctgaaggacccccttcttcactcccacagcagccctgctggccagagaacccctggagggtcacagacaaagaccccaaaactggaccccaccatgcccccaaagaagaagccgcagctgccccctaaacctgcacacctaacccagagccaccctcctcagaggctgcccaagcccttgcctctatctcccagcttttcctcggaggtggggcaaagagaacaccaacgaggtgagagagatacagccatccctcagccagccaaggttcccactactgtagaccagggccacatacctctggccagatgtcccagtggacatagccagcccagcttacaacatggcctcagcaccacggcccccaggcccaccaagaatcaggctacaggcagcaatgcccagagctctgagccccccaagctcaatgccctcaaccatgatcccacctcaccacagtggggccccggcccctcaggagagcagcccatggaaggttcccaccaaggggcccctgagagccctgacagtctgcaaagaaaccagaaagagctccagggcctcctgaaccaggtgcaagccctggagaaggaggccgcaagcagtgtggacgtgcaggccctgcggaggctctttgaggccgtgccccagctgggaggggctgctcctcaggctcctgctgcccaccaaaagcccgaggcctcagtggagcaggcctttggggagctgacacgggtcagcacggaagttgctcaactgaaggaacagaccttggcaaggctgctggacattgaagaggctgtgcacaaggcactcagctccatgtctagcctccagcctgaggccagtgccagaggccatttccagggacctccaaaagaccacagtgcccacaagatcagtgtcacagtcagcagtagcgccaggcccagtggctcaggccaggaggtcggaggtcaaactgcagtcaagaaccaagccaaggttgaatgccacactgaggcccagagtcaagtcaagatcagaaatcacacagaggccagaggtcacacagcctcaactgccccttccaccaggaggcaggagacatcaagagagtatttgtgccctcctcgggttttaccttccagccgagattctccctcctccccaacatttatctccatccagtcggccacaaggaagcctctagagactcccagctttaagggcaaccctgatgtctcagtgaaaagcacacaactggctcaggacataggccaggccctgctccaccagaaaggtgtccaagacaaaactgggaagaaggacatcacccagtgctctgtgcaacctgaacctgcccctccctcagccagtcccctgcccagagggtggcaaaagagtgttctggagctacagacggggccagggagctcacaacactatggagccatgagaaccgtgactgaacagtatgaggaggtggaccagtttgggaacacagtcctcatgtcttccaccacagtcaccgagcaggcagagccacccaggaacccaggctcccacctcgggctccacgcctcccccttgctgaggcagttcctgcacagcccagctgggttcagcagtgacctgacagaagctgagacggtgcaggtgtcctgcagctactcccagccagctgcccagtgaggcccaccgcctcccaccacacctgccacctgttcctggcctccactgccccaggactgaagtgggtacctgcctcctgtacactggagcaaggaccaagaggaaatggcatcttcagaggattactgtgggccatttccctttcgcagttctttcaataggcccagttcttccaaatgg

SEQ ID NO: 463867 - DNA, 993 bp, Homo sapiens
gaaagagggactcagatcacctggaattatggcaatgtcttgcaaggatacttctgaaaatcgggtgtcacgggaagctgaactttgcatcccagttctgaaacatacagcaacctcatggagacagatgcatcactcggcattttggggcggtagcgagttcagtgacctgccagatttcttagcattaacttgaaagagaagacacttatttgatttgatttgatttctactagtcaagtgggcacctggattaagcagactctcccccaggcaccccggaggcctctgacatcccttatgtccagcccagacatggcctttctgtggcctcagcgtatctgcccagtccaatcggctatagccagaataaaaaggttggtttccctccacccatgagccatgccatacatgacatgcatgtgaataatgatctgagctgtgttatctggcagaggtgatgctcacggctctgctccatgttctgggacatgactggactctcattttagggaggaagatccaagagagggaaggaggctttcccagctactttcctgctaaccagggcagaggctggtctacatccccctatccaggtggcccctgcagtcatggcttttctgcttctagaagccatccctgaggtcagctgaatttagacctatggtatctccagtacagcactttgtcatctgtttgtgataatagttttccaattcttgtcacttccgccagaacatcattgcagaactcaaaatacattgcatcatacaaaatgaagtggagaattaaggtaattatccaattattaaaaaccatttcttattcgttagctaaataactcttcaagtctccattttacatgtgttcctctgatgtgaatttgaccctggcctatttgtttttcagtaaagtccaaaatccaaaatagcccaacagaaagaccccctcccagtattccacagcatcagtaataaagctccttatcag

SEQ ID NO: 463868 - DNA, 1171 bp, Homo sapiens
agaaactgcagcatgtcacaaccaaagccattgctttttgcaaatgggaaatctgatgcccaaagagaagaagagcagatcccaggccttttgctcactgctctgccttactaatgccatattggctaacctcatgagtgcccttgccagagctggtgagcccttaaaagaaactgggcctttgctaaagagaaagagtcagaggaatgctcttgctggccttgaaggtgcaatgccttattgtggaaagggccacatggcagagactagcagccagcctctaggagctgggaacggactcactgacagccagcaaggaaagcttgatgaaattgtactggtcaagtcagtcaaaccagtcaagcggacaagaaagagggactcagatcacctggaattatggcaatgtcttgcaaggatacttctgaaaatcgggtgtcacgggaagctgaactttgcatcccagttctgaaacatacagcaacctcatggagacagatgcatcactcggcattttggggcggtagcgagttcagtgacctgccagatttcttagcattaacttgaaagagaagacacttatttgatttgatttgatttctactagtcaagtgggcacctggattaagcagactctcccccaggcaccccggaggcctctgacatcccttatgtccagcccagacatggcctttctgtggcctcagcgtatctgcccagtccaatcggctatagccagaataaaaagggaggaagatccaagagagggaaggaggctttcccagctactttcctgctaaccagggcagaggctggtctacatccccctatccaggtggcccctgcagtcatggcttttctgcttctagaagccatccctgagaacatcattgcagaactcaaaatacattgcatcatacaaaatgaagtggagaattaaggtaattatccaattattaaaaaccatttcttattcgttagctaaataactcttcaagtctccattttacatgtgttcctctgatgtgaatttgaccctggcctatttgtttttcagtaaagtccaaaatccaaaatagcccaacagaaagaccccctcccagtattccacagcatcagtaataaagctccttatcagatctaatttaaatctttcttgaaacaacttaag

SEQ ID NO: 463869 - DNA, 2288 bp, Homo sapiens
ggctcacctgctggcttcacagaagcattaatgcatggggtgtcaggcgtcttggctccggagaaagctgcgtggcaagaggcggccagtgatagcgttctgcctcttgatgatcctatctgcgatggctgtcacccgctttcccccacagcgtccatccgccggcccagaccctggtcccatggagcctcaggggcatgttgtgctcctgagggaggatgaggttggagatccaggaaccaaagacctgggccacccccagcatggcagtcccatccaggagacacagagtgaggtggtcaccctggctcccccatggctgacagaccacgatgtgcagatgctccgtctgttggcacagggggaggtggtggacaaagccagggtccccgcccatgggcaggtgctacaggttggcttctccactgaggctgcccttcaggacctgtcctctcccaggctcagccaactctgttcccaagggctctgtggcctgatcaagaggcctggggacctgcctgaggtcctgtccttccacgtagatcgtgtgctggggctgcgccggagcctacctgctgtggcccgccgcttccatagccccctcctgccctaccgatacacagacggtggagcaaggcctgtcatctggtgggcacccgatgtgcagcacctgagcgacccagatgaggatcagaactctctggccttgggctggctgcagtatcaggccctgctggcacacagctgcaactggccaggccaggccccgtgcccgggcatccaccataccgagtgggcacgcctggcgctcttcgacttcctgttgcagggttgcagcgtgggactcttcctcagctgccaacccctgctgtggggacaagtctctgtagccaaagcatacacagtggaagaagtggccaaagaacctaagtcaaaatctgggggatcgaagtcctctgctatgtcttcagacaggtccctggctgaaaatggagcgatggccgaggagaagccaactccccagatgaacgggaccccaggtgatgacagggctcccagccactctgaaagtgccttgaataatgactctaaaatgtgcaatacaaatcctcattgaaatgcactaagtacagacagcccttgccacacagaagctgctctggaggcagctgtcttaaataaagaagagtaaacttactttttatagagagtgaaggatgctggaagggtaaggtatttaggaatatctggagagaaagaacctgcagttatgtacattttgtcctttctgtaagagaaaaatgaggactttggaaattcagatccctctttgatatcagagatttaaatgatacatttttaattttaaccagttatagtcaaaatgctacaataaaacaaaaaagagaaagaaaatgaagagcatttgactcccactcttaaaatgaagtacacataagctttaaactggttatgacaaaagcctatagttgtgtttcttgaagtataaagaaaacaaattttggcagtctttaagtatatatagcttaaaatataatttgtagcatttggcaccatatgtatgccattatatttgattttgcattactgtttcacaatgaagctttctttaagactttgatttttatgattatgaaagaaataaggaacaaccacagtttttctttcttaaatttcatcactgttgatgtggttcttttgtgttaaaaaaaagtgcaactatcaaaactaaaaaattatagagtaatattgccgttctgctgattttaaatatacatcatacgtactttacgagcaggttaaatggagataaagttgaaatcatagaagatgcaaatgacctttcaaaatcaacacaatgtgttctgaaacttttcgtgactcacaccatgcatctgtgatcaatgaactatgtggttttgaatcggatgtagacctttaatactactacttgagctaaacttctgcatggttcgtaatttttgaagtgtgtggttaatattgtgcatgttatcatcctttcttccattcttatcagtatgtgcccatttgcaaaacaaaaatactaataatcagtaatagtcctagaaaagatgttaattctgtttagtcattgactgatattgcgctaaccttgaaattgtatgattattgacctctgttgcatttattctaaagccccccaaaaattatctagccgtttcgaatatcaacattacactggtgtattcactgctttatgcattattgttctttgttgctgtttt

SEQ ID NO: 463870 - DNA, 1972 bp, Homo sapiens
ggctcacctgctggcttcacagaagcattaatgcatggggtgtcaggcgtcttggctccggagaaagctgcgtggcaagaggcggccagtgatagcgttctgcctcttgatgatcctatctgcgatggctgtcacccgctttcccccacagcgtccatccgccggcccagaccctggtcccatggagcctcaggggcatgttgtgctcctgagggaggatgaggttggagatccaggaaccaaagacctgggccacccccagcatggcagtcccatccaggagacacagagtgaggtggtcaccctggctcccccatggctgacagaccacgatgtgcagatgctccgtctgttggcacagggggaggtggtggacaaagccagggtccccgcccatgggcaggtgctacaggttggcttctccactgaggctgcccttcaggacctgtcctctcccaggctcagccaactctgttcccaagggctctgtggcctgatcaagaggcctggggacctgcctgaggtcctgtccttccacgtagatcgtgtgctggggctgcgccggagcctacctgctgtggcccgccgcttccatagccccctcctgccctaccgatacacagacggtggagcaaggcctgtcatctggtgggcacccgatgtgcagcacctgagcgacccagatgaggatcagaactctctggccttgggctggctgcagtatcaggccctgctggcacacagctgcaactggccaggccaggccccgtgcccgggcatccaccataccgagtgggcacgcctggcgctcttcgacttcctgttgcagggttgcagcgtgggactcttcctcagctgccaacccctgctgtggggacaagtctctgtagccaaagcatacacagtggaagaagtggccaaagaacctaagtcaaaatctgggggatcgaagtcctctgctatgtcttcagacaggtccctggctgaaaatggagcgatggccgaggagaagccaactccccagatgaacgggaccccaggtgatgacagggctcccagccactctgaaagtgccttgaataatgactctaaaatgtgcaatacaaatcctcattgaaatgcactaagtacagacagcccttgccacacagaagctgctctggaggcagctgtcttaaataaagaagagtaaacttactttttatagagagtgaaggatgctggaagggtaaggtatttaggaatatctggagagaaagaacctgcagttatgtacattttgtcctttctgtaagagaaaaatgaggactttggaaattcagatccctctttgatatcagagatttaaatgatacatttttaattttaaccagttatagtcaaaatgctacaataaaacaaaaaagagaaagaaaatgaagagcatttgactcccactcttaaaatgaagtacacataagctttaaactggttatgacaaaagcctatagttgtgtttcttgaagtataaagaaaacaaattttggcagtctttaagtatatatagcttaaaatataatttgtagcatttggcaccatatgtatgccattatatttgattttgcattactgtttcacaatgaagctttctttaagactttgatttttatgattatgaaagaaataaggaacaaccacagtttttctttcttaaatttcatcactgttgatgtggttcttttgtgttaaaaaaaagtgcaactatcaaaactaaaaaattatagagtaatattgccgttctgctgattttaaatatacatcatacgtactttacgagcaggttaaatggagtgtgacttatgttgcttaggaaggcaaaatccagagctttaagacactgggtttttacaggaaatacaggaaccaaatataagggctgtccatataggccacggaagtatacccttatggtattcaggaggtctggactttg

SEQ ID NO: 463871 - DNA, 787 bp, Homo sapiens
aacaatcttacctaattttatggtctccatgggtgtctgaaaagaaacattatatgggtcacacaactgttggtggtgattgtggtggtggtgctggtggtggtggtggtggtgatggtggtagtggtggtggtggtggtggtggtggtagtgatggtggtgatggtggtggtggtggtggtggtgatggtggtggtggtggtggtggtggtagtgatggtggtgatggtggtggtggtgacggtggtggtgatgatcatggtggtgacactgacaatgatggtggtggcaatggtagtggtgatgttggtggtggtgatggggataatggtggtgatggcagtcatggtggtgatggttgtgatggtgacagtggtggtgatggtgaaggtgatgatgatgttgatggtggtggtgatgttggtaatgatggtgatggtaacggcgattgcactcaaatcccaaaatatgaattaaagactttaactggtatgttagatacttgagaaatctactctacctgtcttctctaagtctcaattcctatccctcaaatgttgattaatctgattacaatgatattgttctttgattaaaacctgaaagcacatttgaaagaaagtaaaagaagtgaagttaaagcaactgcttgagggatggatgtatttctctccatggatgagtttttaattctttattattattttcatcacagtccttgtcacagaaaggatttcaaagtatcaatagtcctttaggttgctgtattataaaattccaaggatat

SEQ ID NO: 463872 - DNA, 1054 bp, Homo sapiens
gggatggaaagtcacccgtaaggatgctaacatgccttggaaccatgctgcttgaggctctggactgcatcctaccaccaactcgtccaactgacaagcccttgcacctgcctctccaggatgtctacaaaattggtggtattggtactgttcctgttggccgagtggagactggtgttctcaaacccggtatggtggtcacctttgctccagtcaacgttacaacggaagtaaaatctgtcgaaatgcaccatgaagctttgagtgaagctcttcctggggacaatgtgggcttcaatgtcaagaatgtgtctgtcaaggatgttcgtcgtggcaacgttgctggtgacagcaaaaatgacccaccaatggaagcagctggcttcactgctcaggtgattatcctgaaccatccaggccaaataagcgccggctatgcccctgtattggattgccacacggctcacattgcatgcaagtttgctgagctgaaggaaaagattgatcgccgttctggtaaaaagctggaagatggccctaaattcttgaagtctggtgatgctgccattgttgatatggttcctggcaagcccatgtgtgttgagagcttctcagactatccacctttgggtcgctttgctgttcgtgatatgagacagacagttgcggtgggtgtcatcaaagcagtggacaagaaggctgctggagctggcaaggtcaccaagtctgcccagaaagctcagaaggctaaatgaatattatccctaatacctgccaccccactcttaatcagtggtggaagaacggtctcagaactgtttgtttcaattggccatttaagtttagtagtaaaagactggtatgtacatgcgttgtaaacttcgaagaaggaagtttgggcccttggttttttgggtggggttaagatagtaaaacgcttttgggaatgtcccattcgcttggccttcagttgaaaaagggggctatatgggagaactttagcatagatataacgcagagggaatgttaaaaatgtttttaaatttatataaaa

SEQ ID NO: 463873 - DNA, 1709 bp, Homo sapiens
gaaaactacccccaaaagccaaaatgggaaaggaaaagactcataccaacattgtcgtcattggacacatagattcgggcaagtccaccactactggccatctgatctacaaaggcggtggcatcgacaaaagaaccattgaaaaatttgagaaggaggctgctgagatgggaaagggctccttcaagtatgcctgggtcttggataaactgaaagctgagtgtgaacatggtatcaccattgatacctccttgtggaaatttgagaccagcaagtactatgtgactatcgttgatgccccaggacacagagacttcatcaaaaacatgattacagagacatctcaggctgactgtgctgtcctgattgttgctgctggtgttggtgaatttgaagctggtatctccaagaatgggcaaacccaagagcatgcccttctggcttacacactgggtgtgaaacaactaattgttggtgttaacaaaatggattctactgagccaccctacagccagaagagatatgaggaaaatttgctaacatgccttggaaccatgctgcttgaggctctggactgcatcctaccaccaactcgtccaactgacaagcccttgcacctgcctctccaggatgtctacaaaattggtggtattggtactgttcctgttggccgagtggagactggtgttctcaaacccggtatggtggtcacctttgctccagtcaacgttacaacggaagtaaaatctgtcgaaatgcaccatgaagctttgagtgaagctcttcctggggacaatgtgggcttcaatgtcaagaatgtgtctgtcaaggatgttcgtcgtggcaacgttgctggtgacagcaaaaatgacccaccaatggaagcagctggcttcactgctcaggtgattatcctgaaccatccaggccaaataagcgccggctatgcccctgtattggattgccacacggctcacattgcatgcaagtttgctgagctgaaggaaaagattgatcgccgttctggtaaaaagctggaagatggccctaaattcttgaagtctggtgatgctgccattgttgatatggttcctggcaagcccatgtgtgttgagagcttctcagactatccacctttgggtcgctttgctgttcgtgatatgagacagacagttgcggtgggtgtcatcaaagcagtggacaagaaggctgctggagctggcaaggtcaccaagtctgcccagaaagctcagaaggctaaatgaatattatccctaatacctgccaccccactcttaatcagtggtggaagaacggtctcagaactgtttgtttcaattggccatttaagtttagtagtaaaagactggttaatgataacaatgcatcgtaaaaccttcagaaggaaggagaatgtttgtggaccacttggttttcttttttgcgtgtggcagtttaagttattagtttaaaatcagtacttttatggaaacaacttgaccaaaaattgtcacagaatttgagacccattaaaaagtcatgagaaacaaaaaaaaaaaaaagggggggtaaagatcccgggggcaagtagcgtaccgtttgaagggccaaaggggataagaagggggggtaaacgggaggaaagttcgggtttggaggacattggggggatggacacaggagcggaataaattgggactcgggagtta

SEQ ID NO: 463874 - DNA, 1946 bp, Homo sapiens
gagggacactcttaggcctcttactgagggcgggggtcccggagagccatggacagggcaacgctctactaggctccttggttcatcccagatcagcccttgggcccctggcatctaaggcagcaaaaaggcaaggggacaccgcccggggtggggcacgccaccgcgacaatgcctcttggccttgggtggataatggcacccctgggcaaaccctaggggcggggcccagaggcgaggggcttccccaatcagtctccgccctagcgccctggacttcggccccattccattgggtgagggtgggggcacgaaaagaggagcgggcttgcggccccaccgtgtcccgcctcctcagtccccagcgactcgcaggggctggtggggctggggtccagctgccgtgctcccctgccctgcgccgcgccgcgcgtcttggtaggcgctgcgctgccggggccgggtcctgggccagtgcaactccgcccccagccgtatccagcggactgtcctccgccgcgcgcccggcacagcatggggaggcgctgctgccggcggcgcgtgctggcggccgcctgtctgggcgccgcgctcctgctcctatgcgccgcgccccgctccctgcgcccggcatttggaaacagagccctgggctccagctggcttggtggggagaagagaagccccctgcagaagctctatgacctggatcaggacccgcgctcgaccctggcgaaggtgcaccggcagcggcgcgacctgctgaacagcgcctgtagccgccactcacgccggcagcgcctgctacagccggaggacctgcggcacgtgctggtggacgacgcgcatggcctgctctactgctacgtgcccaaggtggcctgcaccaactggaagcgcgtgctgctggcgctgagcggccaagcccgcggcgacccgcgcgccatctccgcgcaagaggcgcacgcgcctggccgcctgccctcactggccgacttcagccccgccgagatcaaccggcgcctgcgcgcctacttggccttcctgttcgtgcgggagcccttcgagcgcctggcatcggcttaccgcaacaagctcgcgcgcccctacagcgccgccttccagaggcgctacggtgcacgcatcgttcagcgcctgcggccgcgcgcgctccccgacgcccgggcccgcggccacgacgtgcgcttcgcggagttcctggcctacctgctggacccgcgcacgcggcgtgaggagcccttcaacgagcactgggagcgcgcgcacgcgctctgccacccgtgtcgcctccgctacgacgtcgtgggcaagttcgagacgctggcggaggacgcggccttccggtcctggaggtcctgtggccacgcggggcaagtgcctttccgacaagacccccggggaatgcaggtgctgccggccccaggacccctcttcaagagccactgcgtgcactcacctggccgccgggccagcgggcgcagggcacacctggccaggcttgggggcagcccatctcaggtggccctgcacgcgtgtgcctgcctcggcctgtcgcctgaggcctgcttcctccacttgctccagctgacaggcacctctccaggcccctgtggcccgagcctgtgtcctccccacctcgcccaccctggcaaggacagctgcggccaaggacgaaagccctcccttggctggcctcacgatggggccgtcccgggagccagctcagccaagccctgggccttgtgctgcctcccacctttgtgcgtgtgtgactgtgagagtgtgcatgagtgtgtgagtatatgagtgagagtgtgcataacgttccctgggtgctatggtttgaatatttgtcccctccaaaactcatgttgaaatttaatccacaatgtggcagtcttgagagatgacccaaccattaagac

SEQ ID NO: 463875 - DNA, 1131 bp, Homo sapiens
aagtgaccatgagcgacgagagagcaagagagggagaggaattcctcctaggcagtgagatgaaggaagaagagccttccctgaaagggcgtccactcccctgttcgcaggtcaaccctttcagagaccgtatctgcagagtgttctcccacaaaggcatgttctcctttgaggatgtgctgggcatggcatctgtgttcagcgagcaggcctgcccaagcctgaagattgagtatgcctttcgcatctatgattttaatgagaatggcttcattgatgaggaggatctgcagaggatcatcctgcgactgctgaacagtgatgacatgtctgaggacctcctgatggacctcacgaaccacgtcctgagtgagtcggatctggacaatgacaacatgctgtccttctcagagtttgaacatgcaatggccaagtctccagatttcatgaactcctttcggattcacttctggggatgctgatgtagcggcaaatacctgacatggcagcctcgagggagaccacaggaatcgaaccccctccagcactggagggagctggtttgaagtatgactttgtactgggcccacactcacctctagaatattgtttattagataaaagaaaaagcttttccttagcccatcagatcatcgctttttaaatgcagggtcatacatggtactttttattaagaactgccctttccagggcttcagtgtgccagcgatgtcaagcaggctggggtggcaatctttctgagggaatagttcaaatctcaacccatgtcatagcagggggccaagccaaatgggatgaaggtccctagcaagatacatgtccttccctcccttcatcaaaacccccgacccccagcacctcacagttcacagctgcacagagacgtgcacatagcagccattccagccggtgcccggctccccactccccttctgagggagaaggcatcttggccctgattgtgggaccagcaattagagtttatttgctttgctattcagccaagccctggaatgaatttggccaccacagacagcctttggggtccagctcctcagggactttgagacacagaagaagccccccattgggtttttcttatttacactg

SEQ ID NO: 463876 - DNA, 1207 bp, Homo sapiens
atggggcaatgcttgaggtatcagatgcactgggaggacctggaagagtaccaggccctgaccttcctgaccagaaatgaaattctgtgcatccatgacaccttcctgaagctctgccctcctgggaagtactacaaggaggcaacgctcaccatggaccaggtcagctccctgccagctctgcgggtcaaccctttcagagaccgtatctgcagagtgttctcccacaaaggcatgttctcctttgaggatgtgctgggcatggcatctgtgttcagcgagcaggcctgcccaagcctgaagattgagtatgcctttcgcatctatgattttaatgagaatggcttcattgatgaggaggatctgcagaggatcatcctgcgactgctgaacagtgatgacatgtctgaggacctcctgatggacctcacgaaccacgtcctgagtgagtcggatctggacaatgacaacatgctgtccttctcagagtttgaacatgcaatggccaagtctccagatttcatgaactcctttcggattcacttctggggatgctgatgtagcggcaaatacctgacatggcagcctcgagggagaccacaggaatcgaaccccctccagcactggagggagctggtttgaagtatgactttgtactgggcccacactcacctctagaatattgtttattagataaaagaaaaagcttttccttagcccatcagatcatcgctttttaaatgcagggtcatacatggtactttttattaagaactgccctttccagggcttcagtgtgccagcgatgtcaagcaggctggggtggcaatctttctgagggaatagttcaaatctcaacccatgtcatagcagggggccaagccaaatgggatgaaggtccctagcaagatacatgtccttccctcccttcatcaaaacccccgacccccagcacctcacagttcacagctgcacagagacgtgcacatagcagccattccagccggtgcccggctccccactccccttctgagggagaaggcatcttggccctgattgtgggaccagcaattagagtttatttgctttgctattcagccaagccctggaatgaatttggccaccacagacagcctttggggtccagctcctcagggactttgagacacagaagaagccccccattgggtttttcttatttacactg

SEQ ID NO: 463877 - DNA, 3367 bp, Homo sapiens
gggaccgtcttccttctctggtttgtgccttgacttcttcagagcttgggcctgaaggcgtgagctccatctcattcgccgctggcacactgggccacaaacggctcactaggttcttggagtgtgggaagtccacgcggtgctccttctggatacgcagcatcttcctgatgttggagtcgtaaggcatggagctgcagaccatgatgtagaggatcatgcccaggctccagatgtcatacaccatgggctggtaggggatgccctgcagcagctcgggggctgcatatgccaccaacccgcagaagttcttgcttaatctctgttggccactgtcatcccgcaggcagagcttggagaacctgaagtagaacagcttgatgttgaagtccttgtcgaggagaaggttctaacacttgaggttctggtgcatgatgtccaggtcgtggcagtatttaatggctgaggagagttggtggaacatcttgcacgccatgtccttgggcagggctccctggcactcaatgaactagttttttttctgcccctggctgggctcccagggcagatctggggctgggggctaaaggcggggactggatgccaccctgagcactggtggctgctctgaggacagtacaagcagcaggggcagcactggagagtgtggccattgttttttctggcagtggagcccctctgctgtgccaggctctgtgtccagcacttgttccgggctatgccctaggggaaaccggcaggccctccctcctccacagcggttcggccttaaaaagacccctttggggcgcacttttgggctgctcacgggacctgagcttgcaggtgtgaagacccttggagtcccagccaggttcccacttcgttctctccgctccccacccgcgcgacccctcggcgccccgccccatgccccgcgcctttcgatgtccatccttgccgtcccgcgcccgccgtccctaaccggcgtccagagaccctactcccttcggtggccccgccgctcaggccccggccccggccctgcctctctgcttaaccaatggcacgcctcactccgtatggtcccgcccttcccttagagcccgcccctcagtccccgcccttaggtccccgccctccgccgtcgcgaccttaggcctcaccctcttcggagggctttggctctggccccgccccccatcttgacggtcattggcccgcgcctgcgtcgcgggcgggaggcggggcggggcggcgcggcgcggagccgagcaggacggccgccatcttgcgcgcagctggagtcggtgcctgaggttgcagccgagagtgtgcgccagcccgcggcccagccgaagctctttcccgccgcctctccgcgcctcgcccaggttcagctccgcctgaccctccgcttggcacggtcccctgaccctcagtccggcctggtccggccttccagccgccccggggacgatgaacggaggataaatggtgcccaaggcagacagcggcgccttcctgctgctcttcctgctcgtgctcactgtcaccgagccgctgcggccaggtgcgccgcgcgatgggggcggtgtgggggctgggcggcgagcggggccggggtcgccccgggacctcctttcacccgcggcgccctcctgcaggggccgcgcctggggcaggggcgggcggggcctggctcgcgggccgcctggcactctctgcggacgcctgctggagcttacctgggctcgcggcgcctcggacttcgtgcagctctgctgtccaggatgttgcctctgggcccttcccgggagcggcggcggccaggagctacgccacgggcgcaccctctcgccagtccagcgtcggagtcgggctggggacagtggctctcaggggcacctggtttcacagacgtcctcccagcagtggcctagtgccagcctctcagtcctggaaactcctcgcctggacagcggtggttgtggctgtcattcagtgagacgttgcgctaaggaagtcctcaggtcccaccgggcctagaggaggcaccaggagtcagcctagcgttgtgtggccggcgcgagcgtcccgggagcagagacctcgccactgtgcggggcccttagccgtgctgcagtactgagtgattatatcctcttagcagcggtggccggtgatttgtttgtgcaggtgtccttctagcagtgacggcaggcagggagttcctctgcctctcttggttgttggcataaggacgacccgattggcatttagtagtttcttgactctaagtggaatgcatcagtgacaacatttaaggaccccgtagatagctcttgactgattagatgtcttttccttgtctgcagagtgggctcggtaatcccgagagaccagttttgggccaacagttcattgagcagagtgatgcatgggcttggctgcctctggtgggggtggcgaggaggatgagagccttgtggcagtcctgcaaaaatgccttgggaggatgggatccgggggtaggggacatggctgtggagccagctggcctgggccccaccctgcccatgggctatggtttgctggcctactgccacttcctcaatggcctctcaccctttggtcccacagagctgcggtgcaaccctgggcagtttgcgtgtcgcagcggcaccatccagtgcatccccctcccctggcagtgtgacggctgggcgacttgcgaggatgagagcgacgaagccaactgtccagacgcccctggtggtcctcacctgtcagtgctgctgggccagcttccccgttcaccatcagtgtgggagaatcagtcactctcacctgtgtctccttgctgtgttcctgtgctggggaagcagcagcgtggcactctagtggtgctggaggcaggaggggcacatgtgctccgagctgcacaggtcatggagcccagagtcggagcagatgtggctctgggtgctacagtgacccctgcaccaggtccccagctgggctgtgaggcagggctgctcgggccccatggccctggtggaggtggaagaggccccccagcttaccaaaggctggccctccgcgggaagagggacattctctactgtcagaggcaggcctgagaggtctgtaagggttctgtcctgtgctatgcgcattccccagcctggcccccagactctcccccaggacactgtctgacatcagcatcatcttgacagccaagcccttccccttcttgctggcaaaggcctgtgtctgtgctggcaggtttccatggtgggcccagaatgggcattgaataaacgtggggttcatcttgtctttctgtgagcaattttaccag

SEQ ID NO: 463878 - DNA, 1367 bp, Homo sapiens
tcatcacttaagtcaaggaccggccatttacacttcttttttggtggaatgtcatcagttaaggtggggcagggcattttcacttcttttgtgattcttcagttacttcaggccatctgggcggtatatgtgcaagtcacaggggatgcagtggcttggcttgggctcagaggccctgacataaggggtgattaaaatttaaagccattggacctgaggaggggcatttgctgactataagataatgacaaaaggggagataagaagaagtttaataagactctttgagttgcaagtaacggtcatccgatttgaattggcttcatcaaaggggaaattcactagctgggtactcatattattgataaaaaagattgaaaaatcaaacaaagagtcaagcaaggatgtagttggttacaggaagaaactggcaccggaggacttacatgctgctaggactcattccttaccaatcaattatggtcaggggagtgggaccatgaaagaaagtgcagttcccgtgggtattacaggattcgaggtcgggggctggaaggaacaacacccagaagtagaggaaacctcttttattcttagaagaagggaagcgtatttagcagacaaaataattggtttcctctacagatggattaattatttgccaactcacccccctccctgatctgccaaatggttaagtggaatatcctattccaggcatttttttttttttccagatacaaccttagagataatgaagtctattgcacagaaagaaactggaatcaggctgtttattgactgcagagaagtagcgtctcttgaatggttaatggcaattgttaattagattgcttttcctacactgccctgtgtggtggtggatggcatacgtggtaatctgagtgtggtaagcatgaaaagcacagaatgtgtgaaagcagcaacaaacttcacatccatcaaattcttaacatgaaccaggttctttgcttacattcgcataggcatatcggtctggttttacttgtcaggagggactgaagaaagcacaggacgtaagttcctccaagagcattcttggagcagcatctcatcgctgtccttgggtgtagcctcccttttgtgaggttcactccctcagctggaggatgaaccacagtgctgctgcagacctagctgatgtcacagttgttcaaaaggttcctcttgaagaatgaaatccttgggctgccattaggaactgcatgcagttaagccgtataacctctctgatttttagtttctccatctattttataaaataaaacattgaactaaattatctctaaggcctattctattattttttatattattttctaatc

SEQ ID NO: 463879 - DNA, 2072 bp, Homo sapiens
atgtgttttgaaaatatgcgtattatgagatatgaagagtttatatccatgatattcaggctggattatacccaaccactttcagatgaatacatcacagtgactgatacaacatttgttgacattccagtacgattgtacttgccaaaaagaaagtcagaaacccgaaggcgagctgtgatatattttcatggtggtggtttttgttttggaagttccaaacagagggcttttgacttcctgaatagatggacggcaaacacgcttgatgctgttgttgtaggcgtggactataggctggctcctcaacaccactttcctgctcagtttgaagatggccttgctgcagtcaaattttttcttttggaaaaaattcttacaaaatatggagtggatcccacccgaatctgcattgcgggagacagttctgggggcaatttagcaacagcggtcactcaacagaagggaaacatcatgggaagaaagactattttgtttctgattgcaggggtccttggggcatattatgtttatactcctctctcagataatattgaggaactctggtgactggtgtggatagctacacctgtgaaaatggtaacaaatttgctttgtttaattatgactttctgtcaagatgaacagctgatagacttaatgctgttgttgtatcaaccaactcatagaagacccagatgtcaagatcaaactcaagcttcagtctttaatatatcctgcccttcagacgcttgacatggatttactatcacatcagaaaaaactagactctctagttctgtccaaaccattcatggtcaggttctgtagggaatactttaccacagacagatcacttgaaaaagtcatgttcttcaacatgtaccaatggaatcaaaccatctgttcagatttgttaattggagttccttgctcactgagaagtttaagaaaggccacttttgttatattccaactcgtggtagttctgagctagctaaaaaatatccagggttcctagatgtgagggcagcccctttgttggccaatgacaagttacatggtttacccctgtcctatatcatcacctgtcaatatgacatcttaagagatgatggactcatgtacatcacgcgactttagaactctggagttcaagtgacacataaccacagtgaagatggattccatggagcactttcctataatgggcttaaaattgagtatggaatagaaaatcagtatatgagttggctaagtgaaaatctatagtaaaaatgtaagcaatggtttatttaaaatgtataaggctcagaacaggaaacaaattagtgaaaatcaaagggttgatgtttgaattggtctttatcatctgtgacctttctaaggtcctcatagccatagtgggttttggttttgtttttatttattggccgctagcaaattcttctccattttatttattatcctgttattcactcacttctgtgaagatactttagtattttcttctgctaccattactcacttgttaaatctctagtttacagctatagttttttgattgccgaatagtattacagatgagaagaaagttttaaacaaacacgtctgatttgtaaaatgccagttttagtcaacatgaatttagagacttaaaatgtttccctgtgagaactgatatgaaatatgtgccatctcttttaaaaagcatttgcctcaatataatgctgtttgcctgtcactgtaaaatttgcttcttaatacagatctcttccagtactaggataccaacattaatgcaaatgatctttcagttactttagggaaaggcagctctaattgtgtgagaaattagggaggttgaggtaggcacgaagccagcataaggcagtagctccacatgtggcagtggcttatagtcgtgagcgaagcttaagacacggaagaaattatacaaccaaattgaaacacttaaatctctgaaacttcttatgtccatataggcaccgtatgggggaaagaccacaaagaataagccatagtgatcatatggtatgtaaggtttgatc

SEQ ID NO: 463880 - DNA, 862 bp, Homo sapiens
gttctgagggctggaaggacaagatgagggttccagaatggtcatttctggtgaggctcctctccttttccacagatggcccactttgtgctgtgtcctcacatggcctttgctctgtgagtgcccatccctggtacctctcttcttatagagcagtgctcctaaagctggcaaatttgtgtgctcctttccctgaggatcttcctggaagcctgggcaagcctaaacgtgattccatttcccacaatgccacagggtggttcacacagaacaaagctccgcttctttacctaagagtgccaggagtaaaagattattcggctgcttcaactgccggagagcgaggtgacctttgcccccaagtaacagccactcagcaaatagcaccaaatgaagacggagaataacatatagatttgccgtaagaaaaaattgatctaaatccatatatcaaatctgctgatcagagctctagagaaatgcttcacaatccttagcaagcacttgcaggaagtttgggcagaaagaagaccttcctgaagcttatattaataaatcatcttgtcaactgtttctcaatgtggaatgtgttcctcaaaaatctgctgagaaatcagatccccagggatttacgtgcaccttgcgctgtgatgatcagcaagagccccgcctgagtaggtcctgaagggagtctcttcaattaagagtcttcctttttcttttcatataagttgaatagatctacatgtgagcaatattgactgaggttctgcactgtatttgcaaaactagctttgcggggaataaacttgactaactggaaatgatcccatggtaattaattagcatttcaaaaccacag

SEQ ID NO: 463881 - DNA, 1894 bp, Homo sapiens
gtgccatttgatttcctcgtggctgcagtagctttatttcaggaagctgtggtcacagaagagaaccgtgaacccagcgactagtgttcagctcgattaggatgaacccgggcacttagctgcacagctcatcaggcagcatcttgcataattgagaagcttttgctgatggtttcataaaacagaaaaggattattttcttttgtaatggggcttggtcgccgacagctatggcacagtgaacagggccatcaaaagcctctccattcttctggaagctgcagagaaaggggacccagaaacctggtataccagcaaaaaggaaaacataagataattactaacagcctgggctgcctggggaaaaacaggaggtaccatggaccccattctgggaaaaacttctgttttcccatggaaccccaggaattgaaagaaaataaatccctctcaaaatctaaggctcttagtgcgttcaaaggggccttaggtggaggctcctttatcacacccacaggattctgttacatcttctcccgggacaatggcttctctcttcccactgctctcatgtcaaactcagagtctccaaaagagcccgaacagctgcagaagctctttattggagagctgagctttgaaacaactgatgagagcctgaggagccattctgagcaatggggaatgctcatggactgtgtggtcatgagagatccgaacaccaagtgctccaggggctttgggtttgtcacatatgccactgtggaggaggtggatgcagccatgaatgcaaggccacacaaggtggatggaagagttgtggaaccaaagagctactggactccacaaggagtccaaggacccaaaatggacctgttgaaagttgctcagagagctcgctatgaaattggggatcggttgactgcccagtactatcctcgttctggaccattgagcaaagtcagttatctagggcgccgatccaatggcaacgttctgtggatgttcccaatcccacacagcgggaaagtgaccgggcagggggccccgtgcgagaaaggtgcaggttattagctaaagcatttcaagttaattataatctatgttatatcaaatttcaattatggcctggaataatttgactgatgatgatctatcatggagaagtgtggcaagaaacatgatcacctctatgtgtattgcctctggtactatttgtttcactttcctgcaaatattttggtgtttcttcaaattcttaaaagccccatggggatgtgtccatctgtcataggagacacttggacaagaactgtagggtccctgcctttaccagactagaaggtgtagcaaaattgacagagctttggtactggacacaactcaatgtgatggtagtgctgccattttctaactctgtctcctctggcaggtcacttaaccttcctaggcatcagtttcctcagctgtgaaaagggaatattaacttcattacaaggttatcaggaggatgggtaaccaaccatcttcagtctgtatgtctctccaatgcatcctgaatcactgggattcctttgaaaagagaaaatcaaccttcttcttcctgtttcctcctctgtcctctcttcatggatgaataatcatgtctccataccacaggacatttccctctgtgaaaagtttaatttctgcattaaaccacttggcttaaaaaaaaatgaactgggaagacattataactcacattcccctctgtgaaaagtttaatttccataaaccttaaatcacttgacttaaaaaaaaaatgaactgggaaaactctaactgagcaatctcttgaggaaggacaatgtttacagtatgcaaataacctatttgtctgctccccctttac

SEQ ID NO: 463882 - DNA, 890 bp, Homo sapiens
  misc_feature (808)..(808): n is a, c, g, or t
  misc_feature (814)..(814): n is a, c, g, or t
  misc_feature (818)..(818): n is a, c, g, or t
ttcctttcaccctgggctgcggctctgaggctgccgtggccatggagctctggaagctgggctgggggaggaagcctggtggctctgacctcccctggaggcgaaggaggcccagccatgacactcttaacggatgccacgccgctggtgaaggagccccatcccctgcctctggtcccacgtccctggttcctccctagcctctttgctgccttcaatgtggtgctgctggtctttttcagtggcctcttcttcgcattcccttgcaggtggctggctcagaacggggagtgggcctttcctgttatcacaggctccctctttgtccttaccttcttcagtcttgtttcactcaacttctcagaccctggcatcttacatcaaggctccgctgagcagggccccttgacggtgcacgtggtgtgggtgaaccacggggccttccgcctgcaatggtgtccaaagtgctgcttccaccgcccgccccggacttaccactgcccctggtgcaacatctgtgtggaggactttgaccaccactgcaagtgggtcaataactgcatcggtcaccgcaacttccgcttcttcatgctgcttgtcctgtccctgtgcctctactcgggcgccatgctggtcacctgtctcatcttcctggtgcgcacaacccacctgcccttctccaccgacaaggccatcgccatcgtggtggccgtgtccgccgcggtcctcctggtgccgctgtccctcctgctgctgatccaggcactgtccgtgagctcggccgaccgcacctacaagggcaagtgcngacccnttcngggatacaaccccttcgaccaggggctgtgccaagcaactggtatttaaccaatttgtgcaccactgggacc

SEQ ID NO: 463883 - DNA, 790 bp, Homo sapiens
ttcctttcaccctgggctgcggctctgaggctgccgtggccatggagctctggaagctgggctgggggaggaagcctggtggctctgacctcccctggaggcgaaggaggcccagccatgacactcttaacggatgccacgccgctggtgaaggagccccatcccctgcctctggtcccacgtccctggttcctccctagcctctttgctgccttcaatgtggtgctgctggtctttttcagtggcctcttcttcgcattccctcttgtttcactcaacttctcagaccctggcatcttacatcaaggctccgctgagcagggccccttgacggtgcacgtggtgtgggtgaaccacggggccttccgcctgcaatggtgtccaaagtgctgcttccaccgcccgccccggacttaccactgcccctggtgcaacatctgtgtggaggtgagtgcccctctacctgtccaccagccatcgccccacatctggctgggaccaggagcctccctcatacaggggccagggctgggtgtgaagctgttttcaggactgctaaaggccaagggtggcagtaactcccagccacccttggtcactcatgtgttctccacctgcacctgtcctgggaggctggccgttgcctgcagaggtgctgacatgcacagggcatccgcatctgtcctgggctgggtcaggccaggggaggagaggcagccctctgtcccacccctgggctcgctaacacgagatacccaagcccctcaggctggctgcccgcctggtctgg

SEQ ID NO: 463884 - DNA, 1523 bp, Homo sapiens
ttcctttcaccctgggctgcggctctgaggctgccgtggccatggagctctggaagctgggctgggggaggaagcctggtggctctgacctcccctggaggcgaaggaggcccagccatgacactcttaacggatgccacgccgctggtgaaggagccccatcccctgcctctggtcccacgtccctggttcctccctagcctctttgctgccttcaatgtggtgctgctggtctttttcagtggcctcttcttcgcattcccttgcaggtggctggctcagaacggggagtgggcctttcctgttatcacaggctccctctttgtccttaccttcttcagtcttgtttcactcaacttctcagaccctggcatcttacatcaaggctccgctgagcagggccccttgacggtgcacgtggtgtgggtgaaccacggggccttccgcctgcaatggtgtccaaagtgctgcttccaccgcccgccccggacttaccactgcccctggtgcaacatctgtgtggagagttacagtaggatgtgtctcacagaaggccaggccagtcttctctctaaaggtcttctgacaggactttgaccaccactgcaagtgggtcaataactgcatcggtcaccgcaacttccgcttcttcatgctgcttgtcctgtccctgtgcctctactcgggcgccatgctggtcacctgtctcatcttcctggtgcgcacaacccacctgcccttctccaccgacaaggccatcgccatcgtggtggccgtgtccgccgcggtcctcctggtgccgctgtccctcctgctgctgatccaggcactgtccgtgagctcggccgaccgcacctacaagggcaaggcggtttggattctttgagcgatgggaatagagaataactgaaattgttggcttgtgagtctggcttctttcacttagcacaatacattcgagattcattcatgttgttgctcatagcagtcgtttattccttttgattgcccatatagattttgtatccattttgttagatttatatgtatttctttttttgtgctattgtaagcatgttttttaaaatttcaatttccatttgttcattattataaggaaatacaatggatttttttgaattggtgttgaatcctgccattttgctagacccatttattagttccaatagcttttttgttgattctacataggaaatcctgttgtctgtgaaaaaggacagtttcacttcttcttttccaatctgtatggctttatttttttctcttcttattgcactgtcttggacctctagcacaatgtggagcaggagtggcgatcctccttcgtgtctgcaaagtagaaaatgagcaaaaagacaggcaatagcaaacagtcttggtaaggatgtgaagaagttagaaccatcatacattgctactgtgaatataaaataatgtgcagctttggaaaacagttcttcaaaatgttaaacatagaattaccatatgacccagaaattata

SEQ ID NO: 463885 - DNA, 703 bp, Homo sapiens
cggagaaagaagggagtaaaaatgatgcgcgcacaaagaaatttttcccattgcttgccagattcattctttttaggctacccttactccagtccttacctacaccctaaagaactgtatttagctagcaagagaggcattctcaggatacaaccgcatggagggtggaggttagttcccacaggaagggatgatgggcagacaaaaacaacagctgtccacttcatccaacccattggctgtctggtccacaggcattccactataatccacactcctgaagagtgtgtggacaaagatcatgggagactggcgattcacgttcccatacttcccttcatctgctctgtattggagctgattctcagctctcttgccctctggctttttgttaggttctgccaaggggacaaatcacggaagattggattggaacaaaaagcagcagaaggcagtctcctctgctgactttcatgcctgacatcaattttctcaaagagtgaagatagagcatctataccggtatagctgaaggactttggtcagtggcttcctggttctgccactttctgtcagctttcctgctcaatttagagacattctaattcttgttcagaaaaccttgagtccactcctgtaattcttctagtgagtttgtaagccaaccaatgcctactaataaatcccctttagcaccaactag

SEQ ID NO: 463886 - DNA, 734 bp, Homo sapiens
atttaggttgtaatgactgaagcatttggtaggccaatagcaaatattaaaaatgaagagaggcaaagtaaagaaattgagaactacaaatcactgctcaaggaaagagaagacacaaacaaatggaaaaacattccatgctcatggataggaagaatcaatattgtgaaaatggccatattgcccaaagtaatttatagattcaatgctatttccattaaaataccattgatattcttcacagaattagaaaaaaactattttaaaattcacatgaagccaaaaaagagcctgtatagccatgacgatcctaagcaaaaagaacaaagctggaggcatcacattacccaacttcaaactgtactacaaggctacaccttcacagtgcacatatatggaaacaaggaaatgtatacaaggatacaaattctactgagctatacaaatagggatgattggctagtatagctgtattcttagttgctgcctctttgggatttaaggatcctgaagtgttgggaaaaggaagatgacccagtgaagaagatgaaagggacctcaaagaagtcagaagaaaatcagcatagagtcatgttaacgaagctgagtacagaataagattccaaaagagctaaaaatccatctcaattcattcacctcttctttactgaggaataattggttattccttcaatacaatcacaagactctgtttttacaattcacatcaataa

SEQ ID NO: 463887 - DNA, 824 bp, Homo sapiens
tggcttcagagaagagcgaggatcttgccatctcttttacagatccgtggaaggcagagagaatttgggaacctctgtgctataagcatggaaaattgggactcaggtaaaaaggctggttcctggtcgcacagctggtcatgggtgagtgtggtttttgaactctgatatttggattctgagtacagaacatgttatattgtggcccatgccctcctcctgagttcttcagttttaatcatttcattttctactctttttaggcactttggcaaaggagtgtgagttttggggaagctcaaggaagaggtaccaggtagagagagggccagggctgagttcacgggctctttctaaatggaaatgtctcacattcagctgttgtctgcctttgagtcacacagaaccacttgcaggaagaactctagagaatttgggaagaaagggggagaggacagacaaaagatgcatttttctttcaagaagcaggaaaatgtaaggaaaattgaaggtgttctcaagtgtgtctgctgctgcctgacacagggattctggggccctttgtcggacggcctcgctgctcctttgcgcccatgccttcccgggagctggtacagtggctcagagctccagccacatcagcctctcctgaatgacagcatcacaccttcctccatcccatttacatttcaaactgccacccacctgctcttgattaattatttagtaaccctggccacttgtgagcctttcggagctcatatttcacatggattcatgaaggagtagcaagaacaatacacactgagttctgaccgtgagga

SEQ ID NO: 463888 - DNA, 3934 bp, Homo sapiens
gagaggcgggcagcgggtgcgcccgggccgcggcggccgcagagggcgggcggcggccagcatggagcgcgagctggaggcgctggcggcccggcttgcgcgccctgccgagccgcccttccaggcgttggtggaagcggcggggggccgcgggcaggtgctgctggtgggcgagctgtgggagcgcgaacagagccgcgcgctgctgcgggacttcgcacgggcgggcggcgagggcggctggggcggcgggggcggcggcggcggcggcgcgcgccatccgctcgccgctggtcttcgtgctgtgccgcgcgtcgtcgctggccgcccgggagccgcggcgccgcctgcgggagatgctgcgggacgtgcgcggccggcggcgggccggggcggcgctggtcggggtgctggtggccgaggccgggccagaggacgcggtggcgccggggctgcggctgctggaggcgcttaaattggtcctgaataaagattatgaacaaggattttccttgttttggttgcctgaagtcttttaaaaataaataaataaataaaataaacaacctagttcctgttgactttatagattactaaaaaatgtatctattcctgccaagaaatagtttgaactaaaatcagagggaacgtgcagctctttgagtattttgtttggtgctatgtaattgtaattaatttcatgtcattttcattgctttatttcctcaacatggtacctacatcacagggcttttgtaagaattaaatgagataacatagataaaagtaaagcaatcatttttaaagttcggttttaaaaacccacccacttttgcaaatcagactctgtgtttttaatcagacagttgaaactagggcagttgaccgttggggcacttgatttgctaaacgaaatctctcagtcttgtgaagtgggaaccatgtgaccctctgactcaggttttgtgttcttcctagtggaaggagcctgggagaggccaggcctccccggactgctagcctgcttttcctggggtccctggagccggaggaagaaccaggatgttgctgcctgcagaagctcagctcaggaagacttccaggaacctgaggaggagctgccactaacagccatatttcccaatggagactgtgatgaccttggaagggggtcaaaagcctgtgatggagtcgtacacactcctgctgagcccaccggagactcaagatgaaggctggacccttgcgctgtccctggctctaacctacagactggggcctggctccgtcttactggcccccaggtctccatggagactgcagaaacccccgcctgctggaggcctgccacactcacagttaccagctagacagtggggcttactaagacaagcaggacctaaaacagtgtctcccctgggaacctactccccacccagcatttgctaagtctgatcacagggaggttattttgtctctctgtctcggtttctctgagccactgagacagatggctgtccgctttgaggctctgcagagctgtggcaccccatggtgtgtctgcagtgttctgggcacatgcatgggcacccatcgttgagagtgcagctgggaagaactctgaaccagaagtcatcagagctgaggcatggccttgaacatgtcactcagtctctggggcttctgtttcacaaatgcatgagggggccaccagcccagtggctttaaaccaggggcaggttgtccctccaggcagcattggaaatgtgtgtgtgttgagggggtcacagtgactgtgggggcacccctggcatctagtgggcatcccacaatgtgcagaacagtctctgacagcaaagaattggtccattcaatgccaattgtagtacctttgagacattctggctgagccaatgccttctccctgtcagagtcccccagagcagagagggtcaggcttccctggaccttggctcccagagcaagccaaaataaagactacactgttgccttgggggcttgtcgggccagggccaagacggtctgcgtgctgcagggccaggacagaaatagccacacatgccggtgagaacaaagagcctctttctttctcatgttgacatcgactttctgtgccaagtcctttgggtataaggatgctagggaattcctataggcaccaaacagaaggaaagctaggggcttggactactgggtataggacttgctctagctctcaggtcctagcccaagctcaatgcaaacacagcccctccgggctctctgtttctgtgaggttctggaatcccttcctctgtgtccgtgagtctgacagaatcgatgatgttcccttagagctgggaaatccatgtgtttattcacggagggaactcaccattacctcccttgtcttctttgcctgccttggagaaatccagagtcttcggaatggcaaaggcagctcctggatttccctggaggggaggcactagctgagggaagtagctcccttcattcatgatgcacagtttacgcagcagacacacaactgcgcctactatttgctcggtgccctgcaaggtgctgcctaactttgatttgttatttcagctctctccaggatagtgccaaatggtgcaatgggaaacctgttttgctggggggctctagatcactggctccagaactcccggctgccagggtagcccctacccccagccccttgctcctggacagcagtgggtctcacctttagcctctgcccccagttctggtctgacccaacagaggggctctatgatattaagaaggggcccttcctgctctgtgcctcaacctattctccataatagggagtctaatcctattccttccctgcctgatgaggatggtgtgaggatgaggaggacggcatctcatttggggctttttggcagtgggcctcattttaatcctgcagggctgcctgccagtggatctatccagctgcttccttgtagccaagaatgagttcaatgaattgtgattcactgattttattgattttgttttaaaacagggagactggtatttttgaagctgctatcattttctatttctttattaatttctttgtaatcatcttattaaagttttcttatttagtgggagagggagctttgtttaagtttggaatttgcctaaggcagaagttataaggcttcataaccttttgtatgtattgccaatatttgaaacttgggagattacgtataaaaaatacctagttttctgggtggaggatggggcatgctgtcatctcaagtctgctgcggctcacccccaccacctttaccccctcccccgcccttcccatcccccactgcacttcactcatgtaagacgtctgcccggtgctggtccaggcgggcatgtgagtttgtagcctctgctccaaaggatggtttacacattattttttcattaccttcagtattcctgtgaatggttcaagagagaaagtcttcatttactaagatttgggttctgcctcccaagtgacaatacggggctgagatccctctcagcttctttgagatgtggccaccataagcatcatcgttgtagggacagtctcattgctgtcttctagcagacagaagagttaggtgccagaaaggacaatcttgatggtgggtcccctccctgaaggactttaagaaggcataaaggggttggggtggagggtggcgtgtgaaggaggaggcccttgattaggtcagtggtccctgggagccatcggcgagaggcctccagccgggtgacagtctgggctctcgggtactaatctttctaatatggcagtggttgtggcacttctgacttgaattgataattctcatatctaataaaaccaagaagtacctcgttgatatcttatagaaaacaaaatgga

SEQ ID NO: 463889 - DNA, 1091 bp, Homo sapiens
aggcctcccagaggagcaaatcatgactgctggggagaagaaggcaacacagcttcaaagacctgccccaaatccatcaaaaacagtaagtttgctgggagatttgaatgtttctgttaaaggaataatttgcaattccatcctgagtgggaattctcaagactggatgaaagaagatagagttagaggattcatcccaaaccatgggcatgttggagacaaagatgagcaggttgtacttggcgatgggtttgagaaaggatgtgatttgggagattcttggtggacagtcgcatcactaccactaagcaatttgcattctgtggaccagcccctgaattcctattgccctttgggcattgcatttctggacgcttctagacagtgttcatacttggctgtctggtttcaccaggaactctacccaaaagaggaaacagcaaggagaacatttgctttgtttgtaggagggaagtggtcgagctacaaacaaatctttaggcatctgaggaattgctaagtttctaatttcatatggttgctgacaaggaggtgcagacaaggaccctcttgctttcctcactatggatagtctgttgcctccatctagattctcttatttcaaaaaatatcctctccatgcaattaggagatatttatcgacgctgagaaaccaaagagccgaagaacagattctcttgcagcaagtgtttcacaaagccaaatccccacatatgtagaagattaacagcattaatgagatgaagatgctgaaggaggaaagccgagaaggagtcagaaaacacaggccagctaatttaatctacaagaatttgggatgacctgtaccaatgtctcgctctcttgaacagagattttttttttcctgattgagaaataccattcaagggctgatctgacaagtcttgcctgtttaacagtgaatctgcttaaaatgaggagagtggtctttgggcccagggggcatgtactgtagctacattttaattacagagtagaatcaaattttgttttggaagctgttctaaagtttcctttcaatggcttaagaaaatgtttctagttggaac

SEQ ID NO: 463890 - DNA, 714 bp, Homo sapiens
aggcctcccagaggagcaaatcatgactgctggggagaagaaggcaacacagcttcaaagacctgccccaaatccatcaaaaacagtaagtttgctgggagatttgaatgtttctgttaaaggaataatttgcaattccatcctgagtgggaattctcaagactggatgaaagaagatagagttagaggattcatcccaaaccatgggcatgttggagacaaagatgagcaggttgtacttggcgatgggtttgagaaaggatgtgatttgggagattcttggtggacagtcgcatcactaccactaagcaatttgcattctgtggaccagcccctgaattcctattgccctttgggcattgcatttctggacgcttctagacagtgttcatacttggctgtctggtttcaccaggaactctacccaaaagaggaaacagcaaggagaacatttgctttgtttgtaggagggaagtggtcgagctacaaacaaatctttaggcatctgaggaattgctaagtttctaatttcatatggttgctgacaaggaggtgcagacaaggaccctcttgctttcctcactatggatagtctgttgcctccatctagattctcttatttcaaaaaatatcctctccatgcaattaggagatatttatcgacgctgagaaaccaaagagccgaagaacaggtatcattttgtttatattatc

SEQ ID NO: 463891 - DNA, 1129 bp, Homo sapiens
aggcctcccagaggagcaaatcatgactgctggggagaagaaggcaacacagcttcaaagacctgccccaaatccatcaaaaacagtaagtttgctgggagatttgaatgtttctgttaaaggaataatttgcaattccatcctgagtgggaattctcaagactggatgaaagaagatagagttagaggattcatcccaaaccatgggcatgttggagacaaagatgagcaggttgtacttggcgatgggtttgagaaaggatgtgatttgggagattcttggtggacagtcgcatcactaccactaagcaatttgcattctgtggaccagcccctgaattcctattgccctttgggcattgcatttctggacgcttctagacagtgttcatacttggctgtctggtttcaccaggaactctacccaaaagaggaaacagcaaggagaacatttgctttgtttgtaggagggaagtggtcgagctacaaacaaatctttaggcatctgaggaattgctaagtttctaatttcatatggttgctgacaaggaggtgcagacaaggaccctcttgctttcctcactatggatagtctgttgcctccatctagattctcttatttcaaaaaatatcctctccatgcaattaggagatatttatcgacgctgagaaaccaaagagccgaagaacagattctcttgcagcaagtgtttcacaaagccaaatccccacatatgtagaagattaacagcattaatgagatgaagatgctgaaggaggaaagccgagaaggagtcagaaaacacaggccagctaatttaatctacaagaatttgggatgacctgtaccaatgtctcgctctcttgaacagagattttttttttcctgattgagaaataccattcaagggctgatctgacaagtcttgcctgtttaacagtgaatctgcttaaaatgaggagagtggtctttgggcccagggggcatgtactgtagctacattaatacgagtagatcatttgtttgagctgtctagtcttcatgctagaatgtctagtgacgatcactgattctgctgctctgtctatgatgctactcagttgcactgttaaataaatatttgaatcc

SEQ ID NO: 463892 - DNA, 757 bp, Homo sapiens
tgagttcatgtcctttgcagggacatggatgaagctggaatccattctcagcaaactaacacaggaacagaaaaccaaacactgcatgtccccactcataagtgggagctgagcaatgagaacacatggacacagggaggggaacatcacacactgggacctgtcaggggatggggtgctaggggaggggtagcattaggagaagtgcctaatgtagatgatgggttgatgggtgcagcaaacccccatggcacatgtatacctagagttgcatttgggaactgcaatgggttggctgtggtggattttatacagaagacagtactgttaagcatggggaccattgacctatatagatcaagtgacttataccagcgacaaccacggtctcctcgaaaaaacaaacagttcattgcaggaaaatctgtgaagttataaactcagtttgtgtttagtgtacaagatgacacagtgagaactcactttatattataacaatgaagtattaaagactgaaatctttagctttctttttaattgctgaaggattaaagacaatcattttttattaatgaaataatttatacatattagttacaagccaaagaagtgtattttgtaaaaacatataaggaaaatgtgccatctacttttataagacatttaaataagataaaaataaatatttataaatatttttatattaaatatttaaataaatgttaaaattactaccgcattctcatcattcatctat

SEQ ID NO: 463893 - DNA, 1899 bp, Homo sapiens
ctgtgatgagaaaccactcagatgggggagctatgaacattccattacgaagagcagaggagcttcaccccacggccatcaccaccacaggcccacgagagtactaccaggctactgcagatggtccttttaggcccaagggctcttcagtcaatttatgttgaatgctgcctgggactcacccttcagggcaatgggctcccctctgtaccacacacagcagatacagaaatgctgtccaagagcccaaggcctggaactggggacccccaaggagctgtttggtgctctgtcccactgtggctgacctggtacctgatttttggttcttacgaagacatggctgaatgctggaagaaagtaaagaaagttcctggagtcaaagatgaagtgagaaggaaaaatcagagcagtgaaggcagtaatgctcattctcaccagccgctcacctactgctgtacaatcccattcctaacaggccacagactggtacaggtccgcaaccatggggacccctgcaaactggagatcttctctaccaccaccctcacacacccaaccaccctttcctcctaagccatactgggctgccactgttcttcatatatcaggttcaagctgatggatccaagccaaaggactccatattctccaaagcctataagcagaatgctggtgtggtgtggggggggaagaagttccattgtgtccctactgaagggacacagaagtaccaaaagggtcactgaactgccaggagaaaggaaagggaatacaatgtaaaaggactgtttgaatcagaagagattgacatattgatatttgtccagttccatggtttctaccccacacccaataagaaagaggcttaagaggaacattagttcatgagactaactggctgttcattaaacccacagctggactacattttcagccttccttgcagttaggtgtaaccatgtgaatggatctggccaataaaattgatcttggaaaccaggtattgaagatggtgaggccacagatggaaggcacctggatccagatttaaaagagttgcctgccaatcaggaacaccctttttgagctttggggatgtgttttagttctcatattcctgcataacaaactactccaaatttagtggattaaaacaacaatttattataatccctataaattctgtagttcctgtcacttttccattgaattctagtgttctctcttggatgatctattccaagtgtaataatctcacaattttggttcttcttagtagaagaggctacaagcacaaattttcctccatcaatcattatatgtgatttccaatatgttcagtattgaaagtgggtattattattcctttaaaaaggcataattctttgagatctctgcatttgggatgagtttatagtgttgctgcaaatttgaaggctgaaaacagtgataggaaaaacatgtttgttttttaaagttggctatttttagctatgtaggctaaatgaaaaggcaatcatatttaaaattatgctaccatgtttttctttgatgtatgaaagaaagctgttcactaaatgaaattcacaactagtcagtgcaggtggggggcagggaactttttagtctaagaaaatgtttcaaatcttcaggccaagatgctcatgaggaggacaatctcccagtgtttacagactgtgatcacaaccgccaataatcatttggaaccttctaggaaactactctggtttatgtccctgaagactaatttctagcttctagaaaacggtgtgaaatgtacactagaatattcagaccacttactagtttctgttgatctttttaatataactattttcataattacatttatatcgctttaaggctctcctttca

SEQ ID NO: 463894 - DNA, 992 bp, Homo sapiens
ttttatgacgtgcttgttagagctgtgtgaggaagaaagcatttctatacactgaggatgagagtgtatattaaagtcactgctgtgaggcaatttggcattatcaatcaaaatcacaaatgcacaaaccctttgactcaggaatacagatatattctgatgcatgccaaaaacccagaaagcccggagtcgcccaggaagtttggctcggactgagagcatttccttctgggccggccgggcgcgatccgggaagggcggctgcggtcgcaagccgcgctgctttcagccaggctggcaccatgcggcccctgctttgcgcgctggccgggctggccctgctctgtgccgtgggcgctttggccgatggtagagaagaccgtggatcacctggggacacaggtgaaaggcctgctgggcctgctagaggacctggcctggaacctgcccgggggacccttcagccccgtccccgacctcctcggaaaagatggcttctgagccccggagctggagcccagcagctggaggtggtgcacctgccaggcagcaccctctgatagccagcgctgtcctctcgccttccttcctcagcttcgtgtgaaataaaagctactgtttttggtctcctctgtgtctgctgacagagtaacccgtttacagccccctctccctccacttccatgcctgggggaggccggccaccccctccaggctcagacctggggacacgcccactcccgccatctgtgctttagcattcccttatttataggggcagatggagcaggggttgattcacagaggtgggggcccttcgagtggccttgcgtctcaaaatgtggccataggtatttcttttatgattatcatgaggcttgtataaaacatagttataacagtctattttaagctgataacaactcaattttgcttgcattaaaaaccctgtatgtttacttctccccaccccatactttgtttttgatgtc

SEQ ID NO: 463895 - DNA, 975 bp, Homo sapiens
accacattctcatctgtatgttttacaaaggcatgagtgatggctttgctgtgattcacgcaatttgcacttttagtataaaaatggaaaatggctattgtctcttcacctccctgtcactgagtagcctcacctggcaattcttcctgcctccctggaagcctgagctttctcaaaagcatctcactgtgaacaccctctgcgaccctttcattcaagtagctttcacctacctgccttttcgcctcctccttacatctttgtcctccattttatcctcaacagaactaaaatccccccctctgtcttttggtgtgtgtttagaagtggaacactcttctcctcctgcccttggacatcagaacaccaggttctttggcctttggaccctgggactggcaccagtggccttctgggggctcttgggcctttggcctcagagttaaccctttctgtaaatgcataatgtctccagaagctttcagctaaaataccaatgtgttattttggagagagaacacatgaactctgagcattcacaaattgcctaagcatgaaccagtttatcaagtcatttaagttgagagaaaggtcctcaaggaaggaattacaaaattgtgctttttatgggacgtcgtgagaaggctcagggaagttatgagggtaagattagtggaaggaagaaaaatctgaagacacttgggaaggcgtgcccaggagcaaggcaagggtcacagtcacattcacagaacctcattagggtggatccacaggacatacttcccactgctcgcagaagtattaccaccctttggaataatcaatcaatcaaaccaactcaacaatctttcttttaatgctagtggcacatattgacataaaaataaaattttgcttcctggtggaacatgaataataaaagtatttttaaagttgttttaatcaaggcttcactatttagaaagtattaataaa

SEQ ID NO: 463896 - DNA, 1475 bp, Homo sapiens
ggggaggggctgagcagggagggggcctcagggcccccccccagctatggactaacggctactggggccgcctcctccaggcggggcccggggggggcctgggattggtgagtggggagcctgggggccctggcgagcctcctggtggcggagaccccggtgggggtagcggggggttcccgggaggccgagggaagcaagacatcggggacattctgcagcagataatgaccatcaccgaccagagcctggacgaggcccaggccaagaaacacgccctaaactgccaccgaatgaagcctgctctctttagcgtcctgtgtgaaatcaaggagaaaaccggcctcagcattcggagctcccaggaggaggagccggtggacccacagctgatgcgcttggacaacatgcttctggcagagggtgtggctgggcccgagaaagggggcggctcagcagcagcagctgcagccgctgcagcctctggtggtggcgtgtcccctgacaactccatcgaacactcggactatcgcagcaaacttgcccagatccgtcacatataccactcggaactggagaagtatgagcaggcatgtaatgagttcacgacccatgtcatgaacctgctgagggagcagagccgcaccaggcccgtggcccccaaagagatggaacgcatggtgagcatcatccatcgaaagttcagcgccatccagatgcagctgaagcagagcacctgcgaggctatgatgatgctgcgctcccgtttcctggatgccagacgaaagcgccgtaacttcagcagacaggccactgaggtcctaaatgagtatttctactcccacctgagtaacccatatcctagtgaggaggccaaggaggagcttgccaagaagtgtggcatcaccgtgtctcaggtctccaaccggtttggcaacaagaagattcgctataagaaaaacatcggaaagttccaagaggaggcaaacatctatgctgtcaagacagccgtgtcagtcacccaggggggccacagcagcaccagctccccgacacccccttcctctgcaggctctggcggctctttcaatatctcaggatctggagacatgtttctggggatgcctgggctcaacggagattcctattctgcttcccaggtggcatcactccgacgctcgatggggccagggggctatggggataacctcgggggaggccagatgtacagcccacgggaaatgagggcaaatggcagaagacaagaggctgtgaccccctcttcagtgacatccccaacggagggaccagggagtgttcactctgatacctccaactgatcttgcccctcagggtcacaggggtgggggctctcacaaggcgactcttgaagaggacgcaggcttccagaggacaaaccccaatacaggagaagcacaagacagagaagggccaatggggtcaaccgctgccgc

SEQ ID NO: 463897 - DNA, 1856 bp, Homo sapiens
ctgaactcagggaatggggcccccagctcccattggggtcggcgaacctggtgccaccccttagacaaagtcccagtctcccagaggcttttaccagctggccccattccttctgctgctgggtataataaggtcctctcaacgctgaagtgcctgtgaaacacagcccagaggagttctcattggtcctatgggctttgtcttcctctctgccccacccagataatcgctgctgcccctccactcccaagatgcagctgtgattctccatccccacacatccctcatcaatggttgactgcaaagaagtgagaagccaagcttagattcatgctcatgcctgaacaccctgagagcctggtgctggagggctgggtatccccttggcctgccaccagcacctgcacccacaccaggctggagccacgctctgcgcacagaaggtggccttgatttctcaggcacagctgacctcagagatactggtcctgactctgccaggtctcttatccctagtcttgttgccccagttccttctggattcaaggcgatgttgcctcaaaacaaggaccaggtgctgccacagacctcagtgctccctgggcgccccacttggggcttctcacaacttgtggactcctctcctcacaacctacagcctctctctccccatcagggcctccctccctctcaaccaccgttctcttccactcagtcccgtcgtccctcctcccctccaccagcatccccctctcctggcttccaattcggctcttgtgactcaaattctgactttgctccacatccctattctccctctctcccaagttcccctactttctttcaccagaactacctctctctcccccgctccactctaacaggcagacatggcgctggcatcagtacagggacactgggtccgggtcccctggagtggtggagagatgcgtgccaagcgagaaggatcctgcacagttcagggacccaggggccctggcccaggccctggtggtccagctggggcaccgccgcatcgcacacgacctgcggctactgcttttgcagcacctgtggctaggcagaaccggccaggccccagtcgtggagtatcctatatgcctggtgtgcctccggccccgcagcccctcctgccccctccccaggtacaggactggaccccggctgcttgctttccctcaactactgccctgtgtgcagggccaggaatctgggccactccggataggcatcggcttcggcctccgcctgcctcagggccaggccagggccttgcatctgctgcccgagaaaaggccgaaggaagcagggcctcagggcaaggctactcaggcctgtgggcatcaattgccagcatctcagcctccagcagctcaggcccgggccgacccagtcccaggcacaccctcccagaccaggagcttcaggtctgcaggccttcaatcaccaaactccccacgatgtttctccgggcctccacctcgggcaccaaaacaggtcactacctccctgaagcccaggccttgccctggcccaaagaggccagtttctctggagctcattctccaaaagtcatcagtctagttccagagccacggaggccccctggaacaccccctccaaacccaaccctcccaaccaggccccagatctcggggagtccccgagacaccctgaagggctggctggccggaggtcaggtgtgttctcctgctctgaaccctgggagccccttgtggagtctgctgtctccaggctgaagaggaccaagggcaccaaggccccattcagccctccgtgtatctaataaagtctgaccctgtgaaaaaaatgtt

SEQ ID NO: 463898 - DNA, 922 bp, Homo sapiens
  misc_feature (9)..(9): n is a, c, g, or t
  misc_feature (11)..(11): n is a, c, g, or t
  misc_feature (14)..(15): n is a, c, g, or t
ctttttctntntcnnaggagtgccagcttctcccagggttctgaggccccattcatcatgaggagaaacacagccatgcaaaatcttgcccagcacagtggatacagtgttgatggggtcagcggtcacatccatggcttccatagcctttccaagcccagccagcacaatgcagaattcagaggcagcacccacagaatcccctggagcctggcctcccatggccacaccagaggcagcctcacaggctctgaggcggataatgagggtgtgtaccccttcaaggcacccagaagcaccctgttccaggagtttgggggccacctggtgaacaatagtggtgttccggccaccccactctcagtgcaccagattcctaggacagtcacgttagacaagaacctctatgccatggtggtggccactcctgggcccatagcctcccttcccctgcccaaggcaagtcaggcagaagcatgtcagtggggcagccctcagcagagacctttagtcagtgaaagtagcaggtggtctgttgctgctgccatccccaggcggaatacccttcctgcagtagacaacagccgatgtcaccaagggttgaaagtcataagtggtaaagatgagcctcaccctgaggtcctggatcctggggcaggcatccaggagggacactgtgtgggtaacactggagctggacctggaagcccaggaggagttgtggtagggagcagggatgtgttagagcttcctccggcaagtacacccagcatggtggagggaatgccagccggcctgctgagtccatgcatgagggagtctgttctttcctgagctttctatgcaccaagacctcagccagggacatgaggtccagctgccccctgtcaaccgcagcctcaagcctaaccagaagggtaag

SEQ ID NO: 463899 - DNA, 1037 bp, Homo sapiens
taagaaagcaacaatggctaggtagcaggctgggtggttgcggaggtgaagtcggtgccacttctgccctggcccccaagatcggccccctgggtctgtctccaaaaaaagttggtgatgacattgccaaggcaacgggtgactggaagggcctgaggattacagtgaaactgaccattcagaacagacaggcccagattgaggtggtgccttctgcctctgccctgatcatcaaagccctcaaggaaccaccaagagacagaaagaaacagaaaaacattaaacacagtgggaatatcacttttgatgagattgtcaacattgctcgacagatgcggcaccgatccttagccagagaactctctggaaccattaaagagatcctggggactgcccagtcagtgggctgtaatgttgatggccgccatcctcatgacatcatcgatgacatcaacagtggtgctgtggaatgcccagccagttaagcacaaaggaaaacatttcaataaaggatcatttgacaactgaaaaaaaaaaaaaaaaaaaaaaaaaaaaaaaaaaaaaaaaaaaaaaaaaaaaaaaaaaaaggggggggaaattaaggggggggggaaaaaagggggaaaaaaagagaaaaagtagtgacaaagatgagtaaaaaaaacacaatatttgtaaaaaaggggaaacaggaaggagccacaaagagaggaaaaaataatgaaacagacgtacctttatttttgttgtagtcaaccccggaaaaaaaaaagagagaaagaagaagaaaaaaaagaagaaaaagagagaaaaaagaatgagagaaaagaaaaaaacacaaaacaagaacacaaaagaaagaagaaagaaaaaaaaagaaagaaaaagaaaaaatacacgaacacaaaggaagcgaacgaccacaacgcagagacaaaaggagcgaagaggaccgagagacacacaacacagcacaagcacaaacacagaagcgaagccaggaaacgccgaaggcacgcaaaccaacaaaccagaaa

SEQ ID NO: 463900 - DNA, 6270 bp, Homo sapiens
tctgctctttctcatctaaactgttttcctccaggtttgtgcaatggcatcagctaagctaaatacccttcttcagaccaaagtgattgaaaatcaggatgaagcatgttacattttagggaagctggaacatgttctaagtcaatcaatcaaggaacagactgaaatctactcatttctgattccccttgttcgtaccctggtttccaaaatttatgagcttctcttcatgaacttgcacctaccttctttaccttttaccaatggtagctcctcattttttgaagattttcaagaatattgtaattcaaatgaatggcaagtttacattgaaaaatattatgaagctcatacattttacgatggtcatgagaacatggcactttattggaaggattgttatgaagctttaatggtaaatatgcataaacgagaccgggaaggaggggaaagcaagctcaaatttcaggagctgtttgtggagccatttaatcgaaaagcacgccaagagaacctgaggtataataatatgcttaaacaacttagcagtcaacagttagccactcttagacgctggaaagcaatacagctctatcttacatgtgaaaggggaccttgggctaaaagtgatgagaaagaagaacaggatcaaaaagaaaaattggtattgatggaagactgtgaactcattacaataattgatgtaattcctggcagattagaaatcactactcaacacatttacttctatgatggcagcattgaaaaagaagatggagtaggctttgatttcaagtggcctcattctcaaattcgagagattcatctccggcgttacaatttaagaagatcagcccttgagatttttcatgttgaccaatccaactactttctcaatttcaaaaaagagaaatgggtaaacagagagatatcaaattttgactacctcattcaaataaatacaatggcaggacgaacctataatgaccttgcacagtatcctgtgtttccctggattttacaagattatacttcggaagagttggaccttaataaccctgctgtatttcgagatctttccaaaccaattggggtagttaatgaaaaaaacgccaaagctatgagagaaaaatatgaaaattttgaggatcctatgggaactattgataagtttcactatggtactcactattcaaattctgcgggggtcatgcactatctcattcgtgtagaaccgttcaccaccctccacatccaacttcagagtggaagatctgatttagagctaaatctaaggcatcaccggagagtcaaaccaatccaatgcctatgcctatgtagtcctaaaaatatgtatcatgaggaatggaaggaggagcaataagagactcttacattattacagcagctcaaacaagtctttgataccactgtatttacactgtgggtattataacttacctatgttgtacattttcctaatcctaaggaaaccagcttttccatgaatcttctgttcctcagtaaatcctccacatagctccctatttatacatttttgtctccatgttgccttactgtttaacagccattttgccttccctacccaaaccagagctatgtaaatattgccttttctgttctctttccatgtagcttttatctctcacagttaacctgggttccttatttctgtttatgtacaataagccttggctttcaagaagagactctggccctcagatcactaaacatccccagattttacatgtcaccatcaagaaagtaaaaactggccaaacatgttggcttatgcctttaatccccaacactttgggaggccaggtcaggtggatcacttgagcccatgagtttgagatcagcctaggcaacaaggcaaaaccccatctctacaaaaaatagaaagttagtcgggtgtggtggtgtgcacctgtagtcccagctacttgggaggctgaggtgggaggatagattgaacccaggaggtcgaggctatagtgaaccatgattgcaccactgtactccagactgggtgacacagcaaagctctatctcaaaaaaaaaaaaaaaaaggaaaagaaaagaaatgaaatgaaaactatacctgataagggacttttatatatttgtacctagaatatataaaaaacccttacactcaagacagggtctcgcttttcccttaggctggaatgcagtgctgtgatcactactcactgcagccttgacctcctgggctcaagtaatcctctcagctcagcctcctgagtagctaggactacaggtctgcaccaccatgcctgcaatttttttttttgtagagatggggtctcactttgttgtccaggctggtctcgaactcctggactcaagtgatccttccaccttggcctcccaaagtgctcggattacaggtgggagtcaccatgcccggccagcttcatttttgtgtcatagaaggtttctttcaaagtaagcatagtggcagatttgagtagttgcaacagatatgataacactcacaaagccaaaaatatttattctttgactttttataggaaaaatttggtaactcctgatttagagcatgcaagagtaggcaaattaaaatgacaggatataagttactgtaatatttgaaaatttatgttatgtttttgaagtagagaagtatggagttaaatattaatacctttttaaatgtccaaatcctttttctgtgaggtagttttacatttacttttaagtacaaataaggaaattagcaatatttttattattggtgttctttagggaggttccacagtattaaagggttattaccaacttttttccctgccctaacatgtaatgttagtgtttgacccttcatttattcagtacaattatttgtcatactgtggagaatatatccagggcttaatgtcactttgaccatgaactctggaacaagctgttggaggcagggcatcacagtaaggcagtcagaattggtgactttcagaaaatgaggtaaatctgttgtctgagtctgatcctaaactctcagtcagctattggactggattcttctaaagcagagtatctagaataggagggatgagcagactacatttggataaagaatttataaggtactctttaacaatttatatcagagttagttgctatctttagcaccattgtcctgatggcctccacttctagctatacattgcctctttgaaatgagccatttgggagaaagcaaatatatcaattagaatgcctttaagaataaaaaacttaaaaagcaaagaaaaacagaatgcctttaggaaaaaatttaataaaaccaactcaaaattgtgcaaacaaggaaattttagtgtttcccataataaaaatcctgaggtatggtagtttcagatagtttagcatcatcagcgccaactttttttctgtattttcactctgccattctgagtattttggctttggctagttcctctcatggtcacaaatgcctaacgcagttttaggcatcataggcagatccaacagtatcgcagaaataagtgaggctgttaatccattgtgtcctttcttaagagtgagaaactctttctcataagttctcctcactctccagaactgggtcatataccaacccctagaccagtcacctggaatgggcatgaaatatagggcagagatggacacttgaatgaaataaaggttctgctagcaaataaaaagagggaatgactatcaggtgggcaacgaataacatctgctacactgtgatgggtttaacataaaaccaaagaccctgtgcattctgtcattttatgacatttaaactcctctccaacttgtgatacactggtattttaaggcagcatactggtattttaaggccttcttttttgaagttcttttgtgttaacagtcccccttctcccctgccatgttgtgtaaacaaaaaaaccctcatatttggggaaattttatcaaaatgccatgttctaacctatgagcaaatctttattatgcaagtatctatttagaatagtggtatgtaaatattattcttccatcagacaaatataactcttccagtaggtgagcttaaggtatgagttacaccaaaaagctttaaggagctgtattttactattagagggactgtgtccctctcattattttaagtgtaagaagaaaacttaattttgcattttggtctgattgaaataagggttgtagctatagtttcccccactttttttgcttaacaacttaattcttactctaatttaccttataatagctaatttaaaactcgttatttttgtttttaaattaactggtatgtactccaatagataagaattttaaaagaaaaaatatgttttgcttaggaatgtgccctcattagtgtttgttttacttcgtttattataatctaaaatgatttgatacattttctttttacatgtcttagaatttaacttgggtcgtctacagatttccaaagaattagtaaatgatgtcattctcccgaaatgggctaaatcagctgaagatttcatctataaacataggaaagctttggagtctgaatatgtttcagctcatcttcatgaatggatagatctgatctttggctataaacagaggggaccagctgcagtagaggcactcaacgttttctattattgtagttatgaaggagctgtggatctggatgccttaacagatgagaaagaaagaaaagccttagaagggatgattaataattttgggcaaacaccctgtcaattattaaaggtaagtcaacaacttaagaagtagatttaagtcaacttaagaagtagatttaagtacataacaaaatattgcagtcaagatccatgtatatagccagttactctcagtcacagaaagatttctgtttgctcagaaagtcttatattatttccaagaggaaaaactgagtacctattagggtatgccattaaaactgtcctcatgctgggactcattccacatgtaaaacttctaatagctaacatctgcccaaaaaggcacttgctttccagagcccaaacccagtcttaagaatcaaattgctctcggctttcggctcggaggaggccaaggtgcaacttccttcggtcgtcccgaatccgggttcatccgacaccagccgcctccaccatgccgccgaagttcgaccccaacgagatcaaagtcgtatacctgaggtgcaccggaggtgaagtcggtgccacttctgccctggcccccaagatcggccccctgggtctgtctccaaaaaaagttggtgatgacattgccaaggcaacgggtgactggaagggcctgaggattacagtgaaactgaccattcagaacagacaggcccagattgaggtggtgccttctgcctctgccctgatcatcaaagccctcaaggaaccaccaagagacagaaagaaacagaaaaacattaaacacagtgggaatatcacttttgatgagattgtcaacattgctcgacagatgcggcaccgatccttagccagagaactctctggaaccattaaagagatcctggggactgcccagtcagtgggctgtaatgttgatggccgccatcctcatgacatcatcgatgacatcaacagtggtgctgtggaatgcccagccagttaagcacaaaggaaaacatttcaataaaggatcatttgacaactgaaaaaaaaaaaaaaaaaaaaaaaaaaaaaaaaaaaaaaaaaaaaaaaaaaaaaaaaaaaaggggggggaaattaaggggggggggaaaaaagggggaaaaaaagagaaaaagtagtgacaaagatgagtaaaaaaaacacaatatttgtaaaaaaggggaaacaggaaggagccacaaagagaggaaaaaataatgaaacagacgtacctttatttttgttgtagtcaaccccggaaaaaaaaaagagagaaagaagaagaaaaaaaagaagaaaaagagagaaaaaagaatgagagaaaagaaaaaaacacaaaacaagaacacaaaagaaagaagaaagaaaaaaaaagaaagaaaaagaaaaaatacacgaacacaaaggaagcgaacgaccacaacgcagagacaaaaggagcgaagaggaccgagagacacacaacacagcacaagcacaaacacagaagcgaagccaggaaacgccgaaggcacgcaaaccaacaaaccagaaa

SEQ ID NO: 463901 - DNA, 5986 bp, Homo sapiens
tctgctctttctcatctaaactgttttcctccaggtttgtgcaatggcatcagctaagctaaatacccttcttcagaccaaagtgattgaaaatcaggatgaagcatgttacattttagggaagctggaacatgttctaagtcaatcaatcaaggaacagactgaaatctactcatttctgattccccttgttcgtaccctggtttccaaaatttatgagcttctcttcatgaacttgcacctaccttctttaccttttaccaatggtagctcctcattttttgaagattttcaagaatattgtaattcaaatgaatggcaagtttacattgaaaaatattatgaagctcatacattttacgatggtcatgagaacatggcactttattggaaggattgttatgaagctttaatggtaaatatgcataaacgagaccgggaaggaggggaaagcaagctcaaatttcaggagctgtttgtggagccatttaatcgaaaagcacgccaagagaacctgaggtataataatatgcttaaacaacttagcagtcaacagttagccactcttagacgctggaaagcaatacagctctatcttacatgtgaaaggggaccttgggctaaaagtgatgagaaagaagaacaggatcaaaaagaaaaattggtattgatggaagactgtgaactcattacaataattgatgtaattcctggcagattagaaatcactactcaacacatttacttctatgatggcagcattgaaaaagaagatggagtaggctttgatttcaagtggcctcattctcaaattcgagagattcatctccggcgttacaatttaagaagatcagcccttgagatttttcatgttgaccaatccaactactttctcaatttcaaaaaagagaaatgggtaaacagagagatatcaaattttgactacctcattcaaataaatacaatggcaggacgaacctataatgaccttgcacagtatcctgtgtttccctggattttacaagattatacttcggaagagttggaccttaataaccctgctgtatttcgagatctttccaaaccaattggggtagttaatgaaaaaaacgccaaagctatgagagaaaaatatgaaaattttgaggatcctatgggaactattgataagtttcactatggtactcactattcaaattctgcgggggtcatgcactatctcattcgtgtagaaccgttcaccaccctccacatccaacttcagagtggaagatctgatttagagctaaatctaaggcatcaccggagagtcaaaccaatccaatgcctatgcctatgtagtcctaaaaatatgtatcatgaggaatggaaggaggagcaataagagactcttacattattacagcagctcaaacaagtctttgataccactgtatttacactgtgggtattataacttacctatgttgtacattttcctaatcctaaggaaaccagcttttccatgaatcttctgttcctcagtaaatcctccacatagctccctatttatacatttttgtctccatgttgccttactgtttaacagccattttgccttccctacccaaaccagagctatgtaaatattgccttttctgttctctttccatgtagcttttatctctcacagttaacctgggttccttatttctgtttatgtacaataagccttggctttcaagaagagactctggccctcagatcactaaacatccccagattttacatgtcaccatcaagaaagtaaaaactggccaaacatgttggcttatgcctttaatccccaacactttgggaggccaggtcaggtggatcacttgagcccatgagtttgagatcagcctaggcaacaaggcaaaaccccatctctacaaaaaatagaaagttagtcgggtgtggtggtgtgcacctgtagtcccagctacttgggaggctgaggtgggaggatagattgaacccaggaggtcgaggctatagtgaaccatgattgcaccactgtactccagactgggtgacacagcaaagctctatctcaaaaaaaaaaaaaaaaaggaaaagaaaagaaatgaaatgaaaactatacctgataagggacttttatatatttgtacctagaatatataaaaaacccttacactcaagacagggtctcgcttttcccttaggctggaatgcagtgctgtgatcactactcactgcagccttgacctcctgggctcaagtaatcctctcagctcagcctcctgagtagctaggactacaggtctgcaccaccatgcctgcaatttttttttttgtagagatggggtctcactttgttgtccaggctggtctcgaactcctggactcaagtgatccttccaccttggcctcccaaagtgctcggattacaggtgggagtcaccatgcccggccagcttcatttttgtgtcatagaaggtttctttcaaagtaagcatagtggcagatttgagtagttgcaacagatatgataacactcacaaagccaaaaatatttattctttgactttttataggaaaaatttggtaactcctgatttagagcatgcaagagtaggcaaattaaaatgacaggatataagttactgtaatatttgaaaatttatgttatgtttttgaagtagagaagtatggagttaaatattaatacctttttaaatgtccaaatcctttttctgtgaggtagttttacatttacttttaagtacaaataaggaaattagcaatatttttattattggtgttctttagggaggttccacagtattaaagggttattaccaacttttttccctgccctaacatgtaatgttagtgtttgacccttcatttattcagtacaattatttgtcatactgtggagaatatatccagggcttaatgtcactttgaccatgaactctggaacaagctgttggaggcagggcatcacagtaaggcagtcagaattggtgactttcagaaaatgaggtaaatctgttgtctgagtctgatcctaaactctcagtcagctattggactggattcttctaaagcagagtatctagaataggagggatgagcagactacatttggataaagaatttataaggtactctttaacaatttatatcagagttagttgctatctttagcaccattgtcctgatggcctccacttctagctatacattgcctctttgaaatgagccatttgggagaaagcaaatatatcaattagaatgcctttaagaataaaaaacttaaaaagcaaagaaaaacagaatgcctttaggaaaaaatttaataaaaccaactcaaaattgtgcaaacaaggaaattttagtgtttcccataataaaaatcctgaggtatggtagtttcagatagtttagcatcatcagcgccaactttttttctgtattttcactctgccattctgagtattttggctttggctagttcctctcatggtcacaaatgcctaacgcagttttaggcatcataggcagatccaacagtatcgcagaaataagtgaggctgttaatccattgtgtcctttcttaagagtgagaaactctttctcataagttctcctcactctccagaactgggtcatataccaacccctagaccagtcacctggaatgggcatgaaatatagggcagagatggacacttgaatgaaataaaggttctgctagcaaataaaaagagggaatgactatcaggtgggcaacgaataacatctgctacactgtgatgggtttaacataaaaccaaagaccctgtgcattctgtcattttatgacatttaaactcctctccaacttgtgatacactggtattttaaggcagcatactggtattttaaggccttcttttttgaagttcttttgtgttaacagtcccccttctcccctgccatgttgtgtaaacaaaaaaaccctcatatttggggaaattttatcaaaatgccatgttctaacctatgagcaaatctttattatgcaagtatctatttagaatagtggtatgtaaatattattcttccatcagacaaatataactcttccagtaggtgagcttaaggtatgagttacaccaaaaagctttaaggagctgtattttactattagagggactgtgtccctctcattattttaagtgtaagaagaaaacttaattttgcattttggtctgattgaaataagggttgtagctatagtttcccccactttttttgcttaacaacttaattcttactctaatttaccttataatagctaatttaaaactcgttatttttgtttttaaattaactggtatgtactccaatagataagaattttaaaagaaaaaatatgttttgcttaggaatgtgccctcattagtgtttgttttacttcgtttattataatctaaaatgatttgatacattttctttttacatgtcttagaatttaacttgggtcgtctacagatttccaaagaattagtaaatgatgtcattctcccgaaatgggctaaatcagctgaagatttcatctataaacataggaaagctttggagtctgaatatgtttcagctcatcttcatgaatggatagatctgatctttggctataaacagaggggaccagctgcagtagaggcactcaacgttttctattattgtagttatgaaggagctgtggatctggatgccttaacagatgagaaagaaagaaaagccttagaagggatgattaataattttgggcaaacaccctgtcaattattaaaggtaagtcaacaacttaagaagtagatttaagtcaacttaagaagtagatttaagtacataacaaaatattgcagtcaagatccatgtatatagccagttactctcagtcacagaaagatttctgtttgctcagaaagtcttatattatttccaagaggaaaaactgagtacctattagggtatgccattaaaactgtcctcatgctgggactcattccacatgtaaaacttctaatagctaacatctgcccaaaaaggcacttgctttccagagcccaaacccagtcttaagaatcaaattgctctcggctttcggctcggaggaggccaaggtgcaacttccttcggtcgtcccgaatccgggttcatccgacaccagccgcctccaccatgccgccgaagttcgaccccaacgagatcaaagtcgtatacctgaggtgcaccggaggtgaagtcggtgccacttctgccctggcccccaagatcggccccctgggtctgtctccaaaaaaagttggtgatgacattgccaaggcaacgggtgactggaagggcctgaggattacagtgaaactgaccattcagaacagacaggcccagattgaggtggtgccttctgcctctgccctgatcatcaaagccctcaaggaaccaccaagagacagaaagaaacagaaaaacattaaacacagtgggaatatcacttttgatgagattgtcaacattgctcgacagatgcggcaccgatccttagccagagaactctctggaaccattaaagagatcctggggactgcccagtcagtgggctgtaatgttgatggccgccatcctcatgacatcatcgatgacatcaacagtggtgctgtggaatgcccagccagttaagcacaaaggaaaacatttcaataaaggatcatttgacaactgaaaaaaaaaaaaaaaacaaaaccttcctaacccctattttttctctgactccctctctttctgtcaaaccagccgccctccctctcttaaaaaataggccggcccgctggcccaagcggtttttaaattggggcaggttatcatggcgccccaaattgggctctttgggcattccgccttagggggctgatatacattctggccggtgtttaaacgggggcattga

SEQ ID NO: 463902 - DNA, 891 bp, Homo sapiens
cattgaggacaagacgcgtatgtagtccctatatcagtcaaaaggctttatcatgcggctgcatgggatctgtgaccagcctcctgtcccctttctgactgtgcgtccttcagtgcatgcacaccagcctggcacactctagctccagccactcatgttctgcccgctcctggaacagtaccaagcgctatgccctgagcacatgcaattgatagggaccgagaggccggccggggaactacaggggcagagcttattccagggggtgaggttttcgattcgctattgatgcggcaccgatccttagccagagaactctctggaaccattaaagagatcctggggactgcccagtcagtgggctgtaatgttgatggccgccatcctcatgacatcatcgatgacatcaacagtggtgctgtggaatgcccagccagttaagcacaaaggaaaacatttcaataaaggatcatttgacaactgaaaaaaaaaaaaaaaagaatcaaattatagaatatttaaaatgtagaatcaaattattaaatattactacatatatttctttccctatactggtatctgaaattaaatcattatcttcctgatgacacacaggtttagattaatggaaattaatctaatggtagttttcaaagatgtcttgatctttttcagtatatgaatttagtgatgtagaatgtacaaaaaaatatatcatttattaactagatatgttcttaagcaatcactgtgtttgttaggtactttacctaatcttcatagtaaaaattcagctatcctcattttttaggagttaaagccaagcctcacagaagttatgtcctgaatttatattggtttaaatacaaaacttagtttccataatatgag

SEQ ID NO: 463903 - DNA, 6168 bp, Homo sapiens
tctgctctttctcatctaaactgttttcctccaggtttgtgcaatggcatcagctaagctaaatacccttcttcagaccaaagtgattgaaaatcaggatgaagcatgttacattttagggaagctggaacatgttctaagtcaatcaatcaaggaacagactgaaatctactcatttctgattccccttgttcgtaccctggtttccaaaatttatgagcttctcttcatgaacttgcacctaccttctttaccttttaccaatggtagctcctcattttttgaagattttcaagaatattgtaattcaaatgaatggcaagtttacattgaaaaatattatgaagctcatacattttacgatggtcatgagaacatggcactttattggaaggattgttatgaagctttaatggtaaatatgcataaacgagaccgggaaggaggggaaagcaagctcaaatttcaggagctgtttgtggagccatttaatcgaaaagcacgccaagagaacctgaggtataataatatgcttaaacaacttagcagtcaacagttagccactcttagacgctggaaagcaatacagctctatcttacatgtgaaaggggaccttgggctaaaagtgatgagaaagaagaacaggatcaaaaagaaaaattggtattgatggaagactgtgaactcattacaataattgatgtaattcctggcagattagaaatcactactcaacacatttacttctatgatggcagcattgaaaaagaagatggagtaggctttgatttcaagtggcctcattctcaaattcgagagattcatctccggcgttacaatttaagaagatcagcccttgagatttttcatgttgaccaatccaactactttctcaatttcaaaaaagagaaatgggtaaacagagagatatcaaattttgactacctcattcaaataaatacaatggcaggacgaacctataatgaccttgcacagtatcctgtgtttccctggattttacaagattatacttcggaagagttggaccttaataaccctgctgtatttcgagatctttccaaaccaattggggtagttaatgaaaaaaacgccaaagctatgagagaaaaatatgaaaattttgaggatcctatgggaactattgataagtttcactatggtactcactattcaaattctgcgggggtcatgcactatctcattcgtgtagaaccgttcaccaccctccacatccaacttcagagtggaagatctgatttagagctaaatctaaggcatcaccggagagtcaaaccaatccaatgcctatgcctatgtagtcctaaaaatatgtatcatgaggaatggaaggaggagcaataagagactcttacattattacagcagctcaaacaagtctttgataccactgtatttacactgtgggtattataacttacctatgttgtacattttcctaatcctaaggaaaccagcttttccatgaatcttctgttcctcagtaaatcctccacatagctccctatttatacatttttgtctccatgttgccttactgtttaacagccattttgccttccctacccaaaccagagctatgtaaatattgccttttctgttctctttccatgtagcttttatctctcacagttaacctgggttccttatttctgtttatgtacaataagccttggctttcaagaagagactctggccctcagatcactaaacatccccagattttacatgtcaccatcaagaaagtaaaaactggccaaacatgttggcttatgcctttaatccccaacactttgggaggccaggtcaggtggatcacttgagcccatgagtttgagatcagcctaggcaacaaggcaaaaccccatctctacaaaaaatagaaagttagtcgggtgtggtggtgtgcacctgtagtcccagctacttgggaggctgaggtgggaggatagattgaacccaggaggtcgaggctatagtgaaccatgattgcaccactgtactccagactgggtgacacagcaaagctctatctcaaaaaaaaaaaaaaaaaggaaaagaaaagaaatgaaatgaaaactatacctgataagggacttttatatatttgtacctagaatatataaaaaacccttacactcaagacagggtctcgcttttcccttaggctggaatgcagtgctgtgatcactactcactgcagccttgacctcctgggctcaagtaatcctctcagctcagcctcctgagtagctaggactacaggtctgcaccaccatgcctgcaatttttttttttgtagagatggggtctcactttgttgtccaggctggtctcgaactcctggactcaagtgatccttccaccttggcctcccaaagtgctcggattacaggtgggagtcaccatgcccggccagcttcatttttgtgtcatagaaggtttctttcaaagtaagcatagtggcagatttgagtagttgcaacagatatgataacactcacaaagccaaaaatatttattctttgactttttataggaaaaatttggtaactcctgatttagagcatgcaagagtaggcaaattaaaatgacaggatataagttactgtaatatttgaaaatttatgttatgtttttgaagtagagaagtatggagttaaatattaatacctttttaaatgtccaaatcctttttctgtgaggtagttttacatttacttttaagtacaaataaggaaattagcaatatttttattattggtgttctttagggaggttccacagtattaaagggttattaccaacttttttccctgccctaacatgtaatgttagtgtttgacccttcatttattcagtacaattatttgtcatactgtggagaatatatccagggcttaatgtcactttgaccatgaactctggaacaagctgttggaggcagggcatcacagtaaggcagtcagaattggtgactttcagaaaatgaggtaaatctgttgtctgagtctgatcctaaactctcagtcagctattggactggattcttctaaagcagagtatctagaataggagggatgagcagactacatttggataaagaatttataaggtactctttaacaatttatatcagagttagttgctatctttagcaccattgtcctgatggcctccacttctagctatacattgcctctttgaaatgagccatttgggagaaagcaaatatatcaattagaatgcctttaagaataaaaaacttaaaaagcaaagaaaaacagaatgcctttaggaaaaaatttaataaaaccaactcaaaattgtgcaaacaaggaaattttagtgtttcccataataaaaatcctgaggtatggtagtttcagatagtttagcatcatcagcgccaactttttttctgtattttcactctgccattctgagtattttggctttggctagttcctctcatggtcacaaatgcctaacgcagttttaggcatcataggcagatccaacagtatcgcagaaataagtgaggctgttaatccattgtgtcctttcttaagagtgagaaactctttctcataagttctcctcactctccagaactgggtcatataccaacccctagaccagtcacctggaatgggcatgaaatatagggcagagatggacacttgaatgaaataaaggttctgctagcaaataaaaagagggaatgactatcaggtgggcaacgaataacatctgctacactgtgatgggtttaacataaaaccaaagaccctgtgcattctgtcattttatgacatttaaactcctctccaacttgtgatacactggtattttaaggcagcatactggtattttaaggccttcttttttgaagttcttttgtgttaacagtcccccttctcccctgccatgttgtgtaaacaaaaaaaccctcatatttggggaaattttatcaaaatgccatgttctaacctatgagcaaatctttattatgcaagtatctatttagaatagtggtatgtaaatattattcttccatcagacaaatataactcttccagtaggtgagcttaaggtatgagttacaccaaaaagctttaaggagctgtattttactattagagggactgtgtccctctcattattttaagtgtaagaagaaaacttaattttgcattttggtctgattgaaataagggttgtagctatagtttcccccactttttttgcttaacaacttaattcttactctaatttaccttataatagctaatttaaaactcgttatttttgtttttaaattaactggtatgtactccaatagataagaattttaaaagaaaaaatatgttttgcttaggaatgtgccctcattagtgtttgttttacttcgtttattataatctaaaatgatttgatacattttctttttacatgtcttagaatttaacttgggtcgtctacagatttccaaagaattagtaaatgatgtcattctcccgaaatgggctaaatcagctgaagatttcatctataaacataggaaagctttggagtctgaatatgtttcagctcatcttcatgaatggatagatctgatctttggctataaacagaggggaccagctgcagtagaggcactcaacgttttctattattgtagttatgaaggagctgtggatctggatgccttaacagatgagaaagaaagaaaagccttagaagggatgattaataattttgggcaaacaccctgtcaattattaaaggtaagtcaacaacttaagaagtagatttaagtcaacttaagaagtagatttaagtacataacaaaatattgcagtcaagatccatgtatatagccagttactctcagtcacagaaagatttctgtttgctcagaaagtcttatattatttccaagaggaaaaactgagtacctattagggtatgccattaaaactgtcctcatgctgggactcattccacatgtaaaacttctaatagctaacatctgcccaaaaaggcacttgctttccagagcccaaacccagtcttaagaatcaaattgctctcggctttcggctcggaggaggccaaggtgcaacttccttcggtcgtcccgaatccgggttcatccgacaccagccgcctccaccatgccgccgaagttcgaccccaacgagatcaaagtcgtatacctgaggtgcaccggaggtgaagtcggtgccacttctgccctggcccccaagatcggccccctgggtctgtctccaaaaaaagttggtgatgacattgccaaggcaacgggtgactggaagggcctgaggattacagtgaaactgaccattcagaacagacaggcccagattgaggtggtgccttctgcctctgccctgatcatcaaagccctcaaggaaccaccaagagacagaaagaaacagaaaaacattaaacacagtgggaatatcacttttgatgagattgtcaacattgctcgacagatgcggcaccgatccttagccagagaactctctggaaccattaaagagatcctggggactgcccagtcagtgggctgtaatgttgatggccgccatcctcatgacatcatcgatgacatcaacagtggtgctgtggaatgcccagccagttaagcacaaaggaaaacatttcaataaaggatcatttgacaactgaaaaaaaaaaaaaaaagaatcaaattatagaatatttaaaatgtagaatcaaattattaaatattactacatatatttctttccctatactggtatctgaaattaaatcattatcttcctgatgacacacaggtttagattaatggaaattaatctaatggtagttttcaaagatgtcttgatctttttcagtatatgaatttagtgatgtagaatgtacaaaaaaatatatcatttattaactagatatgttcttaagcaatcactgtgtttgttaggtactttacctaatcttcatagtaaaaattcagctatcctcattttttaggagttaaagccaagcctcacagaagttatgtcctgaatttatattggtttaaatacaaaacttagtttccataatatgag

SEQ ID NO: 463904 - DNA, 5776 bp, Homo sapiens
tctgctctttctcatctaaactgttttcctccaggtttgtgcaatggcatcagctaagctaaatacccttcttcagaccaaagtgattgaaaatcaggatgaagcatgttacattttagggaagctggaacatgttctaagtcaatcaatcaaggaacagactgaaatctactcatttctgattccccttgttcgtaccctggtttccaaaatttatgagcttctcttcatgaacttgcacctaccttctttaccttttaccaatggtagctcctcattttttgaagattttcaagaatattgtaattcaaatgaatggcaagtttacattgaaaaatattatgaagctcatacattttacgatggtcatgagaacatggcactttattggaaggattgttatgaagctttaatggtaaatatgcataaacgagaccgggaaggaggggaaagcaagctcaaatttcaggagctgtttgtggagccatttaatcgaaaagcacgccaagagaacctgaggtataataatatgcttaaacaacttagcagtcaacagttagccactcttagacgctggaaagcaatacagctctatcttacatgtgaaaggggaccttgggctaaaagtgatgagaaagaagaacaggatcaaaaagaaaaattggtattgatggaagactgtgaactcattacaataattgatgtaattcctggcagattagaaatcactactcaacacatttacttctatgatggcagcattgaaaaagaagatggagtaggctttgatttcaagtggcctcattctcaaattcgagagattcatctccggcgttacaatttaagaagatcagcccttgagatttttcatgttgaccaatccaactactttctcaatttcaaaaaagagaaatgggtaaacagagagatatcaaattttgactacctcattcaaataaatacaatggcaggacgaacctataatgaccttgcacagtatcctgtgtttccctggattttacaagattatacttcggaagagttggaccttaataaccctgctgtatttcgagatctttccaaaccaattggggtagttaatgaaaaaaacgccaaagctatgagagaaaaatatgaaaattttgaggatcctatgggaactattgataagtttcactatggtactcactattcaaattctgcgggggtcatgcactatctcattcgtgtagaaccgttcaccaccctccacatccaacttcagagtggaagatctgatttagagctaaatctaaggcatcaccggagagtcaaaccaatccaatgcctatgcctatgtagtcctaaaaatatgtatcatgaggaatggaaggaggagcaataagagactcttacattattacagcagctcaaacaagtctttgataccactgtatttacactgtgggtattataacttacctatgttgtacattttcctaatcctaaggaaaccagcttttccatgaatcttctgttcctcagtaaatcctccacatagctccctatttatacatttttgtctccatgttgccttactgtttaacagccattttgccttccctacccaaaccagagctatgtaaatattgccttttctgttctctttccatgtagcttttatctctcacagttaacctgggttccttatttctgtttatgtacaataagccttggctttcaagaagagactctggccctcagatcactaaacatccccagattttacatgtcaccatcaagaaagtaaaaactggccaaacatgttggcttatgcctttaatccccaacactttgggaggccaggtcaggtggatcacttgagcccatgagtttgagatcagcctaggcaacaaggcaaaaccccatctctacaaaaaatagaaagttagtcgggtgtggtggtgtgcacctgtagtcccagctacttgggaggctgaggtgggaggatagattgaacccaggaggtcgaggctatagtgaaccatgattgcaccactgtactccagactgggtgacacagcaaagctctatctcaaaaaaaaaaaaaaaaaggaaaagaaaagaaatgaaatgaaaactatacctgataagggacttttatatatttgtacctagaatatataaaaaacccttacactcaagacagggtctcgcttttcccttaggctggaatgcagtgctgtgatcactactcactgcagccttgacctcctgggctcaagtaatcctctcagctcagcctcctgagtagctaggactacaggtctgcaccaccatgcctgcaatttttttttttgtagagatggggtctcactttgttgtccaggctggtctcgaactcctggactcaagtgatccttccaccttggcctcccaaagtgctcggattacaggtgggagtcaccatgcccggccagcttcatttttgtgtcatagaaggtttctttcaaagtaagcatagtggcagatttgagtagttgcaacagatatgataacactcacaaagccaaaaatatttattctttgactttttataggaaaaatttggtaactcctgatttagagcatgcaagagtaggcaaattaaaatgacaggatataagttactgtaatatttgaaaatttatgttatgtttttgaagtagagaagtatggagttaaatattaatacctttttaaatgtccaaatcctttttctgtgaggtagttttacatttacttttaagtacaaataaggaaattagcaatatttttattattggtgttctttagggaggttccacagtattaaagggttattaccaacttttttccctgccctaacatgtaatgttagtgtttgacccttcatttattcagtacaattatttgtcatactgtggagaatatatccagggcttaatgtcactttgaccatgaactctggaacaagctgttggaggcagggcatcacagtaaggcagtcagaattggtgactttcagaaaatgaggtaaatctgttgtctgagtctgatcctaaactctcagtcagctattggactggattcttctaaagcagagtatctagaataggagggatgagcagactacatttggataaagaatttataaggtactctttaacaatttatatcagagttagttgctatctttagcaccattgtcctgatggcctccacttctagctatacattgcctctttgaaatgagccatttgggagaaagcaaatatatcaattagaatgcctttaagaataaaaaacttaaaaagcaaagaaaaacagaatgcctttaggaaaaaatttaataaaaccaactcaaaattgtgcaaacaaggaaattttagtgtttcccataataaaaatcctgaggtatggtagtttcagatagtttagcatcatcagcgccaactttttttctgtattttcactctgccattctgagtattttggctttggctagttcctctcatggtcacaaatgcctaacgcagttttaggcatcataggcagatccaacagtatcgcagaaataagtgaggctgttaatccattgtgtcctttcttaagagtgagaaactctttctcataagttctcctcactctccagaactgggtcatataccaacccctagaccagtcacctggaatgggcatgaaatatagggcagagatggacacttgaatgaaataaaggttctgctagcaaataaaaagagggaatgactatcaggtgggcaacgaataacatctgctacactgtgatgggtttaacataaaaccaaagaccctgtgcattctgtcattttatgacatttaaactcctctccaacttgtgatacactggtattttaaggcagcatactggtattttaaggccttcttttttgaagttcttttgtgttaacagtcccccttctcccctgccatgttgtgtaaacaaaaaaaccctcatatttggggaaattttatcaaaatgccatgttctaacctatgagcaaatctttattatgcaagtatctatttagaatagtggtatgtaaatattattcttccatcagacaaatataactcttccagtaggtgagcttaaggtatgagttacaccaaaaagctttaaggagctgtattttactattagagggactgtgtccctctcattattttaagtgtaagaagaaaacttaattttgcattttggtctgattgaaataagggttgtagctatagtttcccccactttttttgcttaacaacttaattcttactctaatttaccttataatagctaatttaaaactcgttatttttgtttttaaattaactggtatgtactccaatagataagaattttaaaagaaaaaatatgttttgcttaggaatgtgccctcattagtgtttgttttacttcgtttattataatctaaaatgatttgatacattttctttttacatgtcttagaatttaacttgggtcgtctacagatttccaaagaattagtaaatgatgtcattctcccgaaatgggctaaatcagctgaagatttcatctataaacataggaaagctttggagtctgaatatgtttcagctcatcttcatgaatggatagatctgatctttggctataaacagaggggaccagctgcagtagaggcactcaacgttttctattattgtagttatgaaggagctgtggatctggatgccttaacagatgagaaagaaagaaaagccttagaagggatgattaataattttgggcaaacaccctgtcaattattaaaggtaagtcaacaacttaagaagtagatttaagtcaacttaagaagtagatttaagtacataacaaaatattgcagtcaagatccatgtatatagccagttactctcagtcacagaaagatttctgtttgctcagaaagtcttatattatttccaagaggaaaaactgagtacctattagggtatgccattaaaactgtcctcatgctgggactcattccacatgtaaaacttctaatagctaacatctgcccaaaaaggcacttgctttccagagcccaaacccagtcttaagaatcaaattgctctcggctttcggctcggaggaggccaaggtgcaacttccttcggtcgtcccgaatccgggttcatccgacaccagccgcctccaccatgccgccgaagttcgaccccaacgagatcaaagtcgtatacctgaggtgcaccggaggtgaagtcggtgccacttctgccctggcccccaagatcggccccctgggtctgtctccaaaaaaagttggtgatgacattgccaaggcaacgggtgactggaagggcctgaggattacagtgaaactgaccattcagaacagacaggcccagattgaggtggtgccttctgcctctgccctgatcatcaaagccctcaaggaaccaccaagagacagaaagaaacagaaaaacattaaacacagtgggaatatcacttttgatgagattgtcaacattgctcgacagatgcggcaccgatccttagccagagaactctctggaaccattaaagagatcctggggactgcccagtcagtgggctgtaatgttgatggccgccatcctcatgacatcatcgatgacatcaacagtggtgctgtggaatgcccagccagttaagcacaaaggaaaacatttcaataaaggatcatttgacaactgaaaaaaaaaaaaaaaa

SEQ ID NO: 463905 - DNA, 5650 bp, Homo sapiens
tgggtcactgggcagggctcgcgggcctgagagcttgcactctaaggagcccaggtgctgtcgatgttgctcagcttctggtcgcaatgcaagggtcccttcctgagctcaccacacgctggggtcactccgggctgtggctaccactgggcctcgcttctgccttctgcaaaaaccacaaactccccagggcagcacatgtgtcacagacgtctttttaacagctttattgagtgaccccagacctgctggggtggaggaaggggtccatctatttaggtctccaggctgccatgctggcgatgtggtcccgtagttgctcagccagtgggcatcagccccgcccttctgcgtgctgcccaccaggaaaacggaaaggccggtccctgctcttagtggtgccccgtgtggtgggacaggtggaggagggacagacagaggaggctcgtgcaggggaacgccagccaaggagggagcgcctgctccaagggagggggcatttgaggcacagatcaaatgattccatgatgacaaactgcctgtctcaactgaccagattccactggcaaacactccgctgaccttgggcagctccctctgctcccacctcctctggcccttgtgcttctggggctttgtggagtagctggacatcaatgataacactaacagtagccggcctgccaccaagttctttacataggggatgcctatgtctgtgcttcattggcgtcatctcacaaggccctgagctggcaggaaattgaggtctcaaggggaaaagccacctgcccccagtgacaaccaggaagtgcaagactctgacccaacgcccatgcctgccatccccaaacatgggctcaaaacccccttcccagggacggctgtgtccacccctcagcaggaggaggagaccccacagcaccgggtgagaggtcagtgctgaagccagggaggcagctctcagcagggcacctgtgtggagccagggaagccagggccacacttgcagggtgaagtggggaactcggaaggctgggcagtggagcaaaatgcttggtgccctgcgggaaccggtggccaaggctacactgggatgaagggagccgtggagctgcagaatctgcgggtggccctcagtggcaggcagccaggccaacaggggctttgggctgcaggtcagcccctcccctgctctggaacttttggagggccattacaaaggacatcagccccaagatactcctctgaaattctgcctgaaaggcccttcacattccctaattggcacttacaacattccagaacattctatggtaccttaagtttctcctccccctccaaagggcccttgaaccttaaggatagggcagaaggggctcctcaccctggcctcgagggcttaagatccagctgaggactcctagcctccctgtgtgctgggcaggaaagtagctccatgtcactgctgtccctgggaaaggaaaaaaggttgaggaagggctcagagccagccttcagaccaggcaggaagggttcagagccagccttcaggccatgcaggcctcctggatgtgcttactaactctgggctcgctgttctctgagctggctgggagttcccctctgcacccccgtttcctcccctgtaaggtgggaataatagcgtatgtctctaggattaagtgagccagtcatgcatgggccgagaaccaggtttggcatattgtagctgctcagtggacgttagctgttatgattggaccacaacgtgcttccgtttcaattctgtgggccttttggaggtcctgctggatgctaagcaccgaaacctcaacccggaacaagaccagaacaacctgagcaacaacaggaccagcgatggctctccctgctggaggattctggaagtcacctggctggaccaagccctctccgtgttctctgtcagcccactccccagagccgctaggcctgatgtgcacaagcagactaataaaggcttgaggacaaaaagggttttgagtgataagtgaaaaaagaaaggagatagggctgggccaacaggccttcccttggtggtggggagccctcagaggtgggaggaaccccagaggtgaagagagggacatggtgggggcacaaaaaaagcttccagagccacaggcctgggcgagtcctgacatggagcccagtctcatacggcctctttccctagtggctggctttgctcctggccctaggtagcccaacagctgggcaaggggtccgtctggtcaggggaaaggtgcaggggcagaaggtagcagagggagaaaaggacaccctgtctgcctctggccccaaagacaagtccgaatggggccagagggaaatggctgggccttggggtgccccagggtcttggaggggaccgggtgttcaggtttcgcacaagtacaggagggaccggcgaccgccctccccccgccccgggaggctccgccagggacaggcgtccccgggattggaggtgacccccgtgggttccgaagccccgcctcggccatgcactgtctactaggcgcgcttggggagcctaggggccgtctcggagaaatggggtggtccccgccaggcggcggcggggcgggccctgggcgccgaagggaggaaagtcgcggcgggggcgcggcccggtctccgtccccacccgcccgccgtcccgccggcccgagccgtggcgcccagagctgcgagccgctcgcccctccgccgctccggcccgggccgccatgtcgctgtggtgagtggggctgggggccgtcgggggcctgggcgggggcgtgggcccggggctccccctcctccgtggccacagacgggcgccgggactcccgggataggagatgcccccgcgcgcgccgcgccggcctcagtttcccgggggcggatgggcgggcgggcgcggcggcggcggcgggagatgttcgcggtacgcggccccggacccgtgggggacgtcgaggggtctcggggcgccgcgctcagctccccggccccgcggccctggacaccgctccaggaccctggcggctgggaccccaggtcttgccggcagctgggtcccctctcccttccagacccctgagggccccctgcgtccgggccactctcctcctctcggggcttccttccgcgggacctcggaccgccgcccgcccggcccctctccgcccctcccgggctttccctacgaatggagcggacccggcaggtggagcgcccgcagcccagggcctcgccgccttcccggtgcaccccccgacctcccccgtcccggcctcggtgggcggcttccctggaacccctagggctggcagggccggatccggagccctccgtttcctccccggagagctggaccttgggtcacaccccccagcctgcacctaaggtgcccctgtcttcctccaaccacatgccccagcaacctggggaccctatggggaaaatgtcgctctatggggctcagcctgcattcaccctggggcctggacctgcaaccggaccagccctcagggcaacccaggcgtctccacgggctgcctgtctctcctggcaccctgctcctcccccttggaggtcagcgccatctctctgctaggctggccctggaaggccactctgctgtccccagagctctcagcccccaggtctccactggggagggtggggcaggtgtcctggcagcccccggagggaagaaaaccgtctaccggagtctgtgcctggccctggccctgctcgtggccgtgacggtgttccaacgcagtctcacccctggtcagtttctgcaggagcctccgccacccaccctggagccacagaaggcccagaagccaaatggacagctggtgaaccccaacaacttctggaagaacccgaaagatgtggctgcgcccacgcccatggcctctcaggggccccaggcctgggacgtgaccaccactaactgctcagccaatatcaacttgacccaccagccctggttccaggtcctggagccgcagttccggcagtttctcttctaccgccactgccgctacttccccatgctgctgaaccacccggagaagtgcaggggcgatgtctacctgctggtggttgtcaagtcggtcatcacgcagcacgaccgccgcgaggccatccgccagacctggggccgcgagcggcagtccgcgggtgggggccgaggcgccgtgcgcaccctcttcctgctgggcacggcctccaagcaggaggagcgcacgcactaccagcagctgctggcctacgaagaccgcctctacggcgacatcctgcagtggggctttctcgacaccttcttcaacctgaccctcaaggagatccacttcctcaagtggctggacatctactgcccccacgtccccttcattttcaaaggcgacgatgacgtcttcgtcaaccccaccaacctgctagaatttctggctgaccggcagccacaggaaaacctgttcgtgggcgatgtcctgcagcacgctcggcccattcgcaggaaagacaacaaatactacatcccgggggccctgtacggcaaggccagctatccgccgtatgcaggcggcggtggcttcctcatggccggcagcctggcccggcgcctgcaccatgcctgcgacaccctggagctctacccgatcgacgacgtctttctgggcatgtgcctggaggtgctgggcgtgcagcccacggcccacgagggcttcaagactttcggcatctcccggaaccgcaacagccgcatgaacaaggagccgtgctttttccgcgccatgctcgtggtgcacaagctgctgccccctgagctgctcgccatgtgggggctggtgcacagcaatctcacctgctcccgcaagctccaggtgctctgaccccagccgggctactaggacaggccagggcacttgctcctgagcccccatggtattggggctggagccacagtgcccaggcctagcctttggtccccaaggggaggtggagggttgaggcctacgtgccactgggtgtggtggggtgcaggtagccagaaagggacctccctgtgtggataattctaggaaactgaggcccaggaacggttggagctgcccagtctggaggccctctctgaggagcgaggcgccaggccctggcagccctcctgacctgggtccgttgctggccccctcagatgtggtgggaggtcctggtgacctctggaggaacgctgtgctcaggtacctgggctaggcctggcctgatgggtctgtggccgcccctcgtcttcacagggaagagtcttctgtgaaatgcctcagtctccccagaggccgggcggccctggcaggagaaactcaaccctgtgcgggctcacaggcaccccccagtccacaccctggtctcctgggagagagggcccagccggctctccgcagccccaggcctgcctggagacgggccgcctctgccacagggcctccactcctggctgtgtcctgtaaggtctggaagggcgaccgtctgactacctcagcgcccctcagaatctccctggggctgcagccctaccccaccccgacacagggcagaagagcagcgctcc

SEQ ID NO: 463906 - DNA, 1215 bp, Homo sapiens
gatggagggaaataactgctcttcccttcccttccgttcaggaggcaggggactcacagaccaagtccttccctggctgcctcccctggcgtcccgttcccatcagaggactgtggcctctggccagggcagggggaggcacctggtgggtctgatgctccagctgctggtgttctccagtggagagaggacgggtccgtatactcaagttctccgtgccgtgggaggctcccaaacaccaaaggctcgtggaaatgaactgagtggacctaagcccagcctaaagcattgggttcacagcgctccagagactcctttccatgggaagagggacgtgggcaaggagctgagaagcagccgtggggatggcttggacatctctgtagaccccgcagccatcaaggcaggagaggatgtggaggcgaggaactctgctttcctcttctggccactgaaagaagcggacacgcaggattccagagagccaagacgagagaagcccaggaggaaaaagaggcccgccaagcagccactccagcaggcggcgccctcggactcggacggctcctcccacggcatcagctcccatgggtcctgccaggggacacaccccgagcccaggacagcccacctccacttccccgcggccgggcgtctaggactcagcagccacgccatcattgccacacctccacctcgagcagccctgccctgtactctccaagccacccacagcagcaaagggctgaggagcgtccctgagacactttaaggccgtctggtggcagctatgtttaagagaccagcgtccttccaggctgttcagacctcagcgttgacactgaaactggcccctccgcggagtctgttgtaggtaactctaattgagcccgaaaccagaataaaaactcttacattggaaacatttcaaaaccattggattgttggattatttgttaccatttttctctgaacacattttagcaatgacatatgaaagtattcagttgtgtttactaacttcaaaaatgaaatcgctccatcaaatttcgtttttctagtcggtaagatccctgaggctagatgaaaatagagcacaggtcatcactagggaaaatattggatgctttttgcaaacagaacagatagggctgagttctgatactctaaaaatttacaatctaattaaaagtggcattcacattcctgaaagct

SEQ ID NO: 463907 - DNA, 452 bp, Homo sapiens
actcctctcccctccatccctgctgcctcccctacccgtttgacgacttggttctggctttttctgactgttctttatcctgttttccccctgcactcacaaaattgtattccatcttctggtagacgccccacccccagaagttttaacctgaaggatgactgtcacaggactttcaaattgtttagcagtcagcatagtcaggatccaagcccgcaatcttgttttaaattaattatcacatctaaattagagattttgtcacccaatattaggactgaaattcagactcggtaacttgtctgagatctgcaagactgaacatcccctactgtatagtttcctgacattttcatttagcctttcctaattatttttgtctatagtctgttgtaggtaactctaattgagcccgaaaccagaataaaaactcttacattggaaacatttca

SEQ ID NO: 463908 - DNA, 930 bp, Homo sapiens
gatggagggaaataactgctcttcccttcccttccgttcaggaggcaggggactcacagaccaagtccttccctggctgcctcccctggcgtcccgttcccatcagaggactgtggcctctggccagggcagggggaggcacctggtgggtctgatgctccagctgctggtgttctccagtggagagaggacgggtccgtatactcaagttctccgtgccgtgggaggctcccaaacaccaaaggctcgtggaaatgaactgagtggacctaagcccagcctaaagcattgggttcacagcgctccagagactcctttccatgggaagagggacgtgggcaaggagctgagaagcagccgtggggatggcttggacatctctgtagaccccgcagccatcaaggcaggagaggatgtggaggcgaggaactctgctttcctcttctggccactgaaagaagcggacacgcaggattccagagagccaagacgagagaagcccaggaggaaaaagaggcccgccaagcagccactccagcaggcggcgccctcggactcggacggctcctcccacggcatcagctcccatgggtcctgccaggggacacaccccgagcccaggacagcccacctccacttccccgcggccgggcgtctaggactcagcagccacgccatcattgccacacctccacctcgagcagccctgccctgtactctccaagccacccacagcagcaaagggctgaggagcgtccctgagacactttaaggccgtctggtggcagctatgtttaagagaccagcgtccttccaggctgttcagacctcagcgttgacactgaaactggcccctccgcggagtctgttgtaggtaactctaattgagcccgaaaccagaataaaaactcttacattggaaacatttca

SEQ ID NO: 463909 - DNA, 576 bp, Homo sapiens
tcccccccccccttaattatcgccccaccaccaacatcaccctggctgaagaatgtcaacaattgggagttttgaaggattccaggctgtgtctctgaagcaagagggagatgaccaaccctctgagactgaccacctatcgatggaggaagaggacccgatgccaagacagatttcaaggcagtcaagtgtgaccgaatcaactctttaccccaatccttatcatcagccttatatctcacggaagtactttgctacacggccgggggccattgagactgccatggaagacttgaaaggtcacgtagctgagacttctggagagaccattcaaggcttctggctcttgacaaacacaccaaggcagggaaaggcaaaaacaacaacaatgagaacacaaaaacaaaaatcccaactcccccaacagcaaccacaaaacaaaaaaactaaagaaaataaacaaacatgcaggcccagaaagaacggatccattaagccagcaccaaggagaacatcttgacactttatggaatttcaaaaagtatgatatgatggcaataaagtggctcttcagca

SEQ ID NO: 463910 - DNA, 575 bp, Homo sapiens
  misc_feature (33)..(33): n is a, c, g, or t
tgtctcttctgtaactgttgtggttttgtgtgntcttccatcagctgaagaatgtcaacaattgggagttttgaaggattccaggctgtgtctctgaagcaagagggagatgaccaaccctctgagactgaccacctatcgatggaggaagaggacccgatgccaagacagatttcaaggcagtcaagtgtgaccgaatcaactctttaccccaatccttatcatcagccttatatctcacggaagtactttgctacacggccgggggccattgagactgccatggaagacttgaaaggtcacgtagctgagacttctggagagaccattcaaggcttctggctcttgacaaacacaccaaggcagggaaaggcaaaaacaacaacaatgagaacacaaaaacaaaaatcccaactcccccaacagcaaccacaaaacaaaaaaactaaagaaaataaacaaacatgcaggcccagaaagaacggatccattaagccagcaccaaggagaacatcttgacactttatggaatttcaaaaagtatgatatgatggcaataaagtggctcttcagca

SEQ ID NO: 463911 - DNA, 1650 bp, Homo sapiens
aaccccttcatgggggtagaggacagaaatctttcagtatgtggtggagcagaatcctcgatgatgaagagactggagagctacccccctcagaccgggggcactgagcttcttgtgcctaaaggatttgtcaacctggctctgggggaaagagaaaggcttcattcagcctgcagcgctcgctgtgggactgctgatgcacgggaagctggggattggtcctgcttcatggaagccgtatctctcagcccagaactcactgggctcagacatttggcaaaagtgcctccagctgaagaatgtcaacaattgggagttttgaaggattccaggctgtgtctctgaagcaagagggagatgaccaaccctctgagactgaccacctatcgatggaggaagaggacccgatgccaagacagatttcaaggcagtcaagtgtgaccgaatcaactctttaccccaatccttatcatcagccttatatctcacggaagtactttgctacacggcttcggagctcccagctagaagggtcttgaagaatattgaatccagaatccaacctttgatgcacacaaatgaggtatgacttggtgccaaggtcaacaagcaacctctgggccacgcaagaactagaagacaggcctggaacccaggaccctcgatgctttccaccacatcccactgcctctgaccttggaaaatgaatgaaaagtcacagaaacaaagatccaaactacttgccatcagtctgcttggataaccttttcctttggtttcagttcatctgctattattgcttagacgtatctaaaaaaaggcctagtgccttctctgaacaaaagtacccctcaaggctaataactagaggtatattatgataatcttggttgtggagactgatattcaaaagcaacttcttatgaaaggaacaatacttagtccacatgggggaaagatatttttaaactctctgtaggactctatatttgcagataccttatcagaaagttgaaagcgatttgggatggggaattatctctaaatttatactcgagaatgtaaattacatacaaactaatgggactaaaactatttgatcttttaatatttaattaatggttccccgtggcgtttttatagtctgtgttctattgtgagcaacgagattttaataagcaggttcaggactttccattgtgtagcaagatgtcattgcttccatgacactaatttggctttcatactctctctctttccctcttctcttgctatagggttccctgtgtcttgctttcacattgggaacaaataaatatattagttgtattgttattgcctgtgtgggcttctttcgggtgtagaaaatagttatctcactgggcaaaaggtttcttgactccttccaaccctgaaatcctgtgaagattgtaaaaaagatgatttttttttttctttatgagagcagaggactaaccacaatgagatatgatatattcccttcattttcagggcttcggtgtaattaatatgtgaaatcggactgtccatgtggaacatatagacggtagaatcaaagtgaagttgaagagtcagcctggtgtcatagagaaagcactgaattcacaatcagaaggtttggctttgaat

SEQ ID NO: 463912 - DNA, 648 bp, Homo sapiens
atatctaaaaggtgtgattgtgtattaacagtggtctgtcagctgaagaatgtcaacaattgggagttttgaaggattccaggctgtgtctctgaagcaagagggagatgaccaaccctctgagactgaccacctatcgatggaggaagaggacccgatgccaagacagatttcaaggcagtcaagtgtgaccgaatcaactctttaccccaatccttatcatcagccttatatctcacggaagtactttgctacacggccgggggccattgagactgccatggaagacttgaaaggtcacgtagctgagacttctggagagaccattcaaggcttctggctcttgacaaaaacggatccattaagccagcaccaaggagaacatcttgacactttatggaatttcaaaaagtatgatatgatggcaataaagtggctcttcagcagaatgtacttgaggtgtctttgtctacaatggttaaagagacaggaggagacagcatcttccctccacacacgttagtgtgaagtggtggtgggcgattgttgttcttaattcttcttattcctcattgagagtagttgcctaaggtatttaaaaaccggtaattcttgttcttcatctttataaaagatacttaaaatatg

SEQ ID NO: 463913 - DNA, 1296 bp, Homo sapiens
ccgccccccgcaggccctagcgggcagacacactgaagtcgctagacatttgaggaacacatccggggaagaagacacaggtggctggtcatcgagagcccgctgggggaagagcacacagacaggcaccggcaggccattgaccagcgggacaaggtgggctcaatgtcatcacaagggtgcttaagagggaaagaggaagccatgagggtcagagtcaaaggaagacttgaagatactacactgcggactttaaagatgaaggaaggggcgaaaaccaagaatgtgggaagcctctagaagctagagaaggcaaggaaacaaattttccactagagcctccagaaggaacacagccctgctgacccactgtaatgtctgacctctagatgtgtaagggtagtaagactgaaagtctcagaaaggcactgttaaattcttattcctcaactatgcaactcaaaactggggtcctcagcagtgagcgaggggtgagagaagacactgtataaacatggcacatcctcctggaaagtcaactttactcaaagctttagaaacccagctcaaactagctgaagcagaaaagacattactgcgcctataagttgaaactttggagggataaatttcagaggtgtggctagatccaacggctctctggaaaactctgtgaaaaaaatgcttcctcaagtccagaaaccagaagctcaggaaattgttgcttggttcctcttgttagaggcagagattattcaacgacctacagggtagcgtttgaacattgttaccaggaatctttactttgccatcttccaagtctgttctcctcagtattggtttcatttacaagcaggccatctctgccctcatggcaatgatggtctttactccaggcttaagacccttactatctactatttccaaagcggagagagaacttcccacacctagtgaccttctgcccaccaatatggagactgtggcatctgtggtagtggcagatgaatcaacagaaccaggcctggctgcaggcaaacttgtcaaagaggtgctagaaaatatggaaaaaggaggatgtcagaggatggggaaggacaggagagaattgggcacgcaaaatctgaacagtgtcagtttgggatatgtcctctggaagactcctatgagctatcccagtaagattaaatggacaggtgacaagatggatctatatttagggagaaaaaatggagctagagatagaaatttgaaagttattaacttttgtactggataccatggaattagatgaaa

SEQ ID NO: 463914 - DNA, 1162 bp, Homo sapiens
cgtgaacttcgtttctcctctccctagcctgggcttatttctcactttagccttcggaatgctttcgaaactgtaatagagcatatcactgcatacaaatccattcttacttcaatcaaaaaagaatatgatgcctttattgagacaataaagaaagaccgaagaactacattttgtcttcatggaaaacttaaaggtttggcagcagagcctacagctttggtatattacaggaaaagaacaatccaacttgaagcaaaaatgaggattatcgaaagtaattcctcgaagattcaatctcaaatagatcacatcaagcagtgtagggcagagtatgacacaaaagaagtaaaatattgtactttctccaaagatccttcaaaacctattccaggcatgactcttcaagaatccatgaatctagatgctctcactaaatacatgaaacatcttgaagataaatatgcagaaattaaacaagctatgttgataaaatatgtgccagctcagaggaaggctgatttagatgaagaaatgattgtgttattaaaacggcgagatgtagctgaaaatctgaacaaaaaattgcagttttgtcatcaaagactgcagataatttcacaggcacttagttcatgggtaaaatctgatatgagcagcccatttcaagactttgtggagcaaattcagaaaaccaaatatttacaaggtgaccaaggcattgttgaagaactaatggaagatgatccacgcagggcaaaagaagctgaaattatgcttcactacattgaaaggcaaatattttaaaagctttaatttttcagaattatattttttcatagattctttttttttctctttttctttgtgtcattataatgcattttaaaatgtgatggctataggtttaatgagttaatctcacttggtgaatatgaaaaggcagcttgttatgcagcaaacagtcctagaagaattcttcgaaacattggtacaatgaatacatttaaggatagtctggcttcaagatcactaatctgcttgattaattctgctgctgagagactttgatgcattcttcagcatgtcaattgcatttttcaactccagaatttatgcctgtctctttctaattatttcaatctcttagttaaatttttcc

SEQ ID NO: 463915 - DNA, 116 bp, Homo sapiens
ttaagggaatccaggacagctttcctgaagctgaagaaagagtaaaagccaggtgaatcaaagtgatagtatgtatgtgttttgggggttgggggtaatataggaggatggtctgc

SEQ ID NO: 463916 - DNA, 1619 bp, Homo sapiens
tgtcccaagatgcagttccacctcccagattccctagttactatctctaagcactgaagtcggtgtttggagaaaaggactcaggtgaggactggagcctaacagatgagacagaatataaacaggaagtctctaaggcagtgtggtggaaggataataccatgatggaggaagtgcacagtattatgggagaacatagcagtggcatctgaccaattttaagggaatccaggacagctttcctgaagctgaagaaagagtaaaagccaggcttatcaaagttttggctttgttgcaagagcaggtcaagatttagctgttcttcagtgaacaagtgtgcagattgtcaaatatgtcagttcatcaaataagaaaacatgcagttctcccacctatcatttgtagaagtgacaaggaatttttggaaagtgtgcaaagatacataattacagaaactgaaagactgggctgtagtgaggaaggacctgctgatgaatattacatcatataccgaaatgtttttgataaggtaatagagcatatcactgcatacaaatccattcttacttcaatcaaaaaagaatatgatgcctttattgagacaataaagaaagaccgaagaactacattttgtcttcatggaaaacttaaaggtttggcagcagagcctacagctttggtatattacaggaaaagaacaatccaacttgaagcaaaaatgaggattatcgaaagtaattcctcgaagattcaatctcaaatagatcacatcaagcagtgtagggcagagtatgacacaaaagaagtaaaatattgtactttctccaaagatccttcaaaacctattccaggcatgactcttcaagaatccatgaatctagatgctctcactaaatacatgaaacatcttgaagataaatatgcagaaattaaacaagctatgttgataaaatatgtgccagctcagaggaaggctgatttagatgaagaaatgattgtgttattaaaacggcgagatgtagctgaaaatctgaacaaaaaattgcagttttgtcatcaaagactgcagataatttcacaggcacttagttcatgggtaaaatctgatatgagcagcccatttcaagactttgtggagcaaattcagaaaaccaaatatttacaaggtgaccaaggcattgttgaagaactaatggaagatgatccacgcagggcaaaagaagctgaaattatgcttcactacattgaaaggcaaatattttaaaagctttaatttttcagaattatattttttcatagattctttttttttctctttttctttgtgtcattataatgcattttaaaatgtgatggctataggtttaatgagttaatctcacttggtgaatatgaaaaggcagcttgttatgcagcaaacagtcctagaagaattcttcgaaacattggtacaatgaatacatttaaggatagtctggcttcaagatcactaatctgcttgattaattctgctgctgagagactttgatgcattcttcagcatgtcaattgcatttttcaactccagaatttatgcctgtctctttctaattatttcaatctcttagttaaatttttcc

SEQ ID NO: 463917 - DNA, 2269 bp, Homo sapiens
agctgctggacacggtccccggcgccgctccaaccagaccgcgaccgctaagcccctcctttcgagaaactctggggccgcccctggaagtggcggggcgaagggaccggaggagggaccggaggagcgaggcgcgcggcgcagcgatggagccggtcagcacgggcgcggaggccggcatggagggcgcgggaggtgacccgtaccggcgacctgcgcggcgcacgcagtggctgctgagcgccctggcgcaccactacgggctggaccgcggcgtggagaacgagatcgtggtgctggccaccggcctggaccagtacctgcaggaggtcttccaccacctggactgccgcggcgccggccgtctgccccgcgccgacttccgagcgctctgcgctgtgctggggctgcgcgcggagggggccaccacggccgggcaggcagcaggtgacgggaactccagagatgtgacccccggggatgcggccgctgagttggccacggacggggactcagataccgatgaagaggcgcgcctggcgctgcgcgccgagccgccggagctcaccttccgccagttccacgcgcgcctctgtggctacttcggcacccgtgcggggccccggctgccccgcggcgctctcagcgagcacatcgagacgcagatccgcctgcgccgtccgcgccgccgccgccgcccgccctgcgcgcctggccccgacagcggtcctgactgtgagcgcgttgcgcggctggaggaggagaatagcagcttgcgcgagttggtggaggacctgcgcgccgcgctgcagagcagtgatgcgcgctgcctagcactgcaggtcggactctggaagagccaggcgagcacccacgagatggggcacggcgggccggaggctgcggtgcgggagctgcgtcaggcgcagggcgccctggctgcggcggaggcccgcgctgggcggctgcgccgtggccaggccgaggtgcggcggcgcgcggaggaggcccggcaggtggtgctgcgcagcctgcaccgcgtgcgagagctggaggcgctggcgcaacaggtgcccggcttgcagcgctgggtgcggcggctggaggcggagctgcaacgctacagtgtggcacagcgacttagtggcaagggcaggactcacagcccagcctgatggccccaaccacaagctcaagttgggtttggtagtatgcacaaatccttctggattctcctaccccagaaacatcggccggacattttactggctggggagggactgtaggctacaattcacctctgcttttgcttttcaagtgccagaagctcagatgtccgtgactattgagctgaatcagccccgtcctctgcagttggcctagagggctgcattctagaggaattaccgggaggaaagggccccatgccccaaacagtagagccccatcacaccctcttaagtgacatcactctggaatgtctctaggtgctctgcagatgtgtctttggggagaaaacagagcaatgactgaactccccctgagaatgacagcttgaagccatttggttagaataaatgacccaacaaacacctttccagcatctcccagtgttcaaagcactttcacagatactgactcacgctgatcttctcatcttccctctaaggttggtattatgtctcctgggtgaatgccagaaagcctaatgcaaactgacctaggtgaaaaggaagttagttcttagaactgaaaagtgtaggcatgtccagcttcagacatggctggattcagttggctctgatttcagacattcttcccataaggtagcaagacagctaccatcatcatcaggattagctcctatcctcccaatcacccccatcagaaacactttctctttcccagtagttccaacataggccacacccatcctggaaccagtcactggtaccagggaaatggagcatgctgactggccagcctagggtcattcgcacccaccacccagcccagccccagcaccactcctggacagctgtcctagcctcctgactggtgtcccagctccatcagaaccacggaccacacagcatcagaataaactgagcccaggcggtgtaatgggcttttgatgcgtccccctggctttgatgtgatgccttgaccgctcccttggttacagcaagttaaccggtcaaacactaagctacagttgctgtacaggtattctgcatatggattaaagtctgtcatcagttgactttag

SEQ ID NO: 463918 - DNA, 1675 bp, Homo sapiens
aggtaaagccttaaatctttccccgttcatacatttcatacctttatttacaaagttgagagagttacatctactgaacaattaagtgctcctcatcacgaaagaaaaggaaagaatgcggactgaatcctgtgccctgaaagtcgaatcagcatatacctgctgtttctatgtcaccaagaggctgattccaggtgggagactctggaagatgaagcgattggatcttgaacccagagcaccagcaaaaggtcctgagttccataacaagctttactccagagtcgctggtgttggggaaatatttgtagtcatttggtccaatgcagagacgatgaccactaggggtcagactttttacattactcctcttgaaagaaggaacccaagtcttggattttttaactggggaaaaactagagaggtcgtctatcctgtcaatggctgggccaggattaaaattgggttttacataactccaaagtccacattgttctcactaagaacacttcttgctgtctcttacttatagatccacccaaatttttaatgattttttttttactatataagttcactgatgaattttccatctgaaactttatataaagcaacttaacagatgctatctttataacaccattataataaaggctcttctatgtaccaatgttacagcaaaccttgaaagaagtggaagagggagaggaggaagacaagaaagaagaaagaggagggggaggaaaaagagggagagaagcagaggaggggagagacagcagagcccttcactgttaatgacccagttagcagctcttggctgcgtttccgacattttgcagacatcaagccccgcgtctctgccaagtacattctgttccctggagcacatccagtgcatctcagattactatctcgagcctgagctgcagcctgcgcgctaattatagacgtgaatggaaagcggccgcttctgaatgatcgcgttgctcgagctgccgttggaagcttagaagcaggtgctaccgtgctagatacaaagcgatctatttaaaagccctctgtcacgcacgcacacttactgacgaatcctctggctctctcctaccaccgcccggtggcggattccggaattggttcaaaaggccttgatcccgaacacccaggacagagacagagtacttttcctacctctttcgcctgcatccttagaaaactcccgtggatgagaagatccccaggcctttacaagctgttgttttacaaaaggagaaactgaggcaggaagaggcggtggatgtgcaccagagcacgtggtgcgtcggtgcatagctgagggcacatggaacattcaccaagataaaccatatgctggaacataaaatttatggatgtcacccatgaagcagagtccttcagaccctcaatcaaaaacaagtctcattttacattaaattggaggactatctggagtctctgaccaccgtgtgacagaaaagagagcagaattgttgcatgatgggtaacactcatcagtaatcgctgtttgccaagccatctgggaggagaccaaagagctataaaataagttcaggcacggtggctcatgcctgtaatcccagcactttgggaggccgaggtgggtgaatcacctgaggtcaggagttcgagacca

SEQ ID NO: 463919 - DNA, 1465 bp, Homo sapiens
aggtaaagccttaaatctttccccgttcatacatttcatacctttatttacaaagttgagagagttacatctactgaacaattaagtgctcctcatcacgaaagaaaaggaaagaatgcggactgaatcctgtgccctgaaagtcgaatcagcatatacctgctgtttctatgtcaccaagaggctgattccaggtgggagactctggaagatgaagcgattggatcttgaacccagagcaccagcaaaaggtcctgagttccataacaagctttactccagagtcgctggtgttggggaaatatttgtagtcatttggtccaatgcagagacgatgaccactaggggtcagactttttacattactcctcttgaaagaaggaacccaagtcttggattttttaactggggaaaaactagagaggtcgtctatcctgtcaatggctgggccaggattaaaattgggttttacataactccaaagtccacattgttctcactaagaacacttcttgctgtctcttacttatagatccacccaaatttttaatgattttttttttactatataagttcactgatgaattttccatctgaaactttatataaagcaacttaacagatgctatctttataacaccattataataaaggctcttctatgtaccaatgttacagcaaaccttgaaagaagtggaagagggagaggaggaagacaagaaagaagaaagaggagggggaggaaaaagagggagagaagcagaggaggggagagacagcagagcccttcactgttaatgacccagttagcagctcttggctgcgtttccgacattttgcagacatcaagccccgcgtctctgccaagtacattctgttccctggagcacatccagtgcatctcagattactatctcgagcctgagctgcagcctgcgcgctaattatagacgtgaatggaaagcggccgcttctgaatgatcgcgttgctcgagctgccgttggaagcttagaagcaggtgctaccgtgctagatacaaagcgatctatttaaaagccctctgtcacgcacgcacacttactgacgaatcctctggctctctcctaccaccgcccggtggcggattccggaattggttcaaaaggccttgatcccgaacacccaggacagagacagagtacttttcctacctctttcgcctgcatccttagaaaactcccgtggatgagaagatccccaggcctttacaagctgttgttttacaaaaggagaaactgaggcaggaagaggcggtggatgtgcaccagagcacgtggtgcgtcggtgcatagctgaggtaaacttctggtctcctgacagcctctccatttgccttaccgggttggaacctgaagcaagtctcactttaacgccgttaatttccaggcatggatctttagccaatgatgagcatcctcctccttt

SEQ ID NO: 463920 - DNA, 2858 bp, Homo sapiens
ggaaaataggagagaccttcacatgaacaagaagaggttgttcctcccgtatcgaagcccatctcaccaagtctccctgtgcacctcgcccctcatctgggctgcatgtgctcacaggcgctccgagtttcatcccaacttgtgtctgcaggggagcccacttcgacctcactcagtggtggagctggccaagttcgggggcagggatctgcgggtattgccttcattctttcacatgactgccagcatccctttgtcccagaccacgtgagcgacagcaccgtctctgcccggatctcagacaacagcctggcaccagtggctgacttcagttatcctgcagaatcctcctcctgcctggacaactctgcagctaagcacaagctccaggtcaagccccgcaaccagcggtcgagtaagatgaggcggctctcatcgcgcgctcagtctgaatccctgagcgacctgacgtgcaccccagaggaggaggaaaacgaggagaagccacttttggaagtcagcccagaagagcgccccagctctgggcagcaggacgtggcgccagacagaggccctgagcctgggccaccggcgcccttgccgccacccggaggggcccgtgccagacgcgcccgcctgcagcactcctccgcgctcacggccagcgtggaggaggggggcgtccccggggaggacccctcaagccgcccggccaccccggagctcgccgagcccgagtcggcccccactctccgcgtggagcccccgtccccgccggagggccccccgaatcccggtcccgacggcggaaagcaggatggggaggcgccccccgcaggcccgtgtgccccggccacggacaaggcggaggaggtggtctgtgctcccgaagacgtcgcgagcccgtttcccaccgccatccctgagggggacacgactccccccgagactgaccccgccgccacctcagaggcgccctctgctcgcgacgggccagaacgcagtgtcccgaaggaagcggagccgacgccgcccgtgctcccggatgaggagaaggggcccccagggccggcgcctgagcccgagagagaagcggagacggagcccgagagaggagcggggaccgagcccgagagaattgggaccgagccctccacggcgcccgccccgagcccgccggcgcccaagagctgcctgaaacaccggcccgcggccgccagcgagggccccgccgcgtccccgccgcttgccgctgcggagtctcccccggtggagcccggccccggttccctcgacgcagaggccgccgccccggagcgccccaaggccgagcgagccgaggcgccaccggcgggcgccgagagggcggcgccagagcggaaggcggagaggggcggtgccgagctgcgaggcgcgaagaagttctcggtgtcctcgtgccgagcgcggcctcgtccgggcgtctcccgcccgctggaacgggccagcggccgcctgcccctcgcgaggagcggcccggtctggaggagcgaggcggctcttgacgacctccagggtctccccgagccccagcacgcgaaacctggccctcggaagctggcggagcgcggccctcaggactcgggggacagggcggccagcccggccgggccgcgcaagagccctcaggaggcggccgccgcgcccggcacgagagagccctgcccagccgcccaggagccggccccgagtgaggacagaaaccccttccccgtcaagctccggtccacctccctctcgctcaaatacagggatggcgcctctcaggaggtgaagggtgtgaagaggtacagtgccgaggtccggttagaaaggtcgctgaccgtgctcccgaaggaggagaagtgtcccctcgggacggcccccgcccttcgaggcaccagggcccccagcgaccaaggaaaggggaaggcccggccccccgagccgctcagctccaagccgcccctgccccggaagccgcttctgcagagcttcacgctcccgcaccagcccgcgccccccgacgccggcccgggagagcgggaacccaggaaggagcccaggacggcggagaaaaggccgctgcgcaggggagctgctgcacagaatgctgtatgagaatgggattctccttgtcccagttttggttaaggcaccaatgcagagatgtaagataccagagagcatgtttgcaggatctgtggagtcaacaaccactcaccacccccaccctcagaatatacggacggtggggaggaataaagcggatttgcaaaacactttctgtggagagcacactgcagtcctgtgagccaccagcgcagaggaaacttccctcatgcagagtctgcaagggtggcttccatgggacttcttagaagctgaacagatgtgccctgcagttgggagacatgaaggactgctgctggactcagaccacctgtgggcatggggcagacaggaccaccacatgacccacttgtgctcccagagccccacatggggagccagccaagaggacaaggggacaatgagaagcggtcacaaccagagtcccagtggtggctgggaatcccccagtgtcagtttcaagtgtctgccaggcccaggcaggacaaaaccttgtaaggctccaaagagtcctgctgatctccctactctccttcttccccagctctcagccctcgggaaaggagtctccgccccaactcagacaccctgcattcaggagtcatagcctcacttcgcccagaggctacacattttaattactgaattaaaactgattataacaaaagtgaccatggtgactgctgggacctgagaaggactgagaa

SEQ ID NO: 463921 - DNA, 3278 bp, Homo sapiens
ggaaaataggagagaccttcacatgaacaagaagaggttgttcctcccgtatcgaagcccatctcaccaagtctccctgtgcacctcgcccctcatctgggctgcatgtgctcacaggcgctccgagtttcatcccaacttgtgtctgcaggggagcccacttcgacctcactcagtggtggagctggccaagttcgggggcagggatctgcgggtattgccttcattctttcacatgactgccagcatccctttgtcccagaccacgtgagcgacagcaccgtctctgcccggatctcagacaacagcctggcaccagtggctgacttcagttatcctgcagaatcctcctcctgcctggacaactctgcagctaagcacaagctccaggtcaagccccgcaaccagcggtcgagtaagatgaggcggctctcatcgcgcgctcagtctgaatccctgagcgacctgacgtgcaccccagaggaggaggaaaacgaggagaagccacttttggaagtcagcccagaagagcgccccagctctgggcagcaggacgtggcgccagacagaggccctgagcctgggccaccggcgcccttgccgccacccggaggggcccgtgccagacgcgcccgcctgcagcactcctccgcgctcacggccagcgtggaggaggggggcgtccccggggaggacccctcaagccgcccggccaccccggagctcgccgagcccgagtcggcccccactctccgcgtggagcccccgtccccgccggagggccccccgaatcccggtcccgacggcggaaagcaggatggggaggcgccccccgcaggcccgtgtgccccggccacggacaaggcggaggaggtggtctgtgctcccgaagacgtcgcgagcccgtttcccaccgccatccctgagggggacacgactccccccgagactgaccccgccgccacctcagaggcgccctctgctcgcgacgggccagaacgcagtgtcccgaaggaagcggagccgacgccgcccgtgctcccggatgaggagaaggggcccccagggccggcgcctgagcccgagagagaagcggagacggagcccgagagaggagcggggaccgagcccgagagaattgggaccgagccctccacggcgcccgccccgagcccgccggcgcccaagagctgcctgaaacaccggcccgcggccgccagcgagggccccgccgcgtccccgccgcttgccgctgcggagtctcccccggtggagcccggccccggttccctcgacgcagaggccgccgccccggagcgccccaaggccgagcgagccgaggcgccaccggcgggcgccgagagggcggcgccagagcggaaggcggagaggggcggtgccgagctgcgaggcgcgaagaagttctcggtgtcctcgtgccgagcgcggcctcgtccgggcgtctcccgcccgctggaacgggccagcggccgcctgcccctcgcgaggagcggcccggtctggaggagcgaggcggctcttgacgacctccagggtctccccgagccccagcacgcgaaacctggccctcggaagctggcggagcgcggccctcaggactcgggggacagggcggccagcccggccgggccgcgcaagagccctcaggaggcggccgccgcgcccggcacgagagagccctgcccagccgcccaggagccggccccgagtgaggacagaaaccccttccccgtcaagctccggtccacctccctctcgctcaaatacagggatggcgcctctcaggaggtgaagggtgtgaagaggtacagtgccgaggtccggttagaaaggtcgctgaccgtgctcccgaaggaggagaagtgtcccctcgggacggcccccgcccttcgaggcaccagggcccccagcgaccaaggaaaggggaaggcccggccccccgagccgctcagctccaagccgcccctgccccggaagccgcttctgcagagcttcacgctcccgcaccagcccgcgccccccgacgccggcccgggagagcgggaacccaggaaggagcccaggacggcggagaaaaggccgctgcgcaggggagctgaaaagagtctgccgcctgcagcaacagggcctggagctgatgggcagcctgcgccaccctggatcaccgtcactcggcagaagcggagggggaccttggaccagccacccaaccaggaagacaagcctggggcacggaccctgaagtctgaaccaggaaagcaagccaaggtgcccgagagaggccaggagcctgtgaagcaagctgactttgttcgcagcaagtctttcctgataacccctgtgaagcccgctgtggaccggaagcagggggcaaagctcaacttcaaggaggggctgcaaagaggaatctcattgtcccatcagaacttggctcagtctgcagtgatgatggagaaggaactgcatcagctgaagagagccagttatgccagtacagatcagccatcctggatggaacttgccagaaagaaatctcaagcttggagtgacatgccccagattataaaataggtgggcagtgtgctgataaagcatgtccactaccctgacaagccacttagttaaaaactgccagtgtattgtggcaaacaaactgtgaaacttaaagattgattttatcatcaagttatgacgaacttggggaagaggaaggaaccaggcaaaacaaagaggataaacacacagccatactcctgggccagagggcccagaaacaagaacaacattgaaaaagtccaggaaccagttcctgtgcccaaaggtacgaatgtgtcttttcgaattcccttgataaagaagcctcagacaaggaagaaaatagaaatgaaattggacacataaataggacacccagcaaaggccagaagagaagcccttctaggagaagggacatctgtgcttccagctgagatcagcccatgtctctggtcgctctcttgcctgtggatcctgtcttctttcatgtttactacgaggcatgacattcatggcaaaacagggatgccgtttccaagagcagctataaaacaatctgttttcctaaagacagccactctgagaaggagatgaaggaacacggcagggttcatcaattcatagactgtttccaaaaataatttttaaacttttccactaggcatctgtgtctttaaccactgcacaatgcattgcctgtttaataaaaggtttcaaacatg

SEQ ID NO: 463922 - DNA, 2253 bp, Homo sapiens
ggaaaataggagagaccttcacatgaacaagaagaggttgttcctcccgtatcgaagcccatctcaccaagtctccctgtgcacctcgcccctcatctgggctgcatgtgctcacaggcgctccgagtttcatcccaacttgtgtctgcaggggagcccacttcgacctcactcagtggtggagctggccaagttcgggggcagggatctgcgggtattgccttcattctttcacatgactgccagcatccctttgtcccagaccacgtgagcgacagcaccgtctctgcccggatctcagacaacagcctggcaccagtggctgacttcagttatcctgcagaatcctcctcctgcctggacaactctgcagctaagcacaagctccaggtcaagccccgcaaccagcggtcgagtaagatgaggcggctctcatcgcgcgctcagtctgaatccctgagcgacctgacgtgcaccccagaggaggaggaaaacgaggagaagccacttttggaagtcagcccagaagagcgccccagctctgggcagcaggacgtggcgccagacagaggccctgagcctgggccaccggcgcccttgccgccacccggaggggcccgtgccagacgcgcccgcctgcagcactcctccgcgctcacggccagcgtggaggaggggggcgtccccggggaggacccctcaagccgcccggccaccccggagctcgccgagcccgagtcggcccccactctccgcgtggagcccccgtccccgccggagggccccccgaatcccggtcccgacggcggaaagcaggatggggaggcgccccccgcaggcccgtgtgccccggccacggacaaggcggaggaggtggtctgtgctcccgaagacgtcgcgagcccgtttcccaccgccatccctgagggggacacgactccccccgagactgaccccgccgccacctcagaggcgccctctgctcgcgacgggccagaacgcagtgtcccgaaggaagcggagccgacgccgcccgtgctcccggatgaggagaaggggcccccagggccggcgcctgagcccgagagagaagcggagacggagcccgagagaggagcggggaccgagcccgagagaattgggaccgagccctccacggcgcccgccccgagcccgccggcgcccaagagctgcctgaaacaccggcccgcggccgccagcgagggccccgccgcgtccccgccgcttgccgctgcggagtctcccccggtggagcccggccccggttccctcgacgcagaggccgccgccccggagcgccccaaggccgagcgagccgaggcgccaccggcgggcgccgagagggcggcgccagagcggaaggcggagaggggcggtgccgagctgcgaggcgcgaagaagttctcggtgtcctcgtgccgagcgcggcctcgtccgggcgtctcccgcccgctggaacgggccagcggccgcctgcccctcgcgaggagcggcccggtctggaggagcgaggcggctcttgacgacctccagggtctccccgagccccagcacgcgaaacctggccctcggaagctggcggagcgcggccctcaggactcgggggacagggcggccagcccggccgggccgcgcaagagccctcaggaggcggccgccgcgcccggcacgagagagccctgcccagccgcccaggagccggccccgagtgaggacagaaaccccttccccgtcaagctccggtccacctccctctcgctcaaatacagggatggcgcctctcaggaggtgaagggtgtgaagaggtacagtgccgaggtccggttagaaaggtcgctgaccgtgctcccgaaggaggagaagtgtcccctcgggacggcccccgcccttcgaggcaccagggcccccagcgaccaaggaaaggggaaggcccggccccccgagccgctcagctccaagccgcccctgccccggaagccgcttctgcagagcttcacgctcccgcaccagcccgcgccccccgacgccggcccgggagagcgggaacccaggaaggagcccaggacggcggagaaaaggccgctgcgcaggggagctggtaagagcccgccgagggtgcgggaagggcagggcctggggagatccacatccacgggcacatcttgctggacactcgccaaatgctcctggtacaaactttgttgcaggggaattggaaggagtcagaattcc

SEQ ID NO: 463923 - DNA, 767 bp, Homo sapiens
gaacccaccaggaggaatgaacaactccagacgtgccgccttaagagctgtaacactcaccacgaaggtctgcagcttcactcctgagccagtgagaccacgaacccaccagaaggaagaaactccaaacacatccgaacatcagaaagaacaaactccggacatgccacctttaagaaccgtaacactcactgcgagggtctgcggcttcgttcttgaagtcagcaaatactgtggtctggggttgcaaatgaaccattcaattgaatcaaaaggcaatgaaatcacattgctgttcatgagtggaatccatgtttctggacgcggatttttggcctcatactctgttatagataaacaaggtacacaaacggattcatcaagaaaacaactcgactgcattccagcctgggcaacagagcaagactctgagaaagaaagaggaagaaagaaagaatgagagagagagagaaggaaagaaggaaagaaagaaggaaggaaggaaggaaggaaggaagaaagaaaggaaagaaagaaagaaagaaagaaagaaggaaggaaggaaggaaagaaagaaaaagaaagaaagaaagaagggagcacagggttgggggtaaggtcacagatcaacaggatcccaaggctccctctccctctccctctccctctcccgacggtctccctctcatgcggagccgaagctggactgtactgctgccatctcggctcactgcaacctccctgcctgatactcctgcctcagtctg

SEQ ID NO: 463924 - DNA, 5250 bp, Homo sapiens
accccagtcattgagggtggccgggacaatccagcaaatacatgtatcagcctatgacccctgtggaacagcttccaagcactgagattcctgccaggcctcgggaacccacaaacaccattcagatctcagtctcgctcaccgaacactttttgaaatttgcatctgtcttccagcctccccttccccctgactcaccgaggtactgtatgatttcagacctttttattgacaactatcaggttaaatgtattaatgggaagatgtgttatgtgcagaagcagccggcaccacattcccacagaatgagccctgaggaggtctctgcacacgatgccttaatttcaaaagagagcaatacaccaaaaatagatcactgctcttctccctcaagttctgaggactctgggatcaatgcgattggggctcactatgtggaatcgtgtgacgaggacacagaagaaggagcagaactgagttcagaggaagattacagtccagagagcagctgggaaccggatgagtgcacccttctctccccctcgcagtctgacctggaagtgattgaaacgatagaaacgactgtgtgagagtccagacaggaagccacagcctcggacccacgccgagcttttgtacctttgtctggtggatccttttttccaatgctgttgatattttctacccaccccgccccgctccaaccaacaaccgtagcagttcagtggtatgctgattagcttctctccgtcttacaactaagacattctttttattataaacagttttcttttgtatcctgacttactttctatgtagcatctggtgtcatgaattgtgaccccgccttaatttcactgggagatttgaaggcggtgaagtgatggtcgcagagaatcttggatcagattgaggaggtaccgaaagggaaggagccggtgttttctcggtagccagtccttcacagagactcttgccattccctttggcatgttcacaggcactcccgtcctgtcctgcttgtcctacgcaagtagcactccctactgagtgtgcactggtagatgccgtttcttcccttccccttctccccacacctgcactgggtctggatcagagctgcctcggcttacttctgggaggtcactggaggccagctcagcccatggtttgtggccagtgtctgtacaaggctccgtgactggggctgagctaaacattcacatgagaagagatgacctcatctgtctcatgctcaatccagccttagctgagcacctgtcccctgcagggggctgtggggacacagcatgaataagacctgattcccaccatgaaggggcccacagtcctatatatgacacattcaactcatggcacccaaaaagctctgggaacccaggggaaggatgaggtttacttggctggggctagctggggaatgtgtttcagcatttgagctggcttcttggtgggttcccaacatttttctgcttttaattgttcttcaagtctgggaaaaactcttaggaagttatataggtatcacatttaggtggcagccacatctgacatcttaaggaaaaaaaataaattaatagttttagttagcatggaaatgctacagacagaagccctttagggattaggactgaatctaataggtttgattaattctgcttcatttggttgtatgaagcattcgtatggtttaagtgaggaatggattagaattcagtgtgatgcatggatttttatgcagctgcaaaagcagttgaaatagtttgctgctaagtcaggagaaaatatccagtgtaatagccattcactttcccacacagtctgtctgttgtatgtgttctctcccctcacatgcacaaaatagtgactaattctttcttatttagctctcttcagaattctacttctactctccatttataccaggcccacattcccaccactaagccaatggagtcaaccagatttctaaagccatggatatacgtggtcacggggccacatttctgcagctggctcagtggcaggcttgggccgtctctcagtaccatctaagacttctgtctaggttcctgtttttttagactcctggaactgccattctggattagacactaattttagtgatgaactagttgttaaatggaatttttggatttaataatagttgataatcaccttatgtatttgcacaatctctttataattaaaaactcgctaagcttcacttgctactatctactatatagaattagagacattccattggattctaagcatcagacactcctggatctcaaaatgaccttttctaaataagcacaagatttatttttgtcctagcactgttgataacactctgaaatatgttattgaactggaattgtttctttatgcttgcattccaaaaccaactgaaacagattgtagtttcactttaaattctaggcctgttctatattatgtgaaggaattctctgtaacgctgatactatgttgctaatttgtgtacttacagacactttagaaaatgtttagactgcaacatgcactataacattgaactcagtcacatgaagtggttaacacttgcacactgactgacagatatgaaagctgtatactttggacccagtaatatgctcattggagcaagggttgggctgtgtggatggataaactgctttcttgggtttacatggaaacctggtaccactcctacttttggaaagttggtataaaagctattaggtagaagcttaattccactaaatgtagaatttagttttcttctctaaccaagattttagaagtttcaagtttcaaatatgcttataacttttccaagaaatgatgattacagtgcttttgtggttacaactgtttggtatattaaaaaataagggtttactatcacatctaggtcttttttactatgtcatttttaagatatgaaataagaatctgaggacagccctgaagaacagtcctttcctgggaggggaagacttgtaattcaagaggaggtgtgaaccagaactgaggaggccagttatattttaggcttttcagtagtacgattttgtcctctcccactgaggaggagggaagaagggggaagccagtgggagttccacacacgtggtcagtgctgttgaagcagtgttctcttagtagcctgaacacttctcaaagcgacttatcactagcggctttaatattgagcttctatatcgttgtgtccacctcactttttaaggctgttcatacctggcaatattcacttactctgctatttttaaaaactattttaaagttttaagcacaatgttgactcttctgtaatttcctaaaattatattgttttcctacagacagctcaactttccttgatatgtaacactttaggaaaataactgccttgtaaaataaacgtgattttttttttcttttataccagaacaaatctgctgttttggagtgtacccaaccccaaaaccaaaactcacgtttgcaaagtgtgaaacatttatatatcaggtctttcctacgtgctaggaaatagcgtatggccattaccccattaaacctttacaagacctcaatgaggtgcagataaactgtactgtccgcagtatctactcagagtcaccactcatgataactcccagaactctggctacattgggtttatagcaaataaaacttgataccccccccccaccaccaccaaatagcatttatttcacacgcagttacagcctttctgttcggcttacacgtgtcatgtggggcagtgttggctgcagttctaactgaagatcaggcatcgagggaggctgctgcccggcagagcttgggggggtcgcttggtcaccaagactcaggggccaggcctcagcgcggcaagtccatactcagaaaagaacagcttcaagggttggagtctattgaacaaccttcctaggaactgctaaataaagtcattatcagtaataaaatccttgttaatattaattatagttcaatggctaccttaagctttctatgcataatctccacagcaaccctgtgagggagattaaagcagccccatttcacagatcaggaaaagagctcaagaagtccacatctttacccagtgtggcacagctcgtacatgagtggcagtcagggtttgaacccggtcactttggctctagagtccgcactcttggcccattgtctgcattactccatccccctaacccagcagataccttcccacagactagtgcctcgtctacctcagtgcacctggtcccaacacagtggaggagaaacactgacaggcttccctctttgtccccttctctgtcctccatacagtgcccccccaccccgcaccctataccatgtctctgcaaatatctctatgctctgatgaggccattgcttcttccatgtttaatcacctcttgactagcattcaagactagctctgcctttcctaaagctaactgatcttttaaagtgattcctgcagacagcgcatctcatctgcgtgtgcactctactgttttaactctctacctaattgtattgccaagtcctagaaggcatctcattgtagcctcttacaaatgctgactgcacacacttttattctgcaataaactttaatttagcatctcatcctcattacaattcagtcactgggaattggtaatgcccttaacccttactgtcccaccctagttctatgctgaatgaagggagtaagaaggatctctggactcagcctccctgcggtagggtcaggaaggggcagttagaggtcagatggaattcttcaggaatcagggagatacgggaaattgatggaaataaaaaggcaaaaggaatgtgccaagattaatagtgtttgttttaaattttctacttttctgaaatgaagatacaattacttttacaatcagaaacgacccaataaatgggtgtgcctatatttgctctgtgaattttcgcattgcaattcacacaggcagtttctaaacatgagggctgaaaatgtagtcctttgtttactgcacagagtcctggttgaggcagatatgagagggtcgtggccgggtaatcagacagtcaggatctacacagtcgcctgaagtagactggtctgggaggcgagtccaaagtggatgctactgaggacatgcaatagttgagggaagcaattggtatcaaagg

SEQ ID NO: 463925 - DNA, 2838 bp, Homo sapiens
cactctgtacatctttctgaactcaatgaattatacactattgctgcttaattgctttcagaaatggacccctgcacaggtgggaatggatgtgttcacatatgtcagagtgagaatggcacggccaggtgtgcctgtcatgcagggtaccagctgcctgaagataaaaacatttgtgaagatataaatgagtgtgctgaaggtctttcttactgtggccactgctgtgtaaactctatgggatctttcacttgtgcctgccaaactggctttgagctgggagctgatagaaaacaatgttacagtaattggcaacagtcacagcccagactctatctttctctcagtgacttcttccttctttttccagttcacgactatactttaccagatcttgacgaatgtgagaatggagaagcctgctgtgcccagctctgcatcaactatttaggaggctacaaatgcagatgtcaggaaggctttcagatcacttccaatggttgtgaatgtgatggtaaattcctgagatttaacaattgtgaagaaggctacagaattggaaatgacagaaaaacttacccctctttagatgatgatgagctagaggaagaagaagaggaatgagaagttgtgaggtttccaggtcttctattcaagagcccacctcaacagcttcattatgttgctacttttctgcctcccacctacaaagatgaagaagatgaggaggaagaggaaaaagatattcatagagaactgactgctttgcacaattttgtctgtttagatcacatctttggacacaattgcagcttgagctgcaaggactgcatgaatggaggaaagtgccaggaaggaaagagtgaatgctcctgcccagcaggttgccgtgtcattctttgtaatgaaaactgtctcgaggatgcctacggagctggctgcacttcagaatgtcagtgtgtggaggagaataccctggaatgcagtgccaaaaatggtagttgcacctgcaaatctggttaccaaggcaacagatgccagaaagatggcctctggggaccagagggctggttctcctctgcaccctgtgaaaatggaggtcagtgcaacaaaaaaactggaaattgtgactgcactcctgattacacaagaaaatcctgtaccatattgagatgcatttcccttaccaatctggctctcagcaggcggtccagcccgatgaagtatcagcaaaatgtcagctcccacagagaagtgcgacagaggcaacagtgcagcagtgacaggcctttcaaaaagctattgtgcaaattcagttttaaaatagggatgtagttgaggactgatgggtatttcattaccaatgcgttcatctcccccatcgtccaagagaatgagagggggtcatggtgcagctgatataaagccattaagttgagtagcggttgatttggtctgtagaagatttgtcttcctatctgtatttttgaaaagttaatattcaaattagctgtcatttttagtacatacctgctaaaggggggccaagaattgttctgttttctacttgatcaccttccagtgtctcaattagatcattaaaaacaaagttaatcatgtcattactttataaacctcattgagctactgatactgttcataatgaagttcgtagcactaaagacccatcatcaacctgtctctagccagcttttgaccatgcttacgtataccctacatattttagtcattcccccaacatcatgtacatttaaaacatggtgccattgttcattgctctttcctgtaatacatgttttcttcttccatttttattccctcaagcatttattcctcaagcatttttattttccagtatatgtaaacaaaatactagagcccttctttccatagcagcaccaatcatattgtattataattagttgcctgctattaagactgcttatcattaatttttgtacaccccacttttcaatatacaaggggtactcaataaagatttgctagattcaattaaagaacatttttgacaacttaaaattccatcgaaataatttactgagtaaaaaaaaaaaaaacttgcaaaacacagcgtttatgatactgaaaaatacccagtaaccaatactcgttaaactggattgaattactcagccttttaatatagcaagaggaaatcaagaaagctgtagcaccacagctttattggtctgtactccatttctgaaaacacttttcatgagaagatttttcaatggattagaagactaacatcagacaatgatgattccttagcttcatctcaagagtccagattatttccttctatactcactttcaatgtatgcaatcattccttttaaatacaacagagttaccttagaaaagtaaacaaatgtaggctggacgccgtggctcacacctgtaatcccagcactttgggaagccgaggcgggaggatcacttgaggtcgggagttcaagaccagcctggccaaccccatctctactgaaaatacaaaaattagcctggagtggtggcacacgcctgtaatcccagctactcaggaggctgaggcaggagaatcacttgaacccgggaggcagaggttgcagtgagctgagattgcgccattgcactccagcctgggcgacaaaaaaaaaaaaaaagaaaaagaaaagtgaacaaatatctctggcttttagtgtctgtatataaaaggaaagagttcgactatataattatataatatataattcaatgtatagagaataacattatgtagtaaatatagacatgctgtatagtgatgtatta

SEQ ID NO: 463926 - DNA, 922 bp, Homo sapiens
caccccacactggtagacgccaggcttctcagactccacccagttctcctaatccaacaggagtgcatgttcccgattacctcccatgaccactggctctcacggtggctgggaaccctggcggggaggcctgcgcctcctcaagctccagtccctctggatggggcaccaagaggcaccctgagaactcagaggacccagaggctcccctcaagcaaattccctgctgaccctggacaccccttgaaggagggggcaagaggctgccacaaggctcatcttataactcccagcaaggactcccagcaaacaagttcagcttgggatctgcccaccaccaagcctggctgggaggtgggggggagcgaggggcggtggagaggcagagtccctgaacagggaaaagacaatcagttgttcccctttctggtgtcagaggcaaagaagcctgaagggctggtggtggtgctggctctgggtttattgactctgtgatcctgtccagctgtcctacagggagttccagagctctcccaaagtgcatgaggaactgcacaagtaggactggggcacaataccagaagctatttgtctcctagaacctggcaccccctccacttaccttacaggagacccacatcactcagttcccaggacacctggtgggagagtctggtgagatttggaggcagacttcctctactcacaacttgtttgaaaatggacataaagagaagaacagacactccatcgccccttcagggcctcctttgtgtcacaaaacctatcccctcctagggcacccttgacattcccctaggtgggcctacacattgttcagaacctgtcccctgtaccaaaataaatataaatgagtttgtttctttaaaagaaatattacagctttaaacttttcccagcc

SEQ ID NO: 463927 - DNA, 888 bp, Homo sapiens
caccccacactggtagacgccaggcttctcagactccacccagttctcctaatccaacaggagtgcatgttcccgattacctcccatgaccactggctctcacggtggctgggaaccctggcggggaggcctgcgcctcctcaagctccagtccctctggatggggcaccaagaggcaccctgagaactcagaggacccagaggctcccctcaagcaaattccctgctgaccctggacaccccttgaaggagggggcaagaggctgccacaaggctcatcttataactcccagcaaggactcccagcaaacaagttcagcttgggatctgcccaccaccaagcctggctgggaggtgggggggagcgaggggcggtggagaggcagagtccctgaacagggaaaagacaatcagttgttcccctttctggtgtcagaggcaaagaagcctgaagggctggtggtggtgctggctctgggtttattgactctgtgatcctgtccagctgtcctacagggagttccagagctctcccaaagtgcatgaggaactgcacaagtaggactggggcacaataccagaagctatttgtctcctagaacctggcaccccctccacttaccttacaggagacccacatcactcagttcccaggacacctggtgggagagtctggtgagatttggaggcagacttcctctactcacaacttgtttgaaaatggacataaagagaagaacagacactccatcgccccttcagggcctcctttgtgtcacaaaacctatcccctcctagggcacccttgacattcccctaggtgggcctacacattgttcagaacctgtcccctgtaccaaaataaatataaatgagtttgtttcttta

SEQ ID NO: 463928 - DNA, 1181 bp, Homo sapiens
gccgtcatctccactgaaggaggcgagactccagcacacagcgaatgtcctcgccattctattcaaagagaagagtcatcctggaacagccgtgctggaactctcagaactcagtgtgcttgagggaatccaggctggagtgcagaggcatgatcttggctcatggcaacctccacctcctgggttcaagcaattctcctgcctcagcctcctgagtagctgggactatgagatttttttttaattgaaagaagcaaggacatcagctgagaaggaggatggagaaggaggtgacagaatctggaagaataggaggtggctgatgcagtcatttattagagaccctcttgaagaccccaaggagatacagaagtgttcaatacacatttgagactagaggacatgctaatgcaaatgttgagtttgagaggactcaggagaaggatttggagagttgagaaagatcagacatcagattagatgccatacaatgaaaagagtccacggccacacagggatgagtgtccagctgttgttgccaagagcattcaccagtagacctgcatggaaatctctgcttcgggtctccttcccattctatggcaattttaacagaagaggtcctaagaggcaaaccgttaaaatggaattttggaactggatcatcaaccagccacctggcaatgaggacatcatccctcgtagtaagtggagtactgataccacctggcgtgctgtggctgcaaaagttaaaacttttacccgtgcagaagttgtgatgggatatcgtcacttctggctctttgtaaccatcctggcatgggtaattgaccctgctcatcagaagaaggaggaagaccccattccaatcaatgtgacccaccaggaggaagaccccattccaatcaatgtgacccaccaggaggaagaccccattccaatcaatgtgacccaccaggaggaagaccccattccaatcaatgtgacccaccaggaggaagaccccattccaatcaatgtgacccaccaggaggaagaccccattccaatcaatgtgacccaccaggaggaagacctcattccaatcaacgtgacccaccaggagctctagactatgtcagccctgcagagctgggctgactaaaagctgacaccagaactgccagctttgccattttctc

SEQ ID NO: 463929 - DNA, 2821 bp, Homo sapiens
tgttgaaatgggcattgtcagccgtgctattggtattttgtaaacgtcatccgttgtctgtcagtaaagttaatttttatcaaatcatttatctagaactaatgagagactgcaagagccctccagtggccaagctaagttctgcagaaataccatcatcagaatgaaaaaggaattgtatgcagttgttaaatcttgacagcgaagagaagggatggctagaattattttagctgtttaaagggccatatgctgtacttgtaggaactatgatctcataggttgaattagacaggatatcatttaatgcagtctgagactcttggcagagaagtggatgaatagaattgctacttgaagagagaaaacactctgagaggattcaagcctaaaactccagctgaatttgaatctccaggtggaagtgaattgtgaaggtgccactcttctctgctggaagtatatgcattgaggccagcgtgtctagtctgtcacaatcctgggtcgtcgggggactgtaccgagcgcccttggagtgctcgcagcagggaagaaggagcgagcagggaggagctgaggagggtcggagcggaatggacacccagagactgagatgagagaggggctataagaagagaaaccagtcgcaggaaaacagaactctcgacaaacgcacgccctctttgcgctctccgtttctctggacctggatggaattgttttactttgcatcgccggactgcgctgcggacggggtggggcggcccaatggcccccctggggttactctgctccccttcacgcttccctcccggccccgccccgcgattggccggcgcgccccggggctgccgccgattggtgctcgccggccggagccgcggggcttaaagagggggcgggggcgcgctgcccagcagcgctgctgtccccgccgtgcgcccttcgccgctgagctcgcagcctccggcgcccacctccacctccagtgtcccgcctcgggccgtcgccctccagcggctcgcgagcgtgggagacgtacctgggcaggcactgtccagcccaggcccaggcacagccgtgaggggcgaggcacggggacatcctggcggccaccatggtggccacgtgcctgcaggtggtgggcttcgtcacgagcttcgtgggctggatcggggtcatcgtgaccacctccaccaatgactgggtggtgacctgcggctacaccatccccacctgccgcaagctggatgagctgggctccaaggggctgtgggccgactgcgtcatggccacggggctgtaccactgcaagcccctggtggacatcctcatcctgccggctccgtccgcgcagccgctgagcaattcacgtccagggctctctgggctgcctggtttgggaaatgtcacgttgattcccgcacgtgcccagggccatctccgctgcccccgctacccccgcccctgctgtgggcgcgtcagactgcggggctgcggtgacgccggctcccgctccgcgccgctgggttggatagggacgagcgggcgctcctcggagggcggactccactggggagatacggagcgcgccgccgagggtcgctcgccgccacccctccagcgctacgtgcaggcctgccgcgccctgatgattgctgcctcggtcctgggtctgccggccattttactgctgctgactgttcttccctgcatccggatgggccaggagcccggtgtggctaagtacaggcgggcccagctggctggtgttttgctcattctgctggatgctagtttcattagcacattctaaatcctaatagacaatatgaattttaagaacaactcttgttgcaaagtgcgcatatcagtgacaacaaattagtctggtaatgggttagatataaaatcaccttcttctgaaacaaggaattcatacccccagattggcatatcagatgatgaatttgagggtggatcaccactgcctttgggctggatgttgttttgaccggaacgagctagctctggaaatgtaaagctcattgtctcaagcatggcacctgctgatctcctctaggtcttctcaccacggagccccaagtgccttgtttcccctgttggcagtggtgggaggagcatggggactgaaggctccctttgtgttgctctggactgtttctgtcactcccccagagaagccagcgctaggcctgtgcaaggtcctcagggtcactgaatggggctgaacaaacacacctcattcgaccaaagaagatgaggcacctcctgggtttcgggggcctgggaactggacacagtgtcacagctagtcctggtatgggaactgtgaacactgctaattgaaatcagtttttcctgaccctgaaaatctgtaattatttttgtgaaagcttaaaaaaattatgtctgttgtacaactttatcttctcagcagttacgtttgatggtgtgaggatttggttcctgctgtggaggaagaaataggagccagttgcttctaaagccagatgagtagtacaggagcagcaggctctcagatctgtggtggatttgaggctaatctgtttgtggcttttcaagagtccctgccaaggcaggaggtgcctgtgccctgaattgtgtgatcttatcagctggagtcagatccaactgtgctgaatctggaacctactactttctagctgtgtgaactggggcagttccttaatgtctctggtcccttccataaaatgggaacaataacgcctgcttctcaggttagtaaaaacagtgaaatgatgtgtgaaaattattt

SEQ ID NO: 463930 - DNA, 2603 bp, Homo sapiens
gctaggggaatttgggctaaaaataaggacttttgctcttcttcaggaactatgatctcataggttgaattagacaggatatcatttaatgcagtctgagactcttggcagagaagtggatgaatagaattgctacttgaagagagaaaacactctgagaggattcaagcctaaaactccagctgaatttgaatctccaggtggaagtgaattgtgaaggtgccactcttctctgctggaagtatatgcattgaggccagcgtgtctagtctgtcacaatcctgggtcgtcgggggactgtaccgagcgcccttggagtgctcgcagcagggaagaaggagcgagcagggaggagctgaggagggtcggagcggaatggacacccagagactgagatgagagaggggctataagaagagaaaccagtcgcaggaaaacagaactctcgacaaacgcacgccctctttgcgctctccgtttctctggacctggatggaattgttttactttgcatcgccggactgcgctgcggacggggtggggcggcccaatggcccccctggggttactctgctccccttcacgcttccctcccggccccgccccgcgattggccggcgcgccccggggctgccgccgattggtgctcgccggccggagccgcggggcttaaagagggggcgggggcgcgctgcccagcagcgctgctgtccccgccgtgcgcccttcgccgctgagctcgcagcctccggcgcccacctccacctccagtgtcccgcctcgggccgtcgccctccagcggctcgcgagcgtgggagacgtacctgggcaggcactgtccagcccaggcccaggcacagccgtgaggggcgaggcacggggacatcctggcggccaccatggtggccacgtgcctgcaggtggtgggcttcgtcacgagcttcgtgggctggatcggggtcatcgtgaccacctccaccaatgactgggtggtgacctgcggctacaccatccccacctgccgcaagctggatgagctgggctccaaggggctgtgggccgactgcgtcatggccacggggctgtaccactgcaagcccctggtggacatcctcatcctgccggctccgtccgcgcagccgctgagcaattcacgtccagggctctctgggctgcctggtttgggaaatgtcacgttgattcccgcacgtgcccagggccatctccgctgcccccgctacccccgcccctgctgtgggcgcgtcagactgcggggctgcggtgacgccggctcccgctccgcgccgctgggttggatagggacgagcgggcgctcctcggagggcggactccactggggagatacggagcgcgccgccgagggtcgctcgccgccacccctccagcgctacgtgcaggcctgccgcgccctgatgattgctgcctcggtcctgggtctgccggccattttactgctgctgactgttcttccctgcatccggatgggccaggagcccggtgtggctaagtacaggcgggcccagctggctggtgttttgctcattctgctggatgctagtttcattagcacattctaaatcctaatagacaatatgaattttaagaacaactcttgttgcaaagtgcgcatatcagtgacaacaaattagtctggtaatgggttagatataaaatcaccttcttctgaaacaaggaattcatacccccagattggcatatcagatgatgaatttgagggtggatcaccactgcctttgggctggatgttgttttgaccggaacgagctagctctggaaatgtaaagctcattgtctcaagcatggcacctgctgatctcctctaggtcttctcaccacggagccccaagtgccttgtttcccctgttggcagtggtgggaggagcatggggactgaaggctccctttgtgttgctctggactgtttctgtcactcccccagagaagccagcgctaggcctgtgcaaggtcctcagggtcactgaatggggctgaacaaacacacctcattcgaccaaagaagatgaggcacctcctgggtttcgggggcctgggaactggacacagtgtcacagctagtcctggtatgggaactgtgaacactgctaattgaaatcagtttttcctgaccctgaaaatctgtaattatttttgtgaaagcttaaaaaaattatgtctgttgtacaactttatcttctcagcagttacgtttgatggtgtgaggatttggttcctgctgtggaggaagaaataggagccagttgcttctaaagccagatgagtagtacaggagcagcaggctctcagatctgtggtggatttgaggctaatctgtttgtggcttttcaagagtccctgccaaggcaggaggtgcctgtgccctgaattgtgtgatcttatcagctggagtcagatccaactgtgctgaatctggaacctactactttctagctgtgtgaactggggcagttccttaatgtctctggtcccttccataaaatgggaacaataacgcctgcttctcaggttagtaaaaacagtgaaatgatgtgtgaaaattattt

SEQ ID NO: 463931 - DNA, 3448 bp, Homo sapiens
ggtgttctcagtctgacagagatttgagttctccctggcatggaggtctcaggatcttgcccagtgagggacctcccaactggggcctccagccacctccgccagtgttccggggctgacagagatttgaattctccctggcatggaggtcttgaggtcctgcccagtgaggaaactctcaaccgtggcctccagccacccgcccctgctgttctcaggctgagagagatctgaattctccctggcatgtagttctcaagatcctgtccaatgagggtccttttagctggggtctccagccaatcccaccggtgttctcaggctgacagagatttgagttctccctggcatggaggtctttaggtcctgcctgcccagtgagggacctcccaactggggcctccagccacctccaccagtgttctggggctgacagaggtttgagttctccctggcatggcggtcttggggtcccgcccagtgagggacctcccaaccggggcctccagccacctccgccagtgttctggggctgacagagatttgaattctcccaggcatggagttcttgaggtcccacccagttagggttctcctaactgggacctctggccacccccacctgtgttctcatgctgacagaggtttgaattcttcctggcatggaggtctccagttcctgcccagtgagtgtcctttcaactcaggcctctagccaactccccccacccctgccagtgttctggggctgacagagatttgaattctccttggcatggaggtatcagggtcctgctcagtgagggacctcccaacaggggcctgcaaccacccccgccagtgttctggggctgacagagatttgaattctccctggcatggaggtcttggggtctggcccactgagggatctcctaaccagggcctccagccacccccgccagtgttctggggctgacagagatttgaattctcccaggtaagcagttcttggttcttgaagtcccgcccagtaagggttctcctaactggggcctctggccacccccacctgtgttctcatgctgacagagatttgaattcttcctggcatggaggtctccacttcctgcccagtgtgggtcttttcaactcaggcctccagccacccgcccctggtgttctcaggctgacagatttgaattctccctggcacatagttcttgaggtcctgcccaatgagggtccttttatctggggtctccagccaaccccactggtgttctggggctgacagaggtttgagttctccctggcatggcagtcttggggtcccgcccagtgagggacctcccacccggggcctccagccacccccgccagtgttctggggctgagatttgaattctccctggcatggaggtctcggggtctgacccagtgaaggacctcccaactagggcctccagctacccccgccagtgttctggggctgacagagatttgagttctccctggcatggaggtcttggggtcccgcccagtgagggacctcccacccggggcctccagccacccccaccggtgttctcgggctgacagagatttgaattctccctggtatggaggtctccaggtctggcccagtgaaggacctcggcctccagccacccctgccagtgttttggggctgacagagatttgaattctccctggcatggaggtcttgaggtcctgcccagtgagggacctctcaaccgtggtctccagccacccccaccggtgttctcgggctgacagagatctgaattctccctggcatgtagttctcaaggtcccacccaatgaaggtccttttagccagagtctcctgccaatcccaccagtgttctcaggctgacagagatttgagttctccgtggcatggaggtcttggggtcttgcccagtgagggaccacccaactggggcctccagccaccctcactggtgttctgggactgacagagatttgaattctcccaggcatggagttcttgaggtcccacccagttagggttctcctaactgagacttctggccaccccctcctgtgttctcatgctgacagaggtttgaattcttcctggcatggaggtctccagttcctgcccagtgagggtcctttcaactcaggcctccagccaactccccccacccccgccaatgttctggggctgacagagatttcaattctccctggcatggaggtctcggggtcccgcccagtgaggacctcccagctagggcctgcaaccaccctgctagtgttctggggctgacagagatgtgaattctctctggcatggaggtctcggggtctggcccagtgagggacctcccatccggggcctctagccacccccgccagtgtcctggggctttcagagatttgaattctccctggcatggagttcttgaggtcccacccagtgagggttctcctaactgggccctctggccacccctacctgtgtactcacactgtagtacatgagtactacatgtacttgaattatccctggcatggaggtctccagttcctgcccagtgaaggtcctttcaacttgggcccccagccaccaccccgccccctcccccagtgtcctcaggctgccagacatttcaattattcctggcatggaggtctcaaggtcctgcctggtgagggatcaccccactgggacctccagtcactcctgctggtggaacttatcccagggagaattcaaatctccgtcagcctgagagcacctgccggagtagcagcaggccccagttgggaggtcccacccagcgaggaggaatggattggggacccacttaaagaggcagtctggccacattttggtagagcagctgtgctgcgtgggggatcccttctgccctcagttggtttgggttctcaaaagcccaacaggctggaatagctaagttacccaagcaacaaagatggtggcctgccctgtcccctaggaagtcagtctcaggtaggtaaaacactgttgctggtggctggctggagttgtttccttgattatatgagtaatgcgagtacctggttgtttcagttgaaggtactgtattgacttgctcctttcattcctctccatgagagccgtgcaccctacctgcttctagtcagtcatcttggccacacacccccataatcacattttttaagtaaatcattctttaaaactctaacaaaatatttaaacatttaaaaagtgtggagctttagaaatgcctgattacgtcttaagtttgagacacgtagcagttatgtacattggcaattccagattttgcaacttataaggaaaggacttatatcttattcagtctttgtgtgtctaaactatcttcacctgtaaaatgagtataatgaagtactttatagagttgtacatgttatatgtaaaaatata

SEQ ID NO: 463932 - DNA, 1198 bp, Homo sapiens
ggtgttctcagtctgacagagatttgagttctccctggcatggaggtctcaggatcttgcccagtgagggacctcccaactggggcctccagccacctccgccagtgttccggggctgacagagatttgaattctccctggcatggaggtcttgaggtcctgcccagtgaggaaactctcaaccgtggcctccagccacccgcccctgctgttctcaggctgagagagatctgaattctccctggcatgtagttctcaagatcctgtccaatgagggtccttttagctggggtctccagccaatcccaccggtgttctcaggctgacagagatttgagttctccctggcatggaggtctttaggtcctgcctgcccagtgagggacctcccaactggggcctccagccacctccaccagtgttctggggctgacagaggtttgagttctccctggcatggcggtcttggggtcccgcccagtgagggacctcccaaccggggcctccagccacctccgccagtgttctggggctgacagagatttgaattctcccaggcatggagttcttgaggtcccacccagttagggttctcctaactgggacctctggccacccccacctgtgttctcatgctgacagaggtttgaattcttcctggcatggaggtctccagttcctgcccagtgagtgtcctttcaactcaggcctctagccaactccccccacccctgccagtgttctggggctgacagagatttgaattctccttggcatggaggtatcagggtcctgctcagtgagggacctcccaacaggggcctgcaaccacccccgccagtgttctggggctgacagagatttgaattctccctggcatggaggtcttggggtctggcccactgagggatctcctaaccagggcctccagccacccccgccagtgttctggggctgacagagatttgaattctcccaggtaagcagttcttggttcttgaagtcccgcccagtaagggttctcctaactggggcctctggccacccccacctgtgttctcatgctgacagagatttgaattcttcctggcatggaggtctccacttcctgcccagtgtgggtcttttcaactcaggcctccagccacccgcccctgtgcgaggctagtgacgggtacctgagcgtcgaattctgtaa

SEQ ID NO: 463933 - DNA, 5979 bp, Homo sapiens
cgccggccgcattggtgagggggcgcgggctgcttggccagggcagttccctcagctccgggttggagccggagccggagccggatcccgcgcacaccgccacgtcaacctaaacctacaccgccctctccaccccaccgccgcagcgcccgctgggcccgcagcgggtctccccaggcagcgtcctccacgcctttcccacaatgctccgcgccaggccccgccccggctcgccgtggagaccggcgcgtgaggaacctaccggtaccggccgcgcgctggtagtcgccggtgtggctgcacctcaccaatcccgtgcgccgcggctgggccgtcggagagtgcgtgtgcttctctcctgcacgcggtgcttgggctcggccaggcggggtccgccgccagggtttgaggatgggggagtagctacaggaagcgaccccgcgatggcaaggtatatttttgtggaatgaaaaggaagtattagaaatgagctgaagaccattcacagattaatatttttggggacagatttgtgatgcttgattcacccttgaagtaatgtagacagaagttctcaaatttgcatattacatcaactggaaccagcagtgaatcttaatgttcacttaaatcagaacttgcataagaaagagaatgggagtctggttaaataaagatgactatatcagagacttgaaaaggatcattctctgttttctgatagtgtatatggccattttagtgggcacagatcaggatttttacagtttacttggagtgtccaaaactgcaagcagtagagaaataagacaagctttcaagaaattggcattgaagttacatcctgataaaaacccgaataacccaaatgcacatggcgattttttaaaaataaatagagcatatgaagtactcaaagatgaagatctacggaaaaagtatgacaaatatggagaaaagggacttgaggataatcaaggtggccagtatgaaagctggaactattatcgttatgattttggtatttatgatgatgatcctgaaatcataacattggaaagaagagaatttgatgctgctgttaattctggagaactgtggtttgtaaatttttactccccaggctgttcacactgccatgatttagctcccacatggagagactttgctaaagaagtggatgggttacttcgaattggagctgttaactgtggtgatgatagaatgctttgccgaatgaaaggagtcaacagctatcccagcctcttcatttttcggtctggaatggccccagtgaaatatcatggagacagatcaaaggagagtttagtgagttttgcaatgcagcatgttagaagtacagtgacagaactttggacaggaaattttgtcaactccatacaaactgcttttgctgctggtattggctggctgatcactttttgttcaaaaggaggagattgtttgacttcacagacacgactcaggcttagtggcatgttggatggtcttgttaatgtaggatggatggactgtgccacccaggataacctttgtaaaagcttagatattacaacaagtactactgcttattttcctcctggagccactttaaataacaaagagaaaaacagtattttgtttctcaactcattggatgctaaagaaatatatttggaagtaatacataatcttccagattttgaactactttcggcaaacacactagaggatcgtttggctcatcatcggtggctgttattttttcattttggaaaaaatgaaaattcaaatgatcctgagctgaaaaaactaaaaactctacttaaaaatgatcatattcaagttggcaggtttgactgttcctctgcaccagacatctgtagtaatctgtatgtttttcagccgtctctagcagtatttaaaggacaaggaaccaaagaatatgaaattcatcatggaaagaagattctatatgatatacttgcctttgccaaagaaagtgtgaattctcatgttaccacgcttggacctcaaaattttcctgccaatgacaaagaaccatggcttgttgatttctttgccccctggtgtccaccatgtcgagctttactaccagagttacgaagagcatcaaatcttctttatggtcagcttaagtttggtacactagattgtacagttcatgagggactctgtaacatgtataacattcaggcttatccaacaacagtggtattcaaccagtccaacattcatgagtatgaaggacatcactctgctgaacaaatcttggagttcatagaggatcttatgaatccttcagtggtctcccttacacccaccaccttcaacgaactagttacacaaagaaaacacaacgaagtctggatggttgatttctattctccgtggtgtcatccttgccaagtcttaatgccagaatggaaaagaatggcccggacattaactggactgatcaacgtgggcagtatagattgccaacagtatcattctttttgtgcccaggaaaacgttcaaagataccctgagataagattttttcccccaaaatcaaataaagcttatcagtatcacagttacaatggttggaatagggatgcttattccctgagaatctggggtctaggatttttacctcaagtatccacagatctaacacctcagactttcagtgaaaaagttctacaagggaaaaatcattgggtgattgatttctatgctccttggtgtggaccttgccagaattttgctccagaatttgagctcttggctaggatgattaaaggaaaagtgaaagctggaaaagtagactgtcaggcttatgctcagacatgccagaaagctgggatcagggcctatccaactgttaagttttatttctacgaaagagcaaagagaaattttcaagaagagcagataaataccagagatgcaaaagcaatcgctgccttaataagtgaaaaattggaaactctccgaaatcaaggcaagaggaataaggatgaactttgataatgttgaagatgaagaaaaagtttaaaagaaattctgacagatgacatcagaagacacctatttagaatgttacatttatgatgggaatgaatgaacattatcttagacttgcagttgtactgccagaattatctacagcactggtgtaaaagaagggtctgcaaactttttctgtaaagggccggtttataaatattttagactttgcaggctataatatatggttcacacatgagaacaagaatagagtcatcatgtattctttgttatttgcttttaacaacctttaaaaaatattaaaacgattcttagctcagagccatacaaaagtaggctggattcagtccatggaccatagattgctgtccccctcgacggacttataatgtttcaggtggctggcttgaacatgagtctgctgtgctatctacataaatgtctaagttgtataaagtccactttcccttcacgttttttggctgacctgaaaagaggtaacttagtttttggtcacttgttctcctaaaaatgctatccctaaccatatatttatatttcgttttaaaaacacccatgatgtggcacagtaaacaaaccctgttatgctgtattattatgaggagattcttcattgttttctttccttctcaaaggttgaaaaaatgcttttaatttttcacagccgagaaacagtgcagcagtatatgtgcacacagtaagtacacaaatttgagcaacagtaagtgcacaaattctgtagtttgctgtatcatccaggaaaacctgagggaaaaaaattatagcaattaactgggcattgtagagtatcctaaatatgttatcaagtatttagagttctatattttaaagatatatgtgttcatgtattttctgaaattgctttcatagaaattttcccactgatagttgatttttgaggcatctaatatttacatatttgccttctgaactttgttttgacctgtatcctttatttacattgggtttttctttcatagttttggtttttcactcctgtccagtctatttattattcaaataggaaaaattactttacaggttgttttactgtagcttataatgatactgtagttattccagttactagtttactgtcagagggctgcctttttcagataaatattgacataataactgaagttatttttataagaaaatcaagtatataaatctaggaaagggatcttctagtttctgtgttgtttagactcaaagaatcacaaatttgtcagtaacatgtagttgtttagttataattcagagtgtacagaatggtaaaaattccaatcagtcaaaagaggtcaatgaattaaaaggcttgcaactttttcaaaaacctgttagaatatgctttattgtgttttgaggagttttcctttttttcttttcaatatcactttatcctgctcaccagtatttcctcataagggttattatagccataattaatgttaaaatagactttgttcttcatattctcccatctttttcgctactatatactctgtctggattctgctgtatgcctgttggcatatatggaacagtcaccacttgtcacacttaacaccagctttttgaattatgatcagtaatggcaagagcctttcattctcgaatgtttaaagcctaggagttctacaaaattggcttctttctacaagaatcccaaaatggaatgcctaaagaagtcttacttgggtaaatacttactaaaatatactggttatgtgcatatcaccacactggacactgaggagtgttcaaaaggaatctaagacatggtccccatcttccaactgtctgtaattcactgttttgtcattgagctcataagaaatcaacagacaaggtggatgagaactgtaaatcatcaaataagttataaaaccaccaaaaaataggagaaaatgggagtaaaaacaaaatgtataaaaagtattaaaatttgaaaaatatcttggaaataaggatggacagtttaagtacttatctcaaaaggaaaaatgttagcaattggttgtagcaatacgtccgtctgtaagtgatggtcatatttgtgttcttttgtcccagagaacaaaaggaagtgagcttatcccacagcacaagtaacgtctatttatctcagaggaaatccagggaagttcctacttgggaaaacggaaaggtagactattcagaagttttctaaaatggacttcaagctctatgactttatgatcacttagtatgtctacggattttttggggaagagagatttcacgttaaaggtcattttgtgtcttctttaaaactcttgattccttttagagttttttaaattgtgataaagtacatgtaacaaaatttattaatcattttaaagtagcatacagttcagtagtgttaagtaatttcacattgttcaacccatctccgtgactttatcttgcaaaactgaaattttatatccataaagcaaaacctttttatttaccaatgctgctagaccctgacaaccaccaccctactttctatcaatatgactaccatagatatttaatgtaagtgaaatcatacaccatttatctttttgtgattccttattttacttagcgtaagtcctcgagactcacccatgttgtagcatgtgtcataattttcttgttttgagacggagtcttactctgtccccctggctggagtgcagtggtgtgatctcagctcactgcaacctccacctcccagagttcaagaccagcctggccaacatggtgaaacgccgtctctactaaaaatacaaaaaaaaatggccaggcgtggtggtgcacgcctgtaatcccagctacttgggagtctgagacaggaaaatcgcttgaacccgggaggcagaggttacagtgagctgaggtcac

SEQ ID NO: 463934 - DNA, 1823 bp, Homo sapiens
atatttttgataattgccaaaatacactttttttgaaaaaagacatttggaattgtttgaaaaactatttaccttctataatcattttcctaaaaatactacattggaaattgaaaaaacaaaagatatcaaatataatgaatatttattcaaaaagattacaatgtgattttctttttctagtttctcaactcattggatgctaaagaaatatatttggaagtaatacataatcttccagattttgaactactttcggcaaacacactagaggatcgtttggctcatcatcggtggctgttattttttcattttggaaaaaatgaaaattcaaatgatcctgagctgaaaaaactaaaaactctacttaaaaatgatcatattcaagttggcaggtttgactgttcctctgcaccagacatctgtagtaatctgtatgtttttcagccgtctctagcagtatttaaaggacaaggaaccaaagaatatgaaattcatcatggaaagaagattctatatgatatacttgcctttgccaaagaaagtgtgaattctcatgttaccacgcttggacctcaaaattttcctgccaatgacaaagaaccatggcttgttgatttctttgccccctggtgtccaccatgtcgagctttactaccagagttacgaagagcatcaaatcttctttatggtcagcttaagtttggtacactagattgtacagttcatgagggactctgtaacatgtataacattcaggcttatccaacaacagtggtattcaaccagtccaacattcatgagtatgaaggacatcactctgctgaacaaatcttggagttcatagaggatcttatgaatccttcagtggtctcccttacacccaccaccttcaacgaactagttacacaaagaaaacacaacgaagtctggatggttgatttctattctccgtggtgtcatccttgccaagtcttaatgccagaatggaaaagaatggcccggacattaactggactgatcaacgtgggcagtatagattgccaacagtatcattctttttgtgcccaggaaaacgttcaaagataccctgagataagattttttcccccaaaatcaaataaagcttatcagtatcacagttacaatggttggaatagggatgcttattccctgagaatctggggtctaggatttttacctcaagtatccacagatctaacacctcagactttcagtgaaaaagttctacaagggaaaaatcattgggtgattgatttctatgctccttggtgtggaccttgccagaattttgctccagaatttgagctcttggctaggatgattaaaggaaaagtgaaagctggaaaagtagactgtcaggcttatgctcagacatgccagaaagctgggatcagggcctatccaactgttaagttttatttctacgaaagagcaaagagaaattttcaagaagagcagataaataccagagatgcaaaagcaatcgctgccttaataagtgaaaaattggaaactctccgaaatcaaggcaagaggaataaggatgaactttgataatgttgaagatgaagaaaaagtttaaaagaaattctgacagatgacatcagaagacacctatttagaatgttacatttatgatgggaatgaatgaacattatcttagacttgcagttgtactgccagaattatctacagcactggtgtaaaagaagggtctgcaaactttttctgtaaagggccggtttataaatattttagactttgcaggctataatatatggttcacacatgagaacaag

SEQ ID NO: 463935 - DNA, 429 bp, Homo sapiens
gtttcttaggtggaaatgttatgtttttattaaatacttaaaagataacaagtgtttttaattttagagaaattttcaagaagagcagataaataccagagatgcaaaagcaatcgctgccttaataagtgaaaaattggaaactctccgaaatcaaggcaagaggaataaggatgaactttgataatgttgaagatgaagaaaaagtttaaaagaaattctgacagatgacatcagaagacacctatttagaatgttacatttatgatgggaatgaatgaacattatcttagacttgcagttgtactgccagaattatctacagcactggtgtaaaagaagggtctgcaaactttttctgtaaagggccggtttataaatattttagactttgcaggctataatatatggttcacacatgagaacaag

SEQ ID NO: 463936 - DNA, 4771 bp, Homo sapiens
cgccggccgcattggtgagggggcgcgggctgcttggccagggcagttccctcagctccgggttggagccggagccggagccggatcccgcgcacaccgccacgtcaacctaaacctacaccgccctctccaccccaccgccgcagcgcccgctgggcccgcagcgggtctccccaggcagcgtcctccacgcctttcccacaatgctccgcgccaggccccgccccggctcgccgtggagaccggcgcgtgaggaacctaccggtaccggccgcgcgctggtagtcgccggtgtggctgcacctcaccaatcccgtgcgccgcggctgggccgtcggagagtgcgtgtgcttctctcctgcacgcggtgcttgggctcggccaggcggggtccgccgccagggtttgaggatgggggagtagctacaggaagcgaccccgcgatggcaaggtatatttttgtggaatgaaaaggaagtattagaaatgagctgaagaccattcacagattaatatttttggggacagatttgtgatgcttgattcacccttgaagtaatgtagacagaagttctcaaatttgcatattacatcaactggaaccagcagtgaatcttaatgttcacttaaatcagaacttgcataagaaagagaatgggagtctggttaaataaagatgactatatcagagacttgaaaaggatcattctctgttttctgatagtgtatatggccattttagtgggcacagatcaggatttttacagtttacttggagtgtccaaaactgcaagcagtagagaaataagacaagctttcaagaaattggcattgaagttacatcctgataaaaacccgaataacccaaatgcacatggcgattttttaaaaataaatagagcatatgaagtactcaaagatgaagatctacggaaaaagtatgacaaatatggagaaaagggacttgaggataatcaaggtggccagtatgaaagctggaactattatcgttatgattttggtatttatgatgatgatcctgaaatcataacattggaaagaagagaatttgatgctgctgttaattctggagaactgtggtttgtaaatttttactccccaggctgttcacactgccatgatttagctcccacatggagagactttgctaaagaagtggatgggttacttcgaattggagctgttaactgtggtgatgatagaatgctttgccgaatgaaaggagtcaacagctatcccagcctcttcatttttcggtctggaatggccccagtgaaatatcatggagacagatcaaaggagagtttagtgagttttgcaatgcagcatgttagaagtacagtgacagaactttggacaggaaattttgtcaactccatacaaactgcttttgctgctggtattggctggctgatcactttttgttcaaaaggaggagattgtttgacttcacagacacgactcaggcttagtggcatgttggatggtcttgttaatgtaggatggatggactgtgccacccaggataacctttgtaaaagcttagatattacaacaagtactactgcttattttcctcctggagccactttaaataacaaagagaaaaacagtattttgtttctcaactcattggatgctaaagaaatatatttggaagtaatacataatcttccagattttgaactactttcggcaaacacactagaggatcgtttggctcatcatcggtggctgttattttttcattttggaaaaaatgaaaattcaaatgatcctgagctgaaaaaactaaaaactctacttaaaaatgatcatattcaagttggcaggtttgactgttcctctgcaccagacatctgtagtaatctgtatgtttttcagccgtctctagcagtatttaaaggacaaggaaccaaagaatatgaaattcatcatggaaagaagattctatatgatatacttgcctttgccaaagaaagtgtgaattctcatgttaccacgcttggacctcaaaattttcctgccaatgacaaagaaccatggcttgttgatttctttgccccctggtgtccaccatgtcgagctttactaccagagttacgaagagcatcaaatcttctttatggtcagcttaagtttggtacactagattgtacagttcatgagggactctgtaacatgtataacattcaggcttatccaacaacagtggtattcaaccagtccaacattcatgagtatgaaggacatcactctgctgaacaaatcttggagttcatagaggatcttatgaatccttcagtggtctcccttacacccaccaccttcaacgaactagttacacaaagaaaacacaacgaagtctggatggttgatttctattctccgtggtgtcatccttgccaagtcttaatgccagaatggaaaagaatggcccggacattaactggactgatcaacgtgggcagtatagattgccaacagtatcattctttttgtgcccaggaaaacgttcaaagataccctgagataagattttttcccccaaaatcaaataaagcttatcagtatcacagttacaatggttggaatagggatgcttattccctgagaatctggggtctaggatttttacctcaagtatccacagatctaacacctcagactttcagtgaaaaagttctacaagggaaaaatcattgggtgattgatttctatgctccttggtgtggaccttgccagaattttgctccagaatttgagctcttggctaggatgattaaaggaaaagtgaaagctggaaaagtagactgtcaggcttatgctcagacatgccagaaagctgggatcagggcctatccaactgttaagttttatttctacgaaagagcaaagagaaattttcaagaagagcagataaataccagagatgcaaaagcaatcgctgccttaataagtgaaaaattggaaactctccgaaatcaaggcaagaggaataaggatgaactttgataatgttgaagatgaagaaaaagtttaaaagaaattctgacagatgacatcagaagacacctatttagaatgttacatttatgatgggaatgaatgaacattatcttagacttgcagttgtactgccagaattatctacagcactggtgtaaaagaagggtctgcaaactttttctgtaaagggccggtttataaatattttagactttgcaggctataatatatggttcacacatgagaacaagaatagagtcatcatgtattctttgttatttgcttttaacaacctttaaaaaatattaaaacgattcttagctcagagccatacaaaagtaggctggattcagtccatggaccatagattgctgtccccctcgacggacttataatgtttcaggtggctggcttgaacatgagtctgctgtgctatctacataaatgtctaagttgtataaagtccactttcccttcacgttttttggctgacctgaaaagaggtaacttagtttttggtcacttgttctcctaaaaatgctatccctaaccatatatttatatttcgttttaaaaacacccatgatgtggcacagtaaacaaaccctgttatgctgtattattatgaggagattcttcattgttttctttccttctcaaaggttgaaaaaatgcttttaatttttcacagccgagaaacagtgcagcagtatatgtgcacacagtaagtacacaaatttgagcaacagtaagtgcacaaattctgtagtttgctgtatcatccaggaaaacctgagggaaaaaaattatagcaattaactgggcattgtagagtatcctaaatatgttatcaagtatttagagttctatattttaaagatatatgtgttcatgtattttctgaaattgctttcatagaaattttcccactgatagttgatttttgaggcatctaatatttacatatttgccttctgaactttgttttgacctgtatcctttatttacattgggtttttctttcatagttttggtttttcactcctgtccagtctatttattattcaaataggaaaaattactttacaggttgttttactgtagcttataatgatactgtagttattccagttactagtttactgtcagagggctgcctttttcagataaatattgacataataactgaagttatttttataagaaaatcaagtatataaatctaggaaagggatcttctagtttctgtgttgtttagactcaaagaatcacaaatttgtcagtaacatgtagttgtttagttataattcagagtgtacagaatggtaaaaattccaatcagtcaaaagaggtcaatgaattaaaaggcttgcaactttttcaaaaacctgttagaatatgctttattgtgttttgaggagttttcctttttttcttttcaatatcactttatcctgctcaccagtatttcctcataagggttattatagccataattaatgttaaaatagactttgttcttcatattctcccatctttttcgctactatatactctgtctggattctgctgtatgcctgttggcatatatggaacagtcaccacttgtcacacttaacaccagctttttgaattatgatcagtaatggcaagagcctttcattctcgaatgtttaaagcctaggacctcaacagcttcatgaaagtctgggaaatgcactataagctttcggtccggctc

SEQ ID NO: 463937 - DNA, 4417 bp, Homo sapiens
cgccggccgcattggtgagggggcgcgggctgcttggccagggcagttccctcagctccgggttggagccggagccggagccggatcccgcgcacaccgccacgtcaacctaaacctacaccgccctctccaccccaccgccgcagcgcccgctgggcccgcagcgggtctccccaggcagcgtcctccacgcctttcccacaatgctccgcgccaggccccgccccggctcgccgtggagaccggcgcgtgaggaacctaccggtaccggccgcgcgctggtagtcgccggtgtggctgcacctcaccaatcccgtgcgccgcggctgggccgtcggagagtgcgtgtgcttctctcctgcacgcggtgcttgggctcggccaggcggggtccgccgccagggtttgaggatgggggagtagctacaggaagcgaccccgcgatggcaaggtatatttttgtggaatgaaaaggaagtattagaaatgagctgaagaccattcacagattaatatttttggggacagatttgtgatgcttgattcacccttgaagtaatgtagacagaagttctcaaatttgcatattacatcaactggaaccagcagtgaatcttaatgttcacttaaatcagaacttgcataagaaagagaatgggagtctggttaaataaagatgactatatcagagacttgaaaaggatcattctctgttttctgatagtgtatatggccattttagtgggcacagatcaggatttttacagtttacttggagtgtccaaaactgcaagcagtagagaaataagacaagctttcaagaaattggcattgaagttacatcctgataaaaacccgaataacccaaatgcacatggcgattttttaaaaataaatagagcatatgaagtactcaaagatgaagatctacggaaaaagtatgacaaatatggagaaaagggacttgaggataatcaaggtggccagtatgaaagctggaactattatcgttatgattttggtatttatgatgatgatcctgaaatcataacattggaaagaagagaatttgatgctgctgttaattctggagaactgtggtttgtaaatttttactccccaggctgttcacactgccatgatttagctcccacatggagagactttgctaaagaagtggatgggttacttcgaattggagctgttaactgtggtgatgatagaatgctttgccgaatgaaaggagtcaacagctatcccagcctcttcatttttcggtctggaatggccccagtgaaatatcatggagacagatcaaaggagagtttagtgagttttgcaatgcagcatgttagaagtacagtgacagaactttggacaggaaattttgtcaactccatacaaactgcttttgctgctggtattggctggctgatcactttttgttcaaaaggaggagattgtttgacttcacagacacgactcaggcttagtggcatgttggatggtcttgttaatgtaggatggatggactgtgccacccaggataacctttgtaaaagcttagatattacaacaagtactactgcttattttcctcctggagccactttaaataacaaagagaaaaacagtattttgtttctcaactcattggatgctaaagaaatatatttggaagtaatacataatcttccagattttgaactactttcggcaaacacactagaggatcgtttggctcatcatcggtggctgttattttttcattttggaaaaaatgaaaattcaaatgatcctgagctgaaaaaactaaaaactctacttaaaaatgatcatattcaagttggcaggtttgactgttcctctgcaccagacatctgtagtaatctgtatgtttttcagccgtctctagcagtatttaaaggacaaggaaccaaagaatatgaaattcatcatggaaagaagattctatatgatatacttgcctttgccaaagaaagtgtgaattctcatgttaccacgcttggacctcaaaattttcctgccaatgacaaagaaccatggcttgttgatttctttgccccctggtgtccaccatgtcgagctttactaccagagttacgaagagcatcaaatcttctttatggtcagcttaagtttggtacactagattgtacagttcatgagggactctgtaacatgtataacattcaggcttatccaacaacagtggtattcaaccagtccaacattcatgagtatgaaggacatcactctgctgaacaaatcttggagttcatagaggatcttatgaatccttcagtggtctcccttacacccaccaccttcaacgaactagttacacaaagaaaacacaacgaagtctggatggttgatttctattctccgtggtgtcatccttgccaagtcttaatgccagaatggaaaagaatggcccggacattaactggactgatcaacgtgggcagtatagattgccaacagtatcattctttttgtgcccaggaaaacgttcaaagataccctgagataagattttttcccccaaaatcaaataaagcttatcagtatcacagttacaatggttggaatagggatgcttattccctgagaatctggggtctaggatttttacctcaagtatccacagatctaacacctcagactttcagtgaaaaagttctacaagggaaaaatcattgggtgattgatttctatgctccttggtgtggaccttgccagaattttgctccagaatttgagctcttggctaggatgattaaaggaaaagtgaaagctggaaaagtagactgtcaggcttatgctcagacatgccagaaagctgggatcagggcctatccaactgttaagttttatttctacgaaagagcaaagagaaattttcaagaagagcagataaataccagagatgcaaaagcaatcgctgccttaataagtgaaaaattggaaactctccgaaatcaaggcaagaggaataaggatgaactttgataatgttgaagatgaagaaaaagtttaaaagaaattctgacagatgacatcagaagacacctatttagaatgttacatttatgatgggaatgaatgaacattatcttagacttgcagttgtactgccagaattatctacagcactggtgtaaaagaagggtctgcaaactttttctgtaaagggccggtttataaatattttagactttgcaggctataatatatggttcacacatgagaacaagaatagagtcatcatgtattctttgttatttgcttttaacaacctttaaaaaatattaaaacgattcttagctcagagccatacaaaagtaggctggattcagtccatggaccatagattgctgtccccctcgacggacttataatgtttcaggtggctggcttgaacatgagtctgctgtgctatctacataaatgtctaagttgtataaagtccactttcccttcacgttttttggctgacctgaaaagaggtaacttagtttttggtcacttgttctcctaaaaatgctatccctaaccatatatttatatttcgttttaaaaacacccatgatgtggcacagtaaacaaaccctgttatgctgtattattatgaggagattcttcattgttttctttccttctcaaaggttgaaaaaatgcttttaatttttcacagccgagaaacagtgcagcagtatatgtgcacacagtaagtacacaaatttgagcaacagtaagtgcacaaattctgtagtttgctgtatcatccaggaaaacctgagggaaaaaaattatagcaattaactgggcattgtagagtatcctaaatatgttatcaagtatttagagttctatattttaaagatatatgtgttcatgtattttctgaaattgctttcatagaaattttcccactgatagttgatttttgaggcatctaatatttacatatttgccttctgaactttgttttgacctgtatcctttatttacattgggtttttctttcatagttttggtttttcactcctgtccagtctatttattattcaaataggaaaaattactttacaggttgttttactgtagcttataatgatactgtagttattccagttactagtttactgtcagagggctgcctttttcagataaatattgacataataactgaagttatttttataagaaaatcaagtatataaatctaggaaagggatcttctagtttctgtgttgtttagactcaaagaatcacaaatttgtcagtaacatgtagttgtttagttataattcagagtgtacagaatggtaaaaattccaatcagtcaaaagaggtcaatgaattaaaaggcttgcaactttttcaaaaa

SEQ ID NO: 463938 - DNA, 4459 bp, Homo sapiens
cgccggccgcattggtgagggggcgcgggctgcttggccagggcagttccctcagctccgggttggagccggagccggagccggatcccgcgcacaccgccacgtcaacctaaacctacaccgccctctccaccccaccgccgcagcgcccgctgggcccgcagcgggtctccccaggcagcgtcctccacgcctttcccacaatgctccgcgccaggccccgccccggctcgccgtggagaccggcgcgtgaggaacctaccggtaccggccgcgcgctggtagtcgccggtgtggctgcacctcaccaatcccgtgcgccgcggctgggccgtcggagagtgcgtgtgcttctctcctgcacgcggtgcttgggctcggccaggcggggtccgccgccagggtttgaggatgggggagtagctacaggaagcgaccccgcgatggcaaggtatatttttgtggaatgaaaaggaagtattagaaatgagctgaagaccattcacagattaatatttttggggacagatttgtgatgcttgattcacccttgaagtaatgtagacagaagttctcaaatttgcatattacatcaactggaaccagcagtgaatcttaatgttcacttaaatcagaacttgcataagaaagagaatgggagtctggttaaataaagatgactatatcagagacttgaaaaggatcattctctgttttctgatagtgtatatggccattttagtgggcacagatcaggatttttacagtttacttggagtgtccaaaactgcaagcagtagagaaataagacaagctttcaagaaattggcattgaagttacatcctgataaaaacccgaataacccaaatgcacatggcgattttttaaaaataaatagagcatatgaagtactcaaagatgaagatctacggaaaaagtatgacaaatatggagaaaagggacttgaggataatcaaggtggccagtatgaaagctggaactattatcgttatgattttggtatttatgatgatgatcctgaaatcataacattggaaagaagagaatttgatgctgctgttaattctggagaactgtggtttgtaaatttttactccccaggctgttcacactgccatgatttagctcccacatggagagactttgctaaagaagtggatgggttacttcgaattggagctgttaactgtggtgatgatagaatgctttgccgaatgaaaggagtcaacagctatcccagcctcttcatttttcggtctggaatggccccagtgaaatatcatggagacagatcaaaggagagtttagtgagttttgcaatgcagcatgttagaagtacagtgacagaactttggacaggaaattttgtcaactccatacaaactgcttttgctgctggtattggctggctgatcactttttgttcaaaaggaggagattgtttgacttcacagacacgactcaggcttagtggcatgttggatggtcttgttaatgtaggatggatggactgtgccacccaggataacctttgtaaaagcttagatattacaacaagtactactgcttattttcctcctggagccactttaaataacaaagagaaaaacagtattttgtttctcaactcattggatgctaaagaaatatatttggaagtaatacataatcttccagattttgaactactttcggcaaacacactagaggatcgtttggctcatcatcggtggctgttattttttcattttggaaaaaatgaaaattcaaatgatcctgagctgaaaaaactaaaaactctacttaaaaatgatcatattcaagttggcaggtttgactgttcctctgcaccagacatctgtagtaatctgtatgtttttcagccgtctctagcagtatttaaaggacaaggaaccaaagaatatgaaattcatcatggaaagaagattctatatgatatacttgcctttgccaaagaaagtgtgaattctcatgttaccacgcttggacctcaaaattttcctgccaatgacaaagaaccatggcttgttgatttctttgccccctggtgtccaccatgtcgagctttactaccagagttacgaagagcatcaaatcttctttatggtcagcttaagtttggtacactagattgtacagttcatgagggactctgtaacatgtataacattcaggcttatccaacaacagtggtattcaaccagtccaacattcatgagtatgaaggacatcactctgctgaacaaatcttggagttcatagaggatcttatgaatccttcagtggtctcccttacacccaccaccttcaacgaactagttacacaaagaaaacacaacgaagtctggatggttgatttctattctccgtggtgtcatccttgccaagtcttaatgccagaatggaaaagaatggcccggacattaactggactgatcaacgtgggcagtatagattgccaacagtatcattctttttgtgcccaggaaaacgttcaaagataccctgagataagattttttcccccaaaatcaaataaagcttatcagtatcacagttacaatggttggaatagggatgcttattccctgagaatctggggtctaggatttttacctcaagtatccacagatctaacacctcagactttcagtgaaaaagttctacaagggaaaaatcattgggtgattgatttctatgctccttggtgtggaccttgccagaattttgctccagaatttgagctcttggctaggatgattaaaggaaaagtgaaagctggaaaagtagactgtcaggcttatgctcagacatgccagaaagctgggatcagggcctatccaactgttaagttttatttctacgaaagagcaaagagaaattttcaagaagagcagataaataccagagatgcaaaagcaatcgctgccttaataagtgaaaaattggaaactctccgaaatcaaggcaagaggaataaggatgaactttgataatgttgaagatgaagaaaaagtttaaaagaaattctgacagatgacatcagaagacacctatttagaatgttacatttatgatgggaatgaatgaacattatcttagacttgcagttgtactgccagaattatctacagcactggtgtaaaagaagggtctgcaaactttttctgtaaagggccggtttataaatattttagactttgcaggctataatatatggttcacacatgagaacaagaatagagtcatcatgtattctttgttatttgcttttaacaacctttaaaaaatattaaaacgattcttagctcagagccatacaaaagtaggctggattcagtccatggaccatagattgctgtccccctcgacggacttataatgtttcaggtggctggcttgaacatgagtctgctgtgctatctacataaatgtctaagttgtataaagtccactttcccttcacgttttttggctgacctgaaaagaggtaacttagtttttggtcacttgttctcctaaaaatgctatccctaaccatatatttatatttcgttttaaaaacacccatgatgtggcacagtaaacaaaccctgttatgctgtattattatgaggagattcttcattgttttctttccttctcaaaggttgaaaaaatgcttttaatttttcacagccgagaaacagtgcagcagtatatgtgcacacagtaagtacacaaatttgagcaacagtaagtgcacaaattctgtagtttgctgtatcatccaggaaaacctgagggaaaaaaattatagcaattaactgggcattgtagagtatcctaaatatgttatcaagtatttagagttctatattttaaagatatatgtgttcatgtattttctgaaattgctttcatagaaattttcccactgatagttgatttttgaggcatctaatatttacatatttgccttctgaactttgttttgacctgtatcctttatttacattgggtttttctttcatagttttggtttttcactcctgtccagtctatttattattcaaataggaaaaattactttacaggttgttttactgtagcttataatgatactgtagttattccagttactagtttactgtcagagggctgcctttttcagataaatattgacataataactgaagttatttttataagaaaatcaagtatataaatctaggaaagggatcttctagtttctgtgttgtttagactcaaagaatcacaaatttgtcagtaacatgtagttgtttagttataattcagagtgtacagaatggtaaaaattccaatcagtcaaaagaggtcaatgaattaaaaggcttgcaactttttcaaaaaacaaaaaaaagggcggccgctttagagtaaccaatcgagggg

SEQ ID NO: 463939 - DNA, 2296 bp, Homo sapiens
ccataaagaagatttgatgctcttcgtaactcgcttaagtttggtacactagattgtacagttcatgagggactctgtaacatgtataacattcaggcttatccaacaacagtggtattcaaccagtccaacattcatgagtatgaaggacatcactctgctgaacaaatcttggagttcatagaggatcttatgaatccttcagtggtctcccttacacccaccaccttcaacgaactagttacacaaagaaaacacaacgaagtctggatggttgatttctattctccgtggtgtcatccttgccaagtcttaatgccagaatggaaaagaatggcccggacattaactggactgatcaacgtgggcagtatagattgccaacagtatcattctttttgtgcccaggaaaacgttcaaagataccctgagataagattttttcccccaaaatcaaataaagcttatcagtatcacagttacaatggttggaatagggatgcttattccctgagaatctggggtctaggatttttacctcaagtatccacagatctaacacctcagactttcagtgaaaaagttctacaagggaaaaatcattgggtgattgatttctatgctccttggtgtggaccttgccagaattttgctccagaatttgagctcttggctaggatgattaaaggaaaagtgaaagctggaaaagtagactgtcaggcttatgctcagacatgccagaaagctgggatcagggcctatccaactgttaagttttatttctacgaaagagcaaagagaaattttcaagaagagcagataaataccagagatgcaaaagcaatcgctgccttaataagtgaaaaattggaaactctccgaaatcaaggcaagaggaataaggatgaactttgataatgttgaagatgaagaaaaagtttaaaagaaattctgacagatgacatcagaagacacctatttagaatgttacatttatgatgggaatgaatgaacattatcttagacttgcagttgtactgccagaattatctacagcactggtgtaaaagaagggtctgcaaactttttctgtaaagggccggtttataaatattttagactttgcaggctataatatatggttcacacatgagaacaagaatagagtcatcatgtattctttgttatttgcttttaacaacctttaaaaaatattaaaacgattcttagctcagagccatacaaaagtaggctggattcagtccatggaccatagattgctgtccccctcgacggacttataatgtttcaggtggctggcttgaacatgagtctgctgtgctatctacataaatgtctaagttgtataaagtccactttcccttcacgttttttggctgacctgaaaagaggtaacttagtttttggtcacttgttctcctaaaaatgctatccctaaccatatatttatatttcgttttaaaaacacccatgatgtggcacagtaaacaaaccctgttatgctgtattattatgaggagattcttcattgttttctttccttctcaaaggttgaaaaaatgcttttaatttttcacagccgagaaacagtgcagcagtatatgtgcacacagtaagtacacaaatttgagcaacagtaagtgcacaaattctgtagtttgctgtatcatccaggaaaacctgagggaaaaaaattatagcaattaactgggcattgtagagtatcctaaatatgttatcaagtatttagagttctatattttaaagatatatgtgttcatgtattttctgaaattgctttcatagaaattttcccactgatagttgatttttgaggcatctaatatttacatatttgccttctgaactttgttttgacctgtatcctttatttacattgggtttttctttcatagttttggtttttcactcctgtccagtctatttattattcaaataggaaaaattactttacaggttgttttactgtagcttataatgatactgtagttattccagttactagtttactgtcagagggctgcctttttcagataaatattgacataataactgaagttatttttataagaaaatcaagtatataaatctaggaaagggatcttctagtttctgtgttgtttagactcaaagaatcacaaatttgtcagtaacatgtagttgtttagttataattcagagtgtacagaatggtaaaaattccaatcagtcaaaagaggtcaatgaattaaaaggcttgcaactttttcaaaaa

SEQ ID NO: 463940 - DNA, 3281 bp, Homo sapiens
cgccggccgcattggtgagggggcgcgggctgcttggccagggcagttccctcagctccgggttggagccggagccggagccggatcccgcgcacaccgccacgtcaacctaaacctacaccgccctctccaccccaccgccgcagcgcccgctgggcccgcagcgggtctccccaggcagcgtcctccacgcctttcccacaatgctccgcgccaggccccgccccggctcgccgtggagaccggcgcgtgaggaacctaccggtaccggccgcgcgctggtagtcgccggtgtggctgcacctcaccaatcccgtgcgccgcggctgggccgtcggagagtgcgtgtgcttctctcctgcacgcggtgcttgggctcggccaggcggggtccgccgccagggtttgaggatgggggagtagctacaggaagcgaccccgcgatggcaaggtatatttttgtggaatgaaaaggaagtattagaaatgagctgaagaccattcacagattaatatttttggggacagatttgtgatgcttgattcacccttgaagtaatgtagacagaagttctcaaatttgcatattacatcaactggaaccagcagtgaatcttaatgttcacttaaatcagaacttgcataagaaagagaatgggagtctggttaaataaagatgactatatcagagacttgaaaaggatcattctctgttttctgatagtgtatatggccattttagtgggcacagatcaggatttttacagtttacttggagtgtccaaaactgcaagcagtagagaaataagacaagctttcaagaaattggcattgaagttacatcctgataaaaacccgaataacccaaatgcacatggcgattttttaaaaataaatagagcatatgaagtactcaaagatgaagatctacggaaaaagtatgacaaatatggagaaaagggacttgaggataatcaaggtggccagtatgaaagctggaactattatcgttatgattttggtatttatgatgatgatcctgaaatcataacattggaaagaagagaatttgatgctgctgttaattctggagaactgtggtttgtaaatttttactccccaggctgttcacactgccatgatttagctcccacatggagagactttgctaaagaagtggatgggttacttcgaattggagctgttaactgtggtgatgatagaatgctttgccgaatgaaaggagtcaacagctatcccagcctcttcatttttcggtctggaatggccccagtgaaatatcatggagacagatcaaaggagagtttagtgagttttgcaatgcagcatgttagaagtacagtgacagaactttggacaggaaattttgtcaactccatacaaactgcttttgctgctggtattggctggctgatcactttttgttcaaaaggaggagattgtttgacttcacagacacgactcaggcttagtggcatgttggatggtcttgttaatgtaggatggatggactgtgccacccaggataacctttgtaaaagcttagatattacaacaagtactactgcttattttcctcctggagccactttaaataacaaagagaaaaacagtattttgtttctcaactcattggatgctaaagaaatatatttggaagtaatacataatcttccagattttgaactactttcggcaaacacactagaggatcgtttggctcatcatcggtggctgttattttttcattttggaaaaaatgaaaattcaaatgatcctgagctgaaaaaactaaaaactctacttaaaaatgatcatattcaagttggcaggtttgactgttcctctgcaccagacatctgtagtaatctgtatgtttttcagccgtctctagcagtatttaaaggacaaggaaccaaagaatatgaaattcatcatggaaagaagattctatatgatatacttgcctttgccaaagaaagtgtgaattctcatgttaccacgcttggacctcaaaattttcctgccaatgacaaagaaccatggcttgttgatttctttgccccctggtgtccaccatgtcgagctttactaccagagttacgaagagcatcaaatcttctttatggtcagcttaagtttggtacactagattgtacagttcatgagggactctgtaacatgtataacattcaggcttatccaacaacagtggtattcaaccagtccaacattcatgagtatgaaggacatcactctgctgaacaaatcttggagttcatagaggatcttatgaatccttcagtggtctcccttacacccaccaccttcaacgaactagttacacaaagaaaacacaacgaagtctggatggttgatttctattctccgtggtgtcatccttgccaagtcttaatgccagaatggaaaagaatggcccggacattaactggactgatcaacgtgggcagtatagattgccaacagtatcattctttttgtgcccaggaaaacgttcaaagataccctgagataagattttttcccccaaaatcaaataaagcttatcagtatcacagttacaatggttggaatagggatgcttattccctgagaatctggggtctaggatttttacctcaagtatccacagatctaacacctcagactttcagtgaaaaagttctacaagggaaaaatcattgggtgattgatttctatgctccttggtgtggaccttgccagaattttgctccagaatttgagctcttggctaggatgattaaaggaaaagtgaaagctggaaaagtagactgtcaggcttatgctcagacatgccagaaagctgggatcagggcctatccaactgttaagttttatttctacgaaagagcaaagagaaattttcaagaagagcagataaataccagagatgcaaaagcaatcgctgccttaataagtgaaaaattggaaactctccgaaatcaaggcaagaggaataaggatgaactttgataatgttgaagatgaagaaaaagtttaaaagaaattctgacagatgacatcagaagacacctatttagaatgttacatttatgatgggaatgaatgaacattatcttagacttgcagttgtactgccagaattatctacagcactggtgtaaaagaagggtctgcaaactttttctgtaaagggccggtttataaatattttagactttgcaggctataatatatggttcacacatgagaacaag

SEQ ID NO: 463941 - DNA, 1565 bp, Homo sapiens
gtttcttaggtggaaatgttatgtttttattaaatacttaaaagataacaagtgtttttaattttagagaaattttcaagaagagcagataaataccagagatgcaaaagcaatcgctgccttaataagtgaaaaattggaaactctccgaaatcaaggcaagaggaataaggatgaactttgataatgttgaagatgaagaaaaagtttaaaagaaattctgacagatgacatcagaagacacctatttagaatgttacatttatgatgggaatgaatgaacattatcttagacttgcagttgtactgccagaattatctacagcactggtgtaaaagaagggtctgcaaactttttctgtaaagggccggtttataaatattttagactttgcaggctataatatatggttcacacatgagaacaagaatagagtcatcatgtattctttgttatttgcttttaacaacctttaaaaaatattaaaacgattcttagctcagagccatacaaaagtaggctggattcagtccatggaccatagattgctgtccccctcgacggacttataatgtttcaggtggctggcttgaacatgagtctgctgtgctatctacataaatgtctaagttgtataaagtccactttcccttcacgttttttggctgacctgaaaagaggtaacttagtttttggtcacttgttctcctaaaaatgctatccctaaccatatatttatatttcgttttaaaaacacccatgatgtggcacagtaaacaaaccctgttatgctgtattattatgaggagattcttcattgttttctttccttctcaaaggttgaaaaaatgcttttaatttttcacagccgagaaacagtgcagcagtatatgtgcacacagtaagtacacaaatttgagcaacagtaagtgcacaaattctgtagtttgctgtatcatccaggaaaacctgagggaaaaaaattatagcaattaactgggcattgtagagtatcctaaatatgttatcaagtatttagagttctatattttaaagatatatgtgttcatgtattttctgaaattgctttcatagaaattttcccactgatagttgatttttgaggcatctaatatttacatatttgccttctgaactttgttttgacctgtatcctttatttacattgggtttttctttcatagttttggtttttcactcctgtccagtctatttattattcaaataggaaaaattactttacaggttgttttactgtagcttataatgatactgtagttattccagttactagtttactgtcagagggctgcctttttcagataaatattgacataataactgaagttatttttataagaaaatcaagtatataaatctaggaaagggatcttctagtttctgtgttgtttagactcaaagaatcacaaatttgtcagtaacatgtagttgtttagttataattcagagtgtacagaatggtaaaaattccaatcagtcaaaagaggtcaatgaattaaaaggcttgcaactttttcaaaaa

SEQ ID NO: 463942 - DNA, 949 bp, Homo sapiens
cacaccactgagtccaacaatatgacattctggaaaaggcaaaactattgagacaataaaaagattagtggttgccagaagttaggagggctggaagaaatgaacaggtagggtacagaggatttttagggcggtgaagctattctgcgagatactacaacagtggatacatgccattatacacttgcaccaatagaatgcacaagatgaagaatgaactccaatgtaaactattaacttggggtaataatgatgtgtcaatgtaggttcatagattataaaaaatgtgccactctggtatgggatgctgatagttgactcaggtggtgcacaccacctgagtcccaggaaaacctgagggaaaaaaattatagcaattaactgggcattgtagagtatcctaaatatgttatcaagtatttagagttctatattttaaagatatatgtgttcatgtattttctgaaattgctttcatagaaattttcccactgatagttgatttttgaggcatctaatatttacatatttgccttctgaactttgttttgacctgtatcctttatttacattgggtttttctttcatagttttggtttttcactcctgtccagtctatttattattcaaataggaaaaattactttacaggttgttttactgtagcttataatgatactgtagttattccagttactagtttactgtcagagggctgcctttttcagataaatattgacataataactgaagttatttttataagaaaatcaagtatataaatctaggaaagggatcttctagtttctgtgttgtttagactcaaagaatcacaaatttgtcagtaacatgtagttgtttagttataattcagagtgtacagaatggtaaaaattccaatcagtcaaaagaggtcaatgaattaaaaggcttgcaactttttcaaaaa

SEQ ID NO: 463943 - DNA, 1698 bp, Homo sapiens
cgccggccgcattggtgagggggcgcgggctgcttggccagggcagttccctcagctccgggttggagccggagccggagccggatcccgcgcacaccgccacgtcaacctaaacctacaccgccctctccaccccaccgccgcagcgcccgctgggcccgcagcgggtctccccaggcagcgtcctccacgcctttcccacaatgctccgcgccaggccccgccccggctcgccgtggagaccggcgcgtgaggaacctaccggtaccggccgcgcgctggtagtcgccggtgtggctgcacctcaccaatcccgtgcgccgcggctgggccgtcggagagtgcgtgtgcttctctcctgcacgcggtgcttgggctcggccaggcggggtccgccgccagggtttgaggatgggggagtagctacaggaagcgaccccgcgatggcaaggtatatttttgtggaatgaaaaggaagtattagaaatgagctgaagaccattcacagattaatatttttggggacagatttgtgatgcttgattcacccttgaagtaatgtagacagaagttctcaaatttgcatattacatcaactggaaccagcagtgaatcttaatgttcacttaaatcagaacttgcataagaaagagaatgggagtctggttaaataaagatgactatatcagagacttgaaaaggatcattctctgttttctgatagtgtatatggccattttagtgggcacagatcaggatttttacagtttacttggagtgtccaaaactgcaagcagtagagaaataagacaagctttcaagaaattggcattgaagttacatcctgataaaaacccgaataacccaaatgcacatggcgattttttaaaaataaatagagcatatgaagtactcaaagatgaagatctacggaaaaagtatgacaaatatggagaaaagggacttgaggataatcaaggtggccagtatgaaagctggaactattatcgttatgattttggtatttatgatgatgatcctgaaatcataacattggaaagaagagaatttgatgctgctgttaattctggagaactgtggtttgtaaatttttactccccaggctgttcacactgccatgatttagctcccacatggagagactttgctaaagaagtggatgggttacttcgaattggagctgttaactgtggtgatgatagaatgctttgccgaatgaaaggagtcaacagctatcccagcctcttcatttttcggtctggaatggccccagtgaaatatcatggagacagatcaaaggagagtttagtgagttttgcaatgcagcatgttagaagtacagtgacagaactttggacaggaaattttgtcaactccatacaaactgcttttgctgctggtattggctggctgatcactttttgttcaaaaggaggagattgtttgacttcacagacacgactcaggcttagtggcatgttggtaagcatcaatcattttgtaaaactatatcaccatgtaaagaaacacatttagaaattgatttgaaacattttcttcccttatttcttgaacatttaactcacctatttgtaatcttattttctgatgactgtattcatagctatgtgttttttcctgaataattagttacgttcaataaattttaacgtggta

SEQ ID NO: 463944 - DNA, 640 bp, Homo sapiens
tgtccaccatgtcgagctttactaccagagttacgaagagcatcaaatcttctttatggtcagcttaagtttggtacactagattgtacagttcatgagggactctgtaacatggtaaggcaaagtatcaaaaattattctaattaattttataaaatgaagaccttttggctgtttattattaaaacattaaaataacttagaaataatacatcttctatttagagtagtaacaaattatttaaacaaaataatatttttagaaagtggtatcaaatatgattggattaaaccatgcatagctaatcaatgcattgaatgtaaataaggtcttatttatcaaactcaggcaactattttcattaacttcataaaatgcttatatgattttccaattattgaagattgttatatttctttaatatttttgacattttataatttttttcctttggctttcttcatacttctaagtatatttgctggaaagaagttaaaacaatgaacaagccttttgaaatctttgtttaaatgaaattattttctcaggtaaatattcactcctcagttgcaggaagaactaaaaattatataccgtagaatgatagtacgtgctatctcgtataatatactttgggca

SEQ ID NO: 463945 - DNA, 2155 bp, Homo sapiens
cgccggccgcattggtgagggggcgcgggctgcttggccagggcagttccctcagctccgggttggagccggagccggagccggatcccgcgcacaccgccacgtcaacctaaacctacaccgccctctccaccccaccgccgcagcgcccgctgggcccgcagcgggtctccccaggcagcgtcctccacgcctttcccacaatgctccgcgccaggccccgccccggctcgccgtggagaccggcgcgtgaggaacctaccggtaccggccgcgcgctggtagtcgccggtgtggctgcacctcaccaatcccgtgcgccgcggctgggccgtcggagagtgcgtgtgcttctctcctgcacgcggtgcttgggctcggccaggcggggtccgccgccagggtttgaggatgggggagtagctacaggaagcgaccccgcgatggcaaggtatatttttgtggaatgaaaaggaagtattagaaatgagctgaagaccattcacagattaatatttttggggacagatttgtgatgcttgattcacccttgaagtaatgtagacagaagttctcaaatttgcatattacatcaactggaaccagcagtgaatcttaatgttcacttaaatcagaacttgcataagaaagagaatgggagtctggttaaataaagatgactatatcagagacttgaaaaggatcattctctgttttctgatagtgtatatggccattttagtgggcacagatcaggatttttacagtttacttggagtgtccaaaactgcaagcagtagagaaataagacaagctttcaagaaattggcattgaagttacatcctgataaaaacccgaataacccaaatgcacatggcgattttttaaaaataaatagagcatatgaagtactcaaagatgaagatctacggaaaaagtatgacaaatatggagaaaagggacttgaggataatcaaggtggccagtatgaaagctggaactattatcgttatgattttggtatttatgatgatgatcctgaaatcataacattggaaagaagagaatttgatgctgctgttaattctggagaactgtggtttgtaaatttttactccccaggctgttcacactgccatgatttagctcccacatggagagactttgctaaagaagtggatgggttacttcgaattggagctgttaactgtggtgatgatagaatgctttgccgaatgaaaggagtcaacagctatcccagcctcttcatttttcggtctggaatggccccagtgaaatatcatggagacagatcaaaggagagtttagtgagttttgcaatgcagcatgttagaagtacagtgacagaactttggacaggaaattttgtcaactccatacaaactgcttttgctgctggtattggctggctgatcactttttgttcaaaaggaggagattgtttgacttcacagacacgactcaggcttagtggcatgttggatggtcttgttaatgtaggatggatggactgtgccacccaggataacctttgtaaaagcttagatattacaacaagtactactgcttattttcctcctggagccactttaaataacaaagagaaaaacagtattttgctgcttcattgagagaatcagaccagcagagagagagagttatatgacaaaatatgctgaggataaaatattgacaaataaagaagatttgttagaagggccttttatactcgtttgtgttttaaataagagactcgggccgaaaacaagtttaagataagatctgtatcattgtattttactctaaaaactcctaagtggtttggtttttagatgaaaacctctataatgagcaaaagtccattccaattttccacttctaagttcctcttaattaatcttaattattggttggggaatgaagtgtctttgatagtctattattcttccttctagtgttataaaaattcttaagtgaatgtgtaaaacattggcattctgtaaaacatgattagcattaaaattaagctaaagataatgtggtttttcttgatgattgggaggtcactcaggatttttctgagcatttttatagaatacacatcatagttaattaaaaattccagttaatgca

SEQ ID NO: 463946 - DNA, 3654 bp, Homo sapiens
cgccggccgcattggtgagggggcgcgggctgcttggccagggcagttccctcagctccgggttggagccggagccggagccggatcccgcgcacaccgccacgtcaacctaaacctacaccgccctctccaccccaccgccgcagcgcccgctgggcccgcagcgggtctccccaggcagcgtcctccacgcctttcccacaatgctccgcgccaggccccgccccggctcgccgtggagaccggcgcgtgaggaacctaccggtaccggccgcgcgctggtagtcgccggtgtggctgcacctcaccaatcccgtgcgccgcggctgggccgtcggagagtgcgtgtgcttctctcctgcacgcggtgcttgggctcggccaggcggggtccgccgccagggtttgaggatgggggagtagctacaggaagcgaccccgcgatggcaaggtatatttttgtggaatgaaaaggaagtattagaaatgagctgaagaccattcacagattaatatttttggggacagatttgtgatgcttgattcacccttgaagtaatgtagacagaagttctcaaatttgcatattacatcaactggaaccagcagtgaatcttaatgttcacttaaatcagaacttgcataagaaagagaatgggagtctggttaaataaagatgactatatcagagacttgaaaaggatcattctctgttttctgatagtgtatatggccattttagtgggcacagatcaggatttttacagtttacttggagtgtccaaaactgcaagcagtagagaaataagacaagctttcaagaaattggcattgaagttacatcctgataaaaacccgaataacccaaatgcacatggcgattttttaaaaataaatagagcatatgaagtactcaaagatgaagatctacggaaaaagtatgacaaatatggagaaaagggacttgaggataatcaaggtggccagtatgaaagctggaactattatcgttatgattttggtatttatgatgatgatcctgaaatcataacattggaaagaagagaatttgatgctgctgttaattctggagaactgtggtttgtaaatttttactccccaggctgttcacactgccatgatttagctcccacatggagagactttgctaaagaagtggatgggttacttcgaattggagctgttaactgtggtgatgatagaatgctttgccgaatgaaaggagtcaacagctatcccagcctcttcatttttcggtctggaatggccccagtgaaatatcatggagacagatcaaaggagagtttagtgagttttgcaatgcagcatgttagaagtacagtgacagaactttggacaggaaattttgtcaactccatacaaactgcttttgctgctggtattggctggctgatcactttttgttcaaaaggaggagattgtttgacttcacagacacgactcaggcttagtggcatgttggatggtcttgttaatgtaggatggatggactgtgccacccaggataacctttgtaaaagcttagatattacaacaagtactactgcttattttcctcctggagccactttaaataacaaagagaaaaacagtattttgtttctcaactcattggatgctaaagaaatatatttggaagtaatacataatcttccagattttgaactactttcggcaaacacactagaggatcgtttggctcatcatcggtggctgttattttttcattttggaaaaaatgaaaattcaaatgatcctgagctgaaaaaactaaaaactctacttaaaaatgatcatattcaagttggcaggtttgactgttcctctgcaccagacatctgtagtaatctgtatgtttttcagccgtctctagcagtatttaaaggacaaggaaccaaagaatatgaaattcatcatggaaagaagattctatatgatatacttgcctttgccaaagaaagtgtgaattctcatgttaccacgcttggacctcaaaattttcctgccaatgacaaagaaccatggcttgttgatttctttgccccctggtgtccaccatgtcgagctttactaccagagttacgaagagcatcaaatcttctttatggtcagcttaagtttggtacactagattgtacagttcatgagggactctgtaacatgtataacattcaggcttatccaacaacagtggtattcaaccagtccaacattcatgagtatgaaggacatcactctgctgaacaaatcttggagttcatagaggatcttatgaatccttcagtggtctcccttacacccaccaccttcaacgaactagttacacaaagaaaacacaacgaagtctggatggttgatttctattctccgtggtgtcatccttgccaagtcttaatgccagaatggaaaagaatggcccggacattaactggactgatcaacgtgggcagtatagattgccaacagtatcattctttttgtgcccaggaaaacgttcaaagataccctgagataagattttttcccccaaaatcaaataaagcttatcagtatcacagttacaatggttggaatagggatgcttattccctgagaatctggggtctaggatttttacctcaagtatccacagatctaacacctcagactttcagtgaaaaagttctacaagggaaaaatcattgggtgattgatttctatgctccttggtgtggaccttgccagaattttgctccagaatttgagctcttggctaggatgattaaaggaaaagtgaaagctggaaaagtagactgtcaggcttatgctcagacatgccagaaagctgggatcagggcctatccaactgttaagttttatttctacgaaagagcaaagagaaattttcaagaagagcagataaataccagagatgcaaaagcaatcgctgccttaataagtgaaaaattggaaactctccgaaatcaaggcaagaggaataaggatgaactttgataatgttgaagatgaagaaaaagtttaaaagaaattctgacagatgacatcagaagacacctatttagaatgttacatttatgatgggaatgaatgaacattatcttagacttgcagttgtactgccagaattatctacagcactggtgtaaaagaagggtctgcaaactttttctgtaaagggccggtttataaatattttagactttgcaggctataatatatggttcacacatgagaacaagaatagagtcatcatgtattctttgttatttgcttttaacaacctttaaaaaatattaaaacgattcttagctcagagccatacaaaagtaggctggattcagtccatggaccatagattgctgtccccctcgacggacttataatgtttcaggtggctggcttgaacatgagtctgctgtgctatctacataaatgtctaagttgtataaagtccactttcccttcacgttttttggctgacctgaaaagaggtaacttagtttttggtcacttgttctcctaaaaatgctatccctaaccatatatttatatttcgttttaaaaacacccatgatgtggcacagtaaacaaaccctgttatgctgtattatt

SEQ ID NO: 463947 - DNA, 5018 bp, Homo sapiens
cgccggccgcattggtgagggggcgcgggctgcttggccagggcagttccctcagctccgggttggagccggagccggagccggatcccgcgcacaccgccacgtcaacctaaacctacaccgccctctccaccccaccgccgcagcgcccgctgggcccgcagcgggtctccccaggcagcgtcctccacgcctttcccacaatgctccgcgccaggccccgccccggctcgccgtggagaccggcgcgtgaggaacctaccggtaccggccgcgcgctggtagtcgccggtgtggctgcacctcaccaatcccgtgcgccgcggctgggccgtcggagagtgcgtgtgcttctctcctgcacgcggtgcttgggctcggccaggcggggtccgccgccagggtttgaggatgggggagtagctacaggaagcgaccccgcgatggcaaggtatatttttgtggaatgaaaaggaagtattagaaatgagctgaagaccattcacagattaatatttttggggacagatttgtgatgcttgattcacccttgaagtaatgtagacagaagttctcaaatttgcatattacatcaactggaaccagcagtgaatcttaatgttcacttaaatcagaacttgcataagaaagagaatgggagtctggttaaataaagatgactatatcagagacttgaaaaggatcattctctgttttctgatagtgtatatggccattttagtgggcacagatcaggatttttacagtttacttggagtgtccaaaactgcaagcagtagagaaataagacaagctttcaagaaattggcattgaagttacatcctgataaaaacccgaataacccaaatgcacatggcgattttttaaaaataaatagagcatatgaagtactcaaagatgaagatctacggaaaaagtatgacaaatatggagaaaagggacttgaggataatcaaggtggccagtatgaaagctggaactattatcgttatgattttggtatttatgatgatgatcctgaaatcataacattggaaagaagagaatttgatgctgctgttaattctggagaactgtggtttgtaaatttttactccccaggctgttcacactgccatgatttagctcccacatggagagactttgctaaagaagtggatgggttacttcgaattggagctgttaactgtggtgatgatagaatgctttgccgaatgaaaggagtcaacagctatcccagcctcttcatttttcggtctggaatggccccagtgaaatatcatggagacagatcaaaggagagtttagtgagttttgcaatgcagcatgttagaagtacagtgacagaactttggacaggaaattttgtcaactccatacaaactgcttttgctgctggtattggctggctgatcactttttgttcaaaaggaggagattgtttgacttcacagacacgactcaggcttagtggcatgttggatggtcttgttaatgtaggatggatggactgtgccacccaggataacctttgtaaaagcttagatattacaacaagtactactgcttattttcctcctggagccactttaaataacaaagagaaaaacagtattttgtttctcaactcattggatgctaaagaaatatatttggaagtaatacataatcttccagattttgaactactttcggcaaacacactagaggatcgtttggctcatcatcggtggctgttattttttcattttggaaaaaatgaaaattcaaatgatcctgagctgaaaaaactaaaaactctacttaaaaatgatcatattcaagttggcaggtttgactgttcctctgcaccagacatctgtagtaatctgtatgtttttcagccgtctctagcagtatttaaaggacaaggaaccaaagaatatgaaattcatcatggaaagaagattctatatgatatacttgcctttgccaaagaaagtgtgaattctcatgttaccacgcttggacctcaaaattttcctgccaatgacaaagaaccatggcttgttgatttctttgccccctggtgtccaccatgtcgagctttactaccagagttacgaagagcatcaaatcttctttatggtcagcttaagtttggtacactagattgtacagttcatgagggactctgtaacatgtataacattcaggcttatccaacaacagtggtattcaaccagtccaacattcatgagtatgaaggacatcactctgctgaacaaatcttggagttcatagaggatcttatgaatccttcagtggtctcccttacacccaccaccttcaacgaactagttacacaaagaaaacacaacgaagtctggatggttgatttctattctccgtggtgtcatccttgccaagtcttaatgccagaatggaaaagaatggcccggacattaactggactgatcaacgtgggcagtatagattgccaacagtatcattctttttgtgcccaggaaaacgttcaaagataccctgagataagattttttcccccaaaatcaaataaagcttatcagtatcacagttacaatggttggaatagggatgcttattccctgagaatctggggtctaggatttttacctcaagtatccacagatctaacacctcagactttcagtgaaaaagttctacaagggaaaaatcattgggtgattgatttctatgctccttggtgtggaccttgccagaattttgctccagaatttgagctcttggctaggatgattaaaggaaaagtgaaagctggaaaagtagactgtcaggcttatgctcagacatgccagaaagctgggatcagggcctatccaactgttaagttttatttctacgaaagagcaaagagaaattttcaagaagagcagataaataccagagatgcaaaagcaatcgctgccttaataagtgaaaaattggaaactctccgaaatcaaggcaagaggaataaggatgaactttgataatgttgaagatgaagaaaaagtttaaaagaaattctgacagatgacatcagaagacacctatttagaatgttacatttatgatgggaatgaatgaacattatcttagacttgcagttgtactgccagaattatctacagcactggtgtaaaagaagggtctgcaaactttttctgtaaagggccggtttataaatattttagactttgcaggctataatatatggttcacacatgagaacaagaatagagtcatcatgtattctttgttatttgcttttaacaacctttaaaaaatattaaaacgattcttagctcagagccatacaaaagtaggctggattcagtccatggaccatagattgctgtccccctcgacggacttataatgtttcaggtggctggcttgaacatgagtctgctgtgctatctacataaatgtctaagttgtataaagtccactttcccttcacgttttttggctgacctgaaaagaggtaacttagtttttggtcacttgttctcctaaaaatgctatccctaaccatatatttatatttcgttttaaaaacacccatgatgtggcacagtaaacaaaccctgttatgctgtattattatgaggagattcttcattgttttctttccttctcaaaggttgaaaaaatgcttttaatttttcacagccgagaaacagtgcagcagtatatgtgcacacagtaagtacacaaatttgagcaacagtaagtgcacaaattctgtagtttgctgtatcatccaggaaaacctgagggaaaaaaattatagcaattaactgggcattgtagagtatcctaaatatgttatcaagtatttagagttctatattttaaagatatatgtgttcatgtattttctgaaattgctttcatagaaattttcccactgatagttgatttttgaggcatctaatatttacatatttgccttctgaactttgttttgacctgtatcctttatttacattgggtttttctttcatagttttggtttttcactcctgtccagtctatttattattcaaataggaaaaattactttacaggttgttttactgtagcttataatgatactgtagttattccagttactagtttactgtcagagggctgcctttttcagataaatattgacataataactgaagttatttttataagaaaatcaagtatataaatctaggaaagggatcttctagtttctgtgttgtttagactcaaagaatcacaaatttgtcagtaacatgtagttgtttagttataattcagagtgtacagaatggtaaaaattccaatcagtcaaaagaggtcaatgaattaaaaggcttgcaactttttcaaaaacctgttagaatatgctttattgtgttttgaggagttttcctttttttcttttcaatatcactttatcctgctcaccagtatttcctcataagggttattatagccataattaatgttaaaatagactttgttcttcatattctcccatctttttcgctactatatactctgtctggattctgctgtatgcctgttggcatatatggaacagtcaccacttgtcacacttaacaccagctttttgaattatgatcagtaatggcaagagcctttcattctcgaatgtttaaagcctaggagttctacaaaattggcttctttctacaagaatcccaaaatggaatgcctaaagaagtcttacttgggtaaatacttactaaaatatactggttatgtgcatatcaccacactggacactgaggagtgttcaaaaggaatctaagacatggtccccatcttccaactgtctgtaattcactgttttgtcattgagctcataaggtacttacattactacctataaatgtttcctgtacttgttagttgttgagaaacattttaggcagtaaataaaatagtaaatattatgtgtcctaaaaat

SEQ ID NO: 463948 - DNA, 4364 bp, Homo sapiens
cgccggccgcattggtgagggggcgcgggctgcttggccagggcagttccctcagctccgggttggagccggagccggagccggatcccgcgcacaccgccacgtcaacctaaacctacaccgccctctccaccccaccgccgcagcgcccgctgggcccgcagcgggtctccccaggcagcgtcctccacgcctttcccacaatgctccgcgccaggccccgccccggctcgccgtggagaccggcgcgtgaggaacctaccggtaccggccgcgcgctggtagtcgccggtgtggctgcacctcaccaatcccgtgcgccgcggctgggccgtcggagagtgcgtgtgcttctctcctgcacgcggtgcttgggctcggccaggcggggtccgccgccagggtttgaggatgggggagtagctacaggaagcgaccccgcgatggcaaggtatatttttgtggaatgaaaaggaagtattagaaatgagctgaagaccattcacagattaatatttttggggacagatttgtgatgcttgattcacccttgaagtaatgtagacagaagttctcaaatttgcatattacatcaactggaaccagcagtgaatcttaatgttcacttaaatcagaacttgcataagaaagagaatgggagtctggttaaataaagatgactatatcagagacttgaaaaggatcattctctgttttctgatagtgtatatggccattttagtgggcacagatcaggatttttacagtttacttggagtgtccaaaactgcaagcagtagagaaataagacaagctttcaagaaattggcattgaagttacatcctgataaaaacccgaataacccaaatgcacatggcgattttttaaaaataaatagagcatatgaagtactcaaagatgaagatctacggaaaaagtatgacaaatatggagaaaagggacttgaggataatcaaggtggccagtatgaaagctggaactattatcgttatgattttggtatttatgatgatgatcctgaaatcataacattggaaagaagagaatttgatgctgctgttaattctggagaactgtggtttgtaaatttttactccccaggctgttcacactgccatgatttagctcccacatggagagactttgctaaagaagtggatgggttacttcgaattggagctgttaactgtggtgatgatagaatgctttgccgaatgaaaggagtcaacagctatcccagcctcttcatttttcggtctggaatggccccagtgaaatatcatggagacagatcaaaggagagtttagtgagttttgcaatgcagcatgttagaagtacagtgacagaactttggacaggaaattttgtcaactccatacaaactgcttttgctgctggtattggctggctgatcactttttgttcaaaaggaggagattgtttgacttcacagacacgactcaggcttagtggcatgttggatggtcttgttaatgtaggatggatggactgtgccacccaggataacctttgtaaaagcttagatattacaacaagtactactgcttattttcctcctggagccactttaaataacaaagagaaaaacagtattttgtttctcaactcattggatgctaaagaaatatatttggaagtaatacataatcttccagattttgaactactttcggcaaacacactagaggatcgtttggctcatcatcggtggctgttattttttcattttggaaaaaatgaaaattcaaatgatcctgagctgaaaaaactaaaaactctacttaaaaatgatcatattcaagttggcaggtttgactgttcctctgcaccagacatctgtagtaatctgtatgtttttcagccgtctctagcagtatttaaaggacaaggaaccaaagaatatgaaattcatcatggaaagaagattctatatgatatacttgcctttgccaaagaaagtgtgaattctcatgttaccacgcttggacctctggtgtccaccatgtcgagctttactaccagagttacgaagagcatcaaatcttctttatggtcagcttaagtttggtacactagattgtacagttcatgagggactctgtaacatgtataacattcaggcttatccaacaacagtggtattcaaccagtccaacattcatgagtatgaaggacatcactctgctgaacaaatcttggagttcatagaggatcttatgaatccttcagtggtctcccttacacccaccaccttcaacgaactagttacacaaagaaaacacaacgaagtctggatggttgatttctattctccgtggtgtcatccttgccaagtcttaatgccagaatggaaaagaatggcccggacattaactggactgatcaacgtgggcagtatagattgccaacagtatcattctttttgtgcccaggaaaacgttcaaagataccctgagataagattttttcccccaaaatcaaataaagcttatcagtatcacagttacaatggttggaatagggatgcttattccctgagaatctggggtctaggatttttacctcaagtatccacagatctaacacctcagactttcagtgaaaaagttctacaagggaaaaatcattgggtgattgatttctatgctccttggtgtggaccttgccagaattttgctccagaatttgagctcttggctaggatgattaaaggaaaagtgaaagctggaaaagtagactgtcaggcttatgctcagacatgccagaaagctgggatcagggcctatccaactgttaagttttatttctacgaaagagcaaagagaaattttcaagaagagcagataaataccagagatgcaaaagcaatcgctgccttaataagtgaaaaattggaaactctccgaaatcaaggcaagaggaataaggatgaactttgataatgttgaagatgaagaaaaagtttaaaagaaattctgacagatgacatcagaagacacctatttagaatgttacatttatgatgggaatgaatgaacattatcttagacttgcagttgtactgccagaattatctacagcactggtgtaaaagaagggtctgcaaactttttctgtaaagggccggtttataaatattttagactttgcaggctataatatatggttcacacatgagaacaagaatagagtcatcatgtattctttgttatttgcttttaacaacctttaaaaaatattaaaacgattcttagctcagagccatacaaaagtaggctggattcagtccatggaccatagattgctgtccccctcgacggacttataatgtttcaggtggctggcttgaacatgagtctgctgtgctatctacataaatgtctaagttgtataaagtccactttcccttcacgttttttggctgacctgaaaagaggtaacttagtttttggtcacttgttctcctaaaaatgctatccctaaccatatatttatatttcgttttaaaaacacccatgatgtggcacagtaaacaaaccctgttatgctgtattattatgaggagattcttcattgttttctttccttctcaaaggttgaaaaaatgcttttaatttttcacagccgagaaacagtgcagcagtatatgtgcacacagtaagtacacaaatttgagcaacagtaagtgcacaaattctgtagtttgctgtatcatccaggaaaacctgagggaaaaaaattatagcaattaactgggcattgtagagtatcctaaatatgttatcaagtatttagagttctatattttaaagatatatgtgttcatgtattttctgaaattgctttcatagaaattttcccactgatagttgatttttgaggcatctaatatttacatatttgccttctgaactttgttttgacctgtatcctttatttacattgggtttttctttcatagttttggtttttcactcctgtccagtctatttattattcaaataggaaaaattactttacaggttgttttactgtagcttataatgatactgtagttattccagttactagtttactgtcagagggctgcctttttcagataaatattgacataataactgaagttatttttataagaaaatcaagtatataaatctaggaaagggatcttctagtttctgtgttgtttagactcaaagaatcacaaatttgtcagtaacatgtagttgtttagttataattcagagtgtacagaatggtaaaaattccaatcagtcaaaagaggtcaatgaattaaaaggcttgcaactttttcaaaaa

SEQ ID NO: 463949 - DNA, 3061 bp, Homo sapiens
atagatggcgtcttcatgagtacaggaaattttgtcaactccatacaaactgcttttgctgctggtattggctggctgatcactttttgttcaaaaggaggagattgtttgacttcacagacacgactcaggcttagtggcatgttggatggtcttgttaatgtaggatggatggactgtgccacccaggataacctttgtaaaagcttagatattacaacaagtactactgcttattttcctcctggagccactttaaataacaaagagaaaaacagtattttgtttctcaactcattggatgctaaagaaatatatttggaagtaatacataatcttccagattttgaactactttcggcaaacacactagaggatcgtttggctcatcatcggtggctgttattttttcattttggaaaaaatgaaaattcaaatgatcctgagctgaaaaaactaaaaactctacttaaaaatgatcatattcaagttggcaggtttgactgttcctctgcaccagacatctgtagtaatctgtatgtttttcagccgtctctagcagtatttaaaggacaaggaaccaaagaatatgaaattcatcatggaaagaagattctatatgatatacttgcctttgccaaagaaagtgtgaattctcatgttaccacgcttggacctcaaaattttcctgccaatgacaaagaaccatggcttgttgatttctttgccccctggtgtccaccatgtcgagctttactaccagagttacgaagagcatcaaatcttctttatggtcagcttaagtttggtacactagattgtacagttcatgagggactctgtaacatgtataacattcaggcttatccaacaacagtggtattcaaccagtccaacattcatgagtatgaaggacatcactctgctgaacaaatcttggagttcatagaggatcttatgaatccttcagtggtctcccttacacccaccaccttcaacgaactagttacacaaagaaaacacaacgaagtctggatggttgatttctattctccgtggtgtcatccttgccaagtcttaatgccagaatggaaaagaatggcccggacattaactggactgatcaacgtgggcagtatagattgccaacagtatcattctttttgtgcccaggaaaacgttcaaagataccctgagataagattttttcccccaaaatcaaataaagcttatcagtatcacagttacaatggttggaatagggatgcttattccctgagaatctggggtctaggatttttacctcaagtatccacagatctaacacctcagactttcagtgaaaaagttctacaagggaaaaatcattgggtgattgatttctatgctccttggtgtggaccttgccagaattttgctccagaatttgagctcttggctaggatgattaaaggaaaagtgaaagctggaaaagtagactgtcaggcttatgctcagacatgccagaaagctgggatcagggcctatccaactgttaagttttatttctacgaaagagcaaagagaaattttcaagaagagcagataaataccagagatgcaaaagcaatcgctgccttaataagtgaaaaattggaaactctccgaaatcaaggcaagaggaataaggatgaactttgataatgttgaagatgaagaaaaagtttaaaagaaattctgacagatgacatcagaagacacctatttagaatgttacatttatgatgggaatgaatgaacattatcttagacttgcagttgtactgccagaattatctacagcactggtgtaaaagaagggtctgcaaactttttctgtaaagggccggtttataaatattttagactttgcaggctataatatatggttcacacatgagaacaagaatagagtcatcatgtattctttgttatttgcttttaacaacctttaaaaaatattaaaacgattcttagctcagagccatacaaaagtaggctggattcagtccatggaccatagattgctgtccccctcgacggacttataatgtttcaggtggctggcttgaacatgagtctgctgtgctatctacataaatgtctaagttgtataaagtccactttcccttcacgttttttggctgacctgaaaagaggtaacttagtttttggtcacttgttctcctaaaaatgctatccctaaccatatatttatatttcgttttaaaaacacccatgatgtggcacagtaaacaaaccctgttatgctgtattattatgaggagattcttcattgttttctttccttctcaaaggttgaaaaaatgcttttaatttttcacagccgagaaacagtgcagcagtatatgtgcacacagtaagtacacaaatttgagcaacagtaagtgcacaaattctgtagtttgctgtatcatccaggaaaacctgagggaaaaaaattatagcaattaactgggcattgtagagtatcctaaatatgttatcaagtatttagagttctatattttaaagatatatgtgttcatgtattttctgaaattgctttcatagaaattttcccactgatagttgatttttgaggcatctaatatttacatatttgccttctgaactttgttttgacctgtatcctttatttacattgggtttttctttcatagttttggtttttcactcctgtccagtctatttattattcaaataggaaaaattactttacaggttgttttactgtagcttataatgatactgtagttattccagttactagtttactgtcagagggctgcctttttcagataaatattgacataataactgaagttatttttataagaaaatcaagtatataaatctaggaaagggatcttctagtttctgtgttgtttagactcaaagaatcacaaatttgtcagtaacatgtagttgtttagttataattcagagtgtacagaatggtaaaaattccaatcagtcaaaagaggtcaatgaattaaaaggcttgcaactttttcaaaaa

SEQ ID NO: 463950 - DNA, 2355 bp, Homo sapiens
gttgaacgtccttctgggtgtccattgttagcccctacacagcacggaaaaactcactccgcgtttccaaatacaacccggctcgtgccgagcttaagtttggtacactagattgtacagttcatgagggactctgtaacatgtataacattcaggcttatccaacaacagtggtattcaaccagtccaacattcatgagtatgaaggacatcactctgctgaacaaatcttggagttcatagaggatcttatgaatccttcagtggtctcccttacacccaccaccttcaacgaactagttacacaaagaaaacacaacgaagtctggatggttgatttctattctccgtggtgtcatccttgccaagtcttaatgccagaatggaaaagaatggcccggacattaactggactgatcaacgtgggcagtatagattgccaacagtatcattctttttgtgcccaggaaaacgttcaaagataccctgagataagattttttcccccaaaatcaaataaagcttatcagtatcacagttacaatggttggaatagggatgcttattccctgagaatctggggtctaggatttttacctcaagtatccacagatctaacacctcagactttcagtgaaaaagttctacaagggaaaaatcattgggtgattgatttctatgctccttggtgtggaccttgccagaattttgctccagaatttgagctcttggctaggatgattaaaggaaaagtgaaagctggaaaagtagactgtcaggcttatgctcagacatgccagaaagctgggatcagggcctatccaactgttaagttttatttctacgaaagagcaaagagaaattttcaagaagagcagataaataccagagatgcaaaagcaatcgctgccttaataagtgaaaaattggaaactctccgaaatcaaggcaagaggaataaggatgaactttgataatgttgaagatgaagaaaaagtttaaaagaaattctgacagatgacatcagaagacacctatttagaatgttacatttatgatgggaatgaatgaacattatcttagacttgcagttgtactgccagaattatctacagcactggtgtaaaagaagggtctgcaaactttttctgtaaagggccggtttataaatattttagactttgcaggctataatatatggttcacacatgagaacaagaatagagtcatcatgtattctttgttatttgcttttaacaacctttaaaaaatattaaaacgattcttagctcagagccatacaaaagtaggctggattcagtccatggaccatagattgctgtccccctcgacggacttataatgtttcaggtggctggcttgaacatgagtctgctgtgctatctacataaatgtctaagttgtataaagtccactttcccttcacgttttttggctgacctgaaaagaggtaacttagtttttggtcacttgttctcctaaaaatgctatccctaaccatatatttatatttcgttttaaaaacacccatgatgtggcacagtaaacaaaccctgttatgctgtattattatgaggagattcttcattgttttctttccttctcaaaggttgaaaaaatgcttttaatttttcacagccgagaaacagtgcagcagtatatgtgcacacagtaagtacacaaatttgagcaacagtaagtgcacaaattctgtagtttgctgtatcatccaggaaaacctgagggaaaaaaattatagcaattaactgggcattgtagagtatcctaaatatgttatcaagtatttagagttctatattttaaagatatatgtgttcatgtattttctgaaattgctttcatagaaattttcccactgatagttgatttttgaggcatctaatatttacatatttgccttctgaactttgttttgacctgtatcctttatttacattgggtttttctttcatagttttggtttttcactcctgtccagtctatttattattcaaataggaaaaattactttacaggttgttttactgtagcttataatgatactgtagttattccagttactagtttactgtcagagggctgcctttttcagataaatattgacataataactgaagttatttttataagaaaatcaagtatataaatctaggaaagggatcttctagtttctgtgttgtttagactcaaagaatcacaaatttgtcagtaacatgtagttgtttagttataattcagagtgtacagaatggtaaaaattccaatcagtcaaaagaggtcaatgaattaaaaggcttgcaactttttcaaaaa

SEQ ID NO: 463951 - DNA, 1647 bp, Homo sapiens
cgcgggtccccgcttgatcaaggtggacggctatgccactgaagcattatctccttttgctggtgggctgccaagcctggggtgcagggttggcctaccatggctgccctagcgagtgtacctgctccagggcctcccaggtggagtgcaccggggcacgcattgtggcggtgcccacccctctgccctggaacgccatgagcctgcagatcctcaacacgcacatcactgaactcaatgagtccccgttcctcaatatttcagccctcatcgccctgaggattgagaagaatgagctgtcgcgcatcacgcctggggccttccgaaacctgggctcgctgcgctatctcagcctcgccaacaacaagctgcaggttctgcccatcggcctcttccagggcctggacagccttgagtctctccttctgtccagtaaccagctgttgcagatccagccggcccacttctcccagtgcagcaacctcaaggagctgcagttgcacggcaaccacctggaatacatccctgacggagccttcgaccacctggtaggactcacgaagctcaatctgggcaagaatagcctcacccacatctcacccagggtcttccagcacctgggcaatctccaggtcctccggctgtatgagaacaggctcacggatatccccatgggcacttttgatgggcttgttaacctgcaggaactggctctacagcagaaccagattggactgctctcccctggtctcttccacaacaaccacaacctccagagactctacctgtccaacaaccacatctcccagctgccacccagcatcttcatgcagctgccccagctcaaccgtcttactctctttgggaattccctgaaggagctctctctggggatcttcgggcccatgcccaacctgcgggagctttggctctatgacaaccacatctcttctctacccgacaatgtcttcagcaacctccgccagttgcaggtcctgattcttagccgcaatcagatcagcttcatctccccgggtgccttcaacgggctaacggagcttcgggagctgtccctccacaccaacgcactgcaggacctggacgggaatgtcttccgcatgttggccaacctgcagaacatctccctgcagaacaatcgcctcagacagctcccagggaatatcttcgccaacgtcaatggcctcatggccatccagctgcagaacaaccagctggagaacttgcccctcggcatcttcgatcacctggggaaactgtgtgagctgcggctgtatgacaatccctggaggtgtgactcagacatccttccgctccgcaactggctcctgctcaaccagcctaggttagggacggacactgtacctgtgtgtttcagcccagccaatgtccgaggccagtccctcattatcatcaatgtcaacgttgctgttccaagcgtccatgtacctgagggcctgactgccttctcagtgcctggccccgagccaggtgctggggtgcagagctgcttgcagagacaccacagcaagactgcagtaccacgggctcagtcgggtgggtgcaactgactagaaaacagagcggaagagcccaaacattcaacacagtacaagagggatccgagga

SEQ ID NO: 463952 - DNA, 446 bp, Homo sapiens
  misc_feature (3)..(3): n is a, c, g, or t
canaacacatttcacacaataaccaacaaaaacataataaaaatttccacaccccacaacataagaaatttggcccaaaagaccaaaaattcggcacagtcggcaaaagaactcaattaattggtattgtatatctaatatgtgatatttgaactgaataaaacttacagtgttgtaaatgttctttaataaataatcacacctaagtaataggctagactgatgagaaattagatcaaatcagtgcctaggcctttgtgtttgtgtcgtagggatgtactaacacatcaccacagactgacggcttttcacaataaatcagttttcttcgctcacatttctggacattagaaatccaaagccaaggtgccagtagggccgggctttctctgaaggccccaggaaaactcctccttcatctcctccagctggtgtggctgctggcc

SEQ ID NO: 463953 - DNA, 3063 bp, Homo sapiens
ggactttaattttaatttattatttgttttattagagtgtctgtgttcaatatgggatattagggcgttgggtactatgaccacaggaaatttagacaggctacagttaaagtgaagcataccttacccatccaccccccattttatatttagttgcctttttaaaaagattataggggtacaatgtttagatttagtgggatctccaggtataactgtaatttgagccccagtgttaagactatgaagctttgtcaatgggtacattttagcaaatgttacaattaatttagaacctaagttatggagacacaaaagccaataggcacccttttatgttttggttaaatgtttcagtatatacatcttatttatttgtaatattagtatataatttgttgtatacatttttagtgtataagcattggatttctaattggatcagattagggaccttccgtttagctgcatatgtacatatacatgtacaatttattatatatttgcgttaaaatagcctatctgcatgtgtatatatgtgtgtatgtgtatgtatatgcactcacacgcataaatacacagtctatttagttacctttaatgttttttcccttgtacctaggctttttctcgctttttcctttttttctgattttgtggcaatttagttggaaggaggcggtcccagcatgttgacaggcagggtgttcagagtgcccaggcacactggtggggggtggttacaggctcacgtagctcaggggcttctgcaggtctcaggggagtgggaacaaagtgtcccaccccttccccttttcctcaaacctcaagccactggtctctatggatagatcctttgcatcccaccggattgaggaatgagtcacaacagctgcaaggctcttaaagcaacatttaaaccttttggcggctgtcatttctgtgaggagggtgcctctcaccagccgcatggccggaggatccctgcagcgctttggagaccaacacccagatcctttgcccaggagtgcgattaattcctcactggatgctgggggagggcccctcaggtgagcagcccaccactgacttcagcgttgctggctcggttatcagactctcatccaacacaagctcacagggaaagccgttccttgctccttgtggagggagctaccgtcattgccctgagaccaccagccaagaaagtaggtatgtccaggtagggaattcagagggacccagtgcatccaattatacaattatacccagaaggtcctgtgtaggggactgcgattgacatcaccctagtctgcagcaccaaggactgaatgagctcagtcctcttataatttaggctggactgtcacagacactggcagacacagcatacgtggtgcagccaaagtgcaaacatgccagcagcggccatgctccccagggtgggggtccagttagtaagccacgcgcagccaagaggcgaggcatgccctgtgccacacacggactcaccctgctcactgtgcccgtggtatcgaaatgtacccacgtttaattcataaaggagaggctgctgtcattgaaagaaaagtttgttacttgcatttctggagaaaaggagcgcaccaggccacgcagggccacaggaggaggacgcaccagagtggtcaggaggcagaactaggcgagcagctttccactgtgtctccatggcaaaggcgaagatgggcgggggcagagtgtaggattggcaggtttgaatgtcttgggcagtagctacaggggtggtctccagctgcctggtgcctggccctgggtgatcagggtgaggggatactgccttctgcagtggaagagtcaaatcgaggagatggactctgagttggttagtgtgcaaaggtgcactcccaagggacccctttgctatctctaagaattggcctgccctgggaagggcagtctctccccagtcagtgaggtccccaagatgtgaaaacattatacattataaaaaagcatgattaatataagctcattctagcatttcaggttacagcttctagaagaggtttgtagtctcaaatgagtaggtttttcctctagagaggggcgggcctggaccttcaagcaccccttggtgtgtttaggagctcaggagcagaagcacctgcctgcagccctgcagctaaggaagttctctcagtcactcagagcagggaggggctgagagagtcatgtgaggctcccggggtactacgacagccctcgaggtgaaggattggccctgatcataatagagaaccctgaggaagtttactgtcatgagtctcggctggttggcgcatgtgacctttgaaggatgaagatggagtttgcaacatgagtatctctaaccttttgcttttcagggatcattttcaaaaattgcattggggccttcgttatttaccatagtattttcactttcatagttttgtcacctttttgtactgtgaacagttcaaccagtgaccgacttctctctcatgctgtttaccccacacacaatttcccactcaattctgaaaataagaacctgttaataggttggaaagctgtgtactctattcatatattgttctttcatgctagtggagagtggtgtcattagcatcttaattttagagttgtgaaatgattttaccaattaggaattgaatgtgtattttttttctgtttaataagaagagcaaatttgaataaataagctggtgtagataaacttaataatcatgctttttcttgtttggagataggtgatgtgttgtcatatcctgtgatacaggtcactcatctggccttctgtttctgaagtttaagtctggtttgaatatgtaataatactactcagcatttcttgttgcctaagtgagacgaaacttaaatgttatgatatttacttcatgtattcttgtactgttcatttcaattaattggtattgtatatctaatatgtgatatttgaactgaataaaacttacagtgttgtaaatgttctttaataaataatcacacctaagtaat

SEQ ID NO: 463954 - DNA, 3007 bp, Homo sapiens
ggactttaattttaatttattatttgttttattagagtgtctgtgttcaatatgggatattagggcgttgggtactatgaccacaggaaatttagacaggctacagttaaagtgaagcataccttacccatccaccccccattttatatttagttgcctttttaaaaagattataggggtacaatgtttagatttagtgggatctccaggtataactgtaatttgagccccagtgttaagactatgaagctttgtcaatgggtacattttagcaaatgttacaattaatttagaacctaagttatggagacacaaaagccaataggcacccttttatgttttggttaaatgtttcagtatatacatcttatttatttgtaatattagtatataatttgttgtatacatttttagtgtataagcattggatttctaattggatcagattagggaccttccgtttagctgcatatgtacatatacatgtacaatttattatatatttgcgttaaaatagcctatctgcatgtgtatatatgtgtgtatgtgtatgtatatgcactcacacgcataaatacacagtctatttagttacctttaatgttttttcccttgtacctaggctttttctcgctttttcctttttttctgattttgtggcaatttagttggaaggaggcggtcccagcatgttgacaggcagggtgttcagagtgcccaggcacactggtggggggtggttacaggctcacgtagctcaggggcttctgcaggtctcaggggagtgggaacaaagtgtcccaccccttccccttttcctcaaacctcaagccactggtctctatggatagatcctttgcatcccaccggattgaggaatgagtcacaacagctgcaaggctcttaaagcaacatttaaaccttttggcggctgtcatttctgtgaggagggtgcctctcaccagccgcatggccggaggatccctgcagcgctttggagaccaacacccagatcctttgcccaggagtgcgattaattcctcactggatgctgggggagggcccctcaggtgagcagcccaccactgacttcagcgttgctggctcggttatcagactctcatccaacacaagctcacagggaaagccgttccttgctccttgtggagggagctaccgtcattgccctgagaccaccagccaagaaagtaggtatgtccaggtagggaattcagagggacccagtgcatccaattatacaattatacccagaaggtcctgtgtaggggactgcgattgacatcaccctagtctgcagcaccaaggactgaatgagctcagtcctcttataatttaggctggactgtcacagacactggcagacacagcatacgtggtgcagccaaagtgcaaacatgccagcagcggccatgctccccagggtgggggtccagttagtaagccacgcgcagccaagaggcgaggcatgccctgtgccacacacggactcaccctgctcactgtgcccgtggtatcgaaatgtacccacgtttaattcataaaggagaggctgctgtcattgaaagaaaagtttgttacttgcatttctggacaggaggcagaactaggcgagcagctttccactgtgtctccatggcaaaggcgaagatgggcgggggcagagtgtaggattggcaggtttgaatgtcttgggcagtagctacaggggtggtctccagctgcctggtgcctggccctgggtgatcagggtgaggggatactgccttctgcagtggaagagtcaaatcgaggagatggactctgagttggttagtgtgcaaaggtgcactcccaagggacccctttgctatctctaagaattggcctgccctgggaagggcagtctctccccagtcagtgaggtccccaagatgtgaaaacattatacattataaaaaagcatgattaatataagctcattctagcatttcaggttacagcttctagaagaggtttgtagtctcaaatgagtaggtttttcctctagagaggggcgggcctggaccttcaagcaccccttggtgtgtttaggagctcaggagcagaagcacctgcctgcagccctgcagctaaggaagttctctcagtcactcagagcagggaggggctgagagagtcatgtgaggctcccggggtactacgacagccctcgaggtgaaggattggccctgatcataatagagaaccctgaggaagtttactgtcatgagtctcggctggttggcgcatgtgacctttgaaggatgaagatggagtttgcaacatgagtatctctaaccttttgcttttcagggatcattttcaaaaattgcattggggccttcgttatttaccatagtattttcactttcatagttttgtcacctttttgtactgtgaacagttcaaccagtgaccgacttctctctcatgctgtttaccccacacacaatttcccactcaattctgaaaataagaacctgttaataggttggaaagctgtgtactctattcatatattgttctttcatgctagtggagagtggtgtcattagcatcttaattttagagttgtgaaatgattttaccaattaggaattgaatgtgtattttttttctgtttaataagaagagcaaatttgaataaataagctggtgtagataaacttaataatcatgctttttcttgtttggagataggtgatgtgttgtcatatcctgtgatacaggtcactcatctggccttctgtttctgaagtttaagtctggtttgaatatgtaataatactactcagcatttcttgttgcctaagtgagacgaaacttaaatgttatgatatttacttcatgtattcttgtactgttcatttcaattaattggtattgtatatctaatatgtgatatttgaactgaataaaacttacagtgttgtaaatgttctttaataaataatcacacctaagtaat

SEQ ID NO: 463955 - DNA, 2623 bp, Homo sapiens
ggactttaattttaatttattatttgttttattagagtgtctgtgttcaatatgggatattagggcgttgggtactatgaccacaggaaatttagacaggctacagttaaagtgaagcataccttacccatccaccccccattttatatttagttgcctttttaaaaagattataggggtacaatgtttagatttagtgggatctccaggtataactgtaatttgagccccagtgttaagactatgaagctttgtcaatgggtacattttagcaaatgttacaattaatttagaacctaagttatggagacacaaaagccaataggcacccttttatgttttggttaaatgtttcagtatatacatcttatttatttgtaatattagtatataatttgttgtatacatttttagtgtataagcattggatttctaattggatcagattagggaccttccgtttagctgcatatgtacatatacatgtacaatttattatatatttgcgttaaaatagcctatctgcatgtgtatatatgtgtgtatgtgtatgtatatgcactcacacgcataaatacacagtctatttagttacctttaatgttttttcccttgtacctaggctttttctcgctttttcctttttttctgattttgtggcaatttagttggaaggaggcggtcccagcatgttgacaggcagggtgttcagagtgcccaggcacactggtggggggtggttacaggctcacgtagctcaggggcttctgcaggtctcaggggagtgggaacaaagtgtcccaccccttccccttttcctcaaacctcaagccactggtctctatggatagatcctttgcatcccaccggattgaggaatgagtcacaacagctgcaaggctcttaaagcaacatttaaaccttttggcggctgtcatttctgtgaggagggtgcctctcaccagccgcatggccggaggatccctgcagcgctttggagaccaacacccagatcctttgcccaggagtgcgattaattcctcactggatgctgggggagggcccctcaggtgagcagcccaccactgacttcagcgttgctggctcggttatcagactctcatccaacacaagctcacagggaaagccgttccttgctccttgtggagggagctaccgtcattgccctgagaccaccagccaagaaagtaggtatgtccaggtagggcaggaggcagaactaggcgagcagctttccactgtgtctccatggcaaaggcgaagatgggcgggggcagagtgtaggattggcaggtttgaatgtcttgggcagtagctacaggggtggtctccagctgcctggtgcctggccctgggtgatcagggtgaggggatactgccttctgcagtggaagagtcaaatcgaggagatggactctgagttggttagtgtgcaaaggtgcactcccaagggacccctttgctatctctaagaattggcctgccctgggaagggcagtctctccccagtcagtgaggtccccaagatgtgaaaacattatacattataaaaaagcatgattaatataagctcattctagcatttcaggttacagcttctagaagaggtttgtagtctcaaatgagtaggtttttcctctagagaggggcgggcctggaccttcaagcaccccttggtgtgtttaggagctcaggagcagaagcacctgcctgcagccctgcagctaaggaagttctctcagtcactcagagcagggaggggctgagagagtcatgtgaggctcccggggtactacgacagccctcgaggtgaaggattggccctgatcataatagagaaccctgaggaagtttactgtcatgagtctcggctggttggcgcatgtgacctttgaaggatgaagatggagtttgcaacatgagtatctctaaccttttgcttttcagggatcattttcaaaaattgcattggggccttcgttatttaccatagtattttcactttcatagttttgtcacctttttgtactgtgaacagttcaaccagtgaccgacttctctctcatgctgtttaccccacacacaatttcccactcaattctgaaaataagaacctgttaataggttggaaagctgtgtactctattcatatattgttctttcatgctagtggagagtggtgtcattagcatcttaattttagagttgtgaaatgattttaccaattaggaattgaatgtgtattttttttctgtttaataagaagagcaaatttgaataaataagctggtgtagataaacttaataatcatgctttttcttgtttggagataggtgatgtgttgtcatatcctgtgatacaggtcactcatctggccttctgtttctgaagtttaagtctggtttgaatatgtaataatactactcagcatttcttgttgcctaagtgagacgaaacttaaatgttatgatatttacttcatgtattcttgtactgttcatttcaattaattggtattgtatatctaatatgtgatatttgaactgaataaaacttacagtgttgtaaatgttctttaataaataatcacacctaagtaat

SEQ ID NO: 463956 - DNA, 3029 bp, Homo sapiens
ggactttaattttaatttattatttgttttattagagtgtctgtgttcaatatgggatattagggcgttgggtactatgaccacaggaaatttagacaggctacagttaaagtgaagcataccttacccatccaccccccattttatatttagttgcctttttaaaaagattataggggtacaatgtttagatttagtgggatctccaggtataactgtaatttgagccccagtgttaagactatgaagctttgtcaatgggtacattttagcaaatgttacaattaatttagaacctaagttatggagacacaaaagccaataggcacccttttatgttttggttaaatgtttcagtatatacatcttatttatttgtaatattagtatataatttgttgtatacatttttagtgtataagcattggatttctaattggatcagattagggaccttccgtttagctgcatatgtacatatacatgtacaatttattatatatttgcgttaaaatagcctatctgcatgtgtatatatgtgtgtatgtgtatgtatatgcactcacacgcataaatacacagtctatttagttacctttaatgttttttcccttgtacctaggctttttctcgctttttcctttttttctgattttgtggcaatttagttggaaggaggcggtcccagcatgttgacaggcagggtgttcagagtgcccaggcacactggtggggggtggttacaggctcacgtagctcaggggcttctgcaggtctcaggggagtgggaacaaagtgtcccaccccttccccttttcctcaaacctcaagccactggtctctatggatagatcctttgcatcccaccggattgaggaatgagtcacaacagctgcaaggctcttaaagcaacatttaaaccttttggcggctgtcatttctgtgaggagggtgcctctcaccagccgcatggccggaggatccctgcagcgctttggagaccaacacccagatcctttgcccaggagtgcgattaattcctcactggatgctgggggagggcccctcaggtgagcagcccaccactgacttcagcgttgctggctcggttatcagactctcatccaacacaagctcacagggaaagccgttccttgctccttgtggagggagctaccgtcattgccctgagaccaccagccaagaaagtaggtatgtccaggtagggaattcagagggacccagtgcatccaattatacaattatacccagaaggtcctgtgtaggggactgcgattgacatcaccctagtctgcagcaccaaggactgaatgagctcagtcctcttataatttaggctggactgtcacagacactggcagacacagcatacgtggtgcagccaaagtgcaaacatgccagcagcggccatgctccccagggtgggggtccagttagtaagccacgcgcagccaagaggcgaggcatgccctgtgccacacacggactcaccctgctcactgtgcccgtggtatcgaaatgtacccacgtttaattcataaaggagaggctgctgtcattgaaagaaaagtttgttacttgcatttctggagaaaaggagcgcaccaggccacgcagggccacaggaggaggacgcaccagagtggtcaggaggcagaactaggcgagcagctttccactgtgtctccatggcaaaggcgaagatgggcgggggcagagtgtaggattggcaggtttgaatgtcttgggcagtagctacaggggtggtctccagctgcctggtgcctggccctgggtgatcagggtgaggggatactgccttctgcagtggaagagtcaaatcgaggagatggactctgagttggttagtgtgcaaaggtgcactcccaagggacccctttgctatctctaagaattggcctgccctgggaagggcagtctctccccagtcagtgaggtccccaagatgtgaaaacattatacattataaaaaagcatgattaatataagctcattctagcatttcaggttacagcttctagaagaggtttgtagtctcaaatgagtaggtttttcctctagagaggggcgggcctggaccttcaagcaccccttggtgtgtttaggagctcaggagcagaagcacctgcctgcagccctgcagctaaggaagttctctcagtcactcagagcagggaggggctgagagagtcatgtgaggctcccggggtactacgacagccctcgaggtgaaggattggccctgatcataatagagaaccctgaggaagtttactgtcatgagtctcggctggttggcgcatgtgacctttgaaggatgaagatggagtttgcaacatgagtatctctaaccttttgcttttcagggatcattttcaaaaattgcattggggccttcgttatttaccatagtattttcactttcatagttttgtcacctttttgtactgtgaacagttcaaccagtgaccgacttctctctcatgctgtttaccccacacacaatttcccactcaattctgaaaataagaacctgttaataggttggaaagctgtgtactctattcatatattgttctttcatgctagtggagagtggtgtcattagcatcttaattttagagttgtgaaatgattttaccaattaggaattgaatgtgtattttttttctgtttaataagaagagcaaatttgaataaataagctggtgtagataaacttaataatcatgctttttcttgtttggagataggtgatgtgttgtcatatcctgtgatacaggtcactcatctggccttctgtttctgaagtttaagtctggtttgaatatgtaataatactactcagcatttcttgttgcctaagtgagacgaaacttaaatgttatgatatttacttcatgtattcttgtactgttcatttcaattaattggtattgtatatctaatatgtgatatttgaactgaataaaacttacagtgttgta

SEQ ID NO: 463957 - DNA, 3009 bp, Homo sapiens
ggactttaattttaatttattatttgttttattagagtgtctgtgttcaatatgggatattagggcgttgggtactatgaccacaggaaatttagacaggctacagttaaagtgaagcataccttacccatccaccccccattttatatttagttgcctttttaaaaagattataggggtacaatgtttagatttagtgggatctccaggtataactgtaatttgagccccagtgttaagactatgaagctttgtcaatgggtacattttagcaaatgttacaattaatttagaacctaagttatggagacacaaaagccaataggcacccttttatgttttggttaaatgtttcagtatatacatcttatttatttgtaatattagtatataatttgttgtatacatttttagtgtataagcattggatttctaattggatcagattagggaccttccgtttagctgcatatgtacatatacatgtacaatttattatatatttgcgttaaaatagcctatctgcatgtgtatatatgtgtgtatgtgtatgtatatgcactcacacgcataaatacacagtctatttagttacctttaatgttttttcccttgtacctaggctttttctcgctttttcctttttttctgattttgtggcaatttagttggaaggaggcggtcccagcatgttgacaggcagggtgttcagagtgcccaggcacactggtggggggtggttacaggctcacgtagctcaggggcttctgcaggtctcaggggagtgggaacaaagtgtcccaccccttccccttttcctcaaacctcaagccactggtctctatggatagatcctttgcatcccaccggattgaggaatgagtcacaacagctgcaaggctcttaaagcaacatttaaaccttttggcggctgtcatttctgtgaggagggtgcctctcaccagccgcatggccggaggatccctgcagcgctttggagaccaacacccagatcctttgcccaggagtgcgattaattcctcactggatgctgggggagggcccctcaggtgagcagcccaccactgacttcagcgttgctggctcggttatcagactctcatccaacacaagctcacagggaaagccgttccttgctccttgtggagggagctaccgtcattgccctgagaccaccagccaagaaagtaggtatgtccaggtagggaattcagagggacccagtgcatccaattatacaattatacccagaaggtcctgtgtaggggactgcgattgacatcaccctagtctgcagcaccaaggactgaatgagctcagtcctcttataatttaggctggactgtcacagacactggcagacacagcatacgtggtgcagccaaagtgcaaacatgccagcagcggccatgctccccagggtgggggtccagttagtaagccacgcgcagccaagaggcgaggcatgccctgtgccacacacggactcaccctgctcactgtgcccgtggtatcgaaatgtacccacgtttaattcataaaggagaggctgctgtcattgaaagaaaagtttgttacttgcatttctggagaaaaggagcgcaccaggccacgcagggccacaggaggaggacgcaccagagtggtcaggaggcagaactaggcgagcagctttccactgtgtctccatggcaaaggcgaagatgggcgggggcagagtgtaggattggcaggtttgaatgtcttgggcagtagctacaggggtggtctccagctgcctggtgcctggccctgggtgatcagggtgaggggatactgccttctgcagtggaagagtcaaatcgaggagatggactctgagttggttagtgtgcaaaggtgcactcccaagggacccctttgctatctctaagaattggcctgccctgggaagggcagtctctccccagtcagtgaggtccccaagatgtgaaaacattatacattataaaaaagcatgattaatataagctcattctagcatttcaggttacagcttctagaagaggtttgtagtctcaaatgagtaggtttttcctctagagaggggcgggcctggaccttcaagcaccccttggtgtgtttaggagctcaggagcagaagcacctgcctgcagccctgcagctaaggaagttctctcagtcactcagagcagggaggggctgagagagtcatgtgaggctcccggggtactacgacagccctcgaggtgaaggattggccctgatcataatagagaaccctgaggaagtttactgtcatgagtctcggctggttggcgcatgtgacctttgaaggatgaagatggagtttgcaacatgagtatctctaaccttttgcttttcagggatcatttttttgtcacctttttgtactgtgaacagttcaaccagtgaccgacttctctctcatgctgtttaccccacacacaatttcccactcaattctgaaaataagaacctgttaataggttggaaagctgtgtactctattcatatattgttctttcatgctagtggagagtggtgtcattagcatcttaattttagagttgtgaaatgattttaccaattaggaattgaatgtgtattttttttctgtttaataagaagagcaaatttgaataaataagctggtgtagataaacttaataatcatgctttttcttgtttggagataggtgatgtgttgtcatatcctgtgatacaggtcactcatctggccttctgtttctgaagtttaagtctggtttgaatatgtaataatactactcagcatttcttgttgcctaagtgagacgaaacttaaatgttatgatatttacttcatgtattcttgtactgttcatttcaattaattggtattgtatatctaatatgtgatatttgaactgaataaaacttacagtgttgtaaatgttctttaataaataatcacacctaagtaat

SEQ ID NO: 463958 - DNA, 3021 bp, Homo sapiens
  misc_feature (2981)..(2981): n is a, c, g, or t
  misc_feature (2998)..(2998): n is a, c, g, or t
ggactttaattttaatttattatttgttttattagagtgtctgtgttcaatatgggatattagggcgttgggtactatgaccacaggaaatttagacaggctacagttaaagtgaagcataccttacccatccaccccccattttatatttagttgcctttttaaaaagattataggggtacaatgtttagatttagtgggatctccaggtataactgtaatttgagccccagtgttaagactatgaagctttgtcaatgggtacattttagcaaatgttacaattaatttagaacctaagttatggagacacaaaagccaataggcacccttttatgttttggttaaatgtttcagtatatacatcttatttatttgtaatattagtatataatttgttgtatacatttttagtgtataagcattggatttctaattggatcagattagggaccttccgtttagctgcatatgtacatatacatgtacaatttattatatatttgcgttaaaatagcctatctgcatgtgtatatatgtgtgtatgtgtatgtatatgcactcacacgcataaatacacagtctatttagttacctttaatgttttttcccttgtacctaggctttttctcgctttttcctttttttctgattttgtggcaatttagttggaaggaggcggtcccagcatgttgacaggcagggtgttcagagtgcccaggcacactggtggggggtggttacaggctcacgtagctcaggggcttctgcaggtctcaggggagtgggaacaaagtgtcccaccccttccccttttcctcaaacctcaagccactggtctctatggatagatcctttgcatcccaccggattgaggaatgagtcacaacagctgcaaggctcttaaagcaacatttaaaccttttggcggctgtcatttctgtgaggagggtgcctctcaccagccgcatggccggaggatccctgcagcgctttggagaccaacacccagatcctttgcccaggagtgcgattaattcctcactggatgctgggggagggcccctcaggtgagcagcccaccactgacttcagcgttgctggctcggttatcagactctcatccaacacaagctcacagggaaagccgttccttgctccttgtggagggagctaccgtcattgccctgagaccaccagccaagaaagtaggtatgtccaggtagggaattcagagggacccagtgcatccaattatacaattatacccagaaggtcctgtgtaggggactgcgattgacatcaccctagtctgcagcaccaaggactgaatgagctcagtcctcttataatttaggctggactgtcacagacactggcagacacagcatacgtggtgcagccaaagtgcaaacatgccagcagcggccatgctccccagggtgggggtccagttagtaagccacgcgcagccaagaggcgaggcatgccctgtgccacacacggactcaccctgctcactgtgcccgtggtatcgaaatgtacccacgtttaattcataaaggagaggctgctgtcattgaaagaaaagtttgttacttgcatttctggagaaaaggagcgcaccaggccacgcagggccacaggaggaggacgcaccagagtggtcaggaggcagaactaggcgagcagctttccactgtgtctccatggcaaaggcgaagatgggcgggggcagagtgtaggattggcaggtttgaatgtcttgggcagtagctacaggggtggtctccagctgcctggtgcctggccctgggtgatcagggtgaggggatactgccttctgcagtggaagagtcaaatcgaggagatggactctgagttggttagtgtgcaaaggtgcactcccaagggacccctttgctatctctaagaattggcctgccctgggaagggcagtctctccccagtcagtgaggtccccaagatgtgaaaacattatacattataaaaaagcatgattaatataagctcattctagcatttcaggttacagcttctagaagaggtttgtagtctcaaatgagtaggtttttcctctagagaggggcgggcctggaccttcaagcaccccttggtgtgtttaggagctcaggagcagaagcacctgcctgcagccctgcagctaaggaagttctctcagtcactcagagcagggaggggctgagagagtcatgtgaggctcccggggtactacgacagccctcgaggtgaaggattggccctgatcataatagagaaccctgaggaagtttactgtcatgagtctcggctggttggcgcatgtgacctttgaaggatgaagatggagtttgcaacatgagtatctctaaccttttgcttttcagggatcattttcaaaaattgcattggggccttcgttatttaccatagtattttcactttcatagttttgtcacctttttgtactgtgaacagttcaaccagtgaccgacttctctctcatgctgtttaccccacacacaatttcccactcaattctgaaaataagaacctgttaataggttggaaagctgtgtactctattcatatattgttctttcatgctagtggagagtggtgtcattagcatcttaattttagagttgtgaaatgattttaccaattaggaattgaatgtgtattttttttctgtttaataagaagagcaaatttgaataaataagctggtgtagataaacttaataatcatgctttttcttgtttggagataggtgatgtgttgtcatatcctgtgatacaggtcactcatctggccttctgtttctgaagtttaagtctggtttgaatatgtaataatactactcagcatttcttgttgcctaagtgagacgaaacttaaatgttatgatatttacttcatgtattcttgtactgttcattacggtcttctaaacctnacacgcgccctttgggntggaaaaaccttacccttgtggt

SEQ ID NO: 463959 - DNA, 3009 bp, Homo sapiens
ggactttaattttaatttattatttgttttattagagtgtctgtgttcaatatgggatattagggcgttgggtactatgaccacaggaaatttagacaggctacagttaaagtgaagcataccttacccatccaccccccattttatatttagttgcctttttaaaaagattataggggtacaatgtttagatttagtgggatctccaggtataactgtaatttgagccccagtgttaagactatgaagctttgtcaatgggtacattttagcaaatgttacaattaatttagaacctaagttatggagacacaaaagccaataggcacccttttatgttttggttaaatgtttcagtatatacatcttatttatttgtaatattagtatataatttgttgtatacatttttagtgtataagcattggatttctaattggatcagattagggaccttccgtttagctgcatatgtacatatacatgtacaatttattatatatttgcgttaaaatagcctatctgcatgtgtatatatgtgtgtatgtgtatgtatatgcactcacacgcataaatacacagtctatttagttacctttaatgttttttcccttgtacctaggctttttctcgctttttcctttttttctgattttgtggcaatttagttggaaggaggcggtcccagcatgttgacaggcagggtgttcagagtgcccaggcacactggtggggggtggttacaggctcacgtagctcaggggcttctgcaggtctcaggggagtgggaacaaagtgtcccaccccttccccttttcctcaaacctcaagccactggtctctatggatagatcctttgcatcccaccggattgaggaatgagtcacaacagctgcaaggctcttaaagcaacatttaaaccttttggcggctgtcatttctgtgaggagggtgcctctcaccagccgcatggccggaggatccctgcagcgctttggagaccaacacccagatcctttgcccaggagtgcgattaattcctcactggatgctgggggagggcccctcaggtgagcagcccaccactgacttcagcgttgctggctcggttatcagactctcatccaacacaagctcacagggaaagccgttccttgctccttgtggagggagctaccgtcattgccctgagaccaccagccaagaaagtaggtatgtccaggtagggaattcagagggacccagtgcatccaattatacaattatacccagaaggtcctgtgtaggggactgcgattgacatcaccctagtctgcagcaccaaggactgaatgagctcagtcctcttataatttaggctggactgtcacagacactggcagacacagcatacgtggtgcagccaaagtgcaaacatgccagcagcggccatgctccccagggtgggggtccagttagtaagccacgcgcagccaagaggcgaggcatgccctgtgccacacacggactcaccctgctcactgtgcccgtggtatcgaaatgtacccacgtttaattcataaaggagaggctgctgtcattgaaagaaaagtttgttacttgcatttctggagaaaaggagcgcaccaggccacgcagggccacaggaggaggacgcaccagagtggtcaggaggcagaactaggcgagcagctttccactgtgtctccatggcaaaggcgaagatgggcgggggcagagtgtaggattggcaggtttgaatgtcttgggcagtagctacaggggtggtctccagctgcctggtgcctggccctgggtgatcagggtgaggggatactgccttctgcagtggaagagtcaaatcgaggagatggactctgagttggttagtgtgcaaaggtgcactcccaagggacccctttgctatctctaagaattggcctgccctgggaagggcagtctctccccagtcagtgaggtccccaagatgtgaaaacattatacattataaaaaagcatgattaatataagctcattctagcatttcaggttacagcttctagaagaggtttgtagtctcaaatgagtaggtttttcctctagagaggggcgggcctggaccttcaagcaccccttggtgtgtttaggagctcaggagcagaagcacctgcctgcagccctgcagctaaggaagttctctcagtcactcagagcagggaggggctgagagagtcatgtgaggctcccggggtactacgacagccctcgaggtgaaggattggccctgatcataatagagaaccctgaggaagtttactgtcatgagtctcggctggttggcgcatgtgacctttgaaggatgaagatggagtttgcaacatgagtatctctaaccttttgcttttcagggatcattttcaaaaattgcattggggccttcgttatttaccatagtattttcactttcatagttttgtcacctttttgtactgtgaacagttcaaccagtgaccgacttctctctcatgctgtttaccccacacacaatttcccactcaattctgtctttcatgctagtggagagtggtgtcattagcatcttaattttagagttgtgaaatgattttaccaattaggaattgaatgtgtattttttttctgtttaataagaagagcaaatttgaataaataagctggtgtagataaacttaataatcatgctttttcttgtttggagataggtgatgtgttgtcatatcctgtgatacaggtcactcatctggccttctgtttctgaagtttaagtctggtttgaatatgtaataatactactcagcatttcttgttgcctaagtgagacgaaacttaaatgttatgatatttacttcatgtattcttgtactgttcatttcaattaattggtattgtatatctaatatgtgatatttgaactgaataaaacttacagtgttgtaaatgttctttaataaataatcacacctaagtaat

SEQ ID NO: 463960 - DNA, 2285 bp, Homo sapiens
ggtggaagtttaggctcaagtgggtcccgtatcggatgagcagctgcacggcctgtgggagccctgggcaacatttaaaccttttggcggctgtcatttctgtgaggagggtgcctctcaccagccgcatggccggaggatccctgcagcgctttggagaccaacacccagatcctttgcccaggagtgagcagcccaccactgacttcagcgttgctggctcggttatcagactctcatccaacacaagctcacagggaaagccgttccttgctccttgtggagggagctaccgtcattgccctgagaccaccagccaagaaagtaggtatgtccaggtaggggctggactgtcacagacactggcagacacagcatacgtggtgcagccaaagtgcaaacatgccagcagcggccatgctccccagggtgggggtccagttagtaagccacgcgcagccaagaggcgaggcatgccctgtgccacacacggactcaccctgctcactgtgcccgtggtatcgaaatgtacccacgtttaattcataaaggagaggctgctgtcattgaaagaaaagtttgttacttgcatttctggagaaaaggagcgcaccaggccacgcagggccacaggaggaggacgcaccagagtggtcaggaggcagaactaggcgagcagctttccactgtgtctccatggcaaaggcgaagatgggcgggggcagagtgtaggattggcaggtttgaatgtcttgggcagtagctacaggggtggtctccagctgcctggtgcctggccctgggtgatcagggtgaggggatactgccttctgcagtggaagagtcaaatcgaggagatggactctgagttggttagtgtgcaaaggtgcactcccaagggacccctttgctatctctaagaattggcctgccctgggaagggcagtctctccccagtcagtgaggtccccaagatgtgaaaacattatacattataaaaaagcatgattaatataagctcattctagcatttcaggttacagcttctagaagaggtttgtagtctcaaatgagtaggtttttcctctagagaggggcgggcctggaccttcaagcaccccttggtgtgtttaggagctcaggagcagaagcacctgcctgcagccctgcagctaaggaagttctctcagtcactcagagcagggaggggctgagagagtcatgtgaggctcccggggtactacgacagccctcgaggtgaaggattggccctgatcataatagagaaccctgaggaagtttactgtcatgagtctcggctggttggcgcatgtgacctttgaaggatgaagatggagtttgcaacatgagtatctctaaccttttgcttttcagggatcattttcaaaaattgcattggggccttcgttatttaccatagtattttcactttcatagttttgtcacctttttgtactgtgaacagttcaaccagtgaccgacttctctctcatgctgtttaccccacacacaatttcccactcaattctgaaaataagaacctgttaataggttggaaagctgtgtactctattcatatattgttctttcatgctagtggagagtggtgtcattagcatcttaattttagagttgtgaaatgattttaccaattaggaattgaatgtgtattttttttctgtttaataagaagagcaaatttgaataaataagctggtgtagataaacttaataatcatgctttttcttgtttggagataggtgatgtgttgtcatatcctgtgatacaggtcactcatctggccttctgtttctgaagtttaagtctggtttgaatatgtaataatactactcagcatttcttgttgcctaagtgagacgaaacttaaatgttatgatatttacttcatgtattcttgtactgttcatttcaattaattggtattgtatatctaatatgtgatatttgaactgaataaaacttacagtgttgtaaatgttctttaataaataatcacacctaagtaataggctagactgatgagaaattagatcaaatcagtgcctaggcctttgtgtttgtgtcgtagggatgtactaacacatcaccacagactgacggcttttcacaataaatcagttttcttcgctcacatttctggacattagaaatccaaagccaaggtgccagtagggccgggctttctctgaaggccccaggaaaactcctccttcatctcctccagctggtgtggctgctggcc

SEQ ID NO: 463961 - DNA, 206 bp, Homo sapiens
  misc_feature (32)..(32): n is a, c, g, or t
  misc_feature (37)..(37): n is a, c, g, or t
ggcggttagcaacaaaaaaaaaaaaaaaggancgtcnatggcaacatgttccactgatgagaaaaccggcaaagacaggttaggcagaagaaaagagagatgagacaacggactgtgccaacaaactaaaattttacctgctgctatggataaaatagctttctttttagaaatactcatgttaataaactcctacatgcgacata

SEQ ID NO: 463962 - DNA, 204 bp, Homo sapiens
  misc_feature (48)..(48): n is a, c, g, or t
aacaatatgaagtcattaacagaaccaaagctgttcgagcaaacgttntactagtttacaaaaccggcaaagacaggttaggcagaagaaaagagagatgagacaacggactgtgccaacaaactaaaattttacctgctgctatggataaaatagctttctttttagaaatactcatgttaataaactcctacatgcgacata

SEQ ID NO: 463963 - DNA, 1161 bp, Homo sapiens
acgttggagagctgttatctgaattcatctgggaaaaaaaagggtttattcttaataatggggagtctcgggtatgtctttatcagcagcatgaaaacaagtaaattggtaccagtagagtggggtgttgctgaaaagatacccgatgactttggaactggagacttgttgaatggctttgataaaaatgctgatagtgatatgaacagtaagatccagactgaggtggtctcagatggagatgaggaacttgttggaaactggagcaaaggtgactcttactatgttttagcaaagagactggaggcattttgcccctgccctagagatctgtggaactttgaacttgagagagatgatttagggtatctggcagaagaaatttctaagcagaaaagcattcaagaggtgacttgggtactgttaaaagcattccattttaaaagtggagctgtgagaaggggaccaccatcctccagaccccagaatggtagatccaccgacagcttgccctgtgcacctggaaaagctgcagacaatcagtgccagcccataaaagcagtcaagagagaggctctaccctgcaaagccacaggggcagagctgcccaagaccatgggaaccccctcttgcatcagtgtaacctggatctggaatataggcataaaagagaaggcaagaaatgaagctgaaatgggatatgtgcccttgactaatgaaggttcctccttaatctgcgaagtttctgcaaagcttgctgagagacacccacagagtggaaaccaggcagaagagaagactcacatgcccacctcaccggccaaagaacccttgagagcaacagcacaacggatgtcagagccaggacatccaagaacaggtctaccaatcctgcaagaaacaccaaactgaatttcaagatatcgtgaaaacaacttactgaagcttggagttggaacaattctagcttattgaggagctcttcaaattagaaggcaacatgttccactgatgagaaaaccggcaaagacaggttaggcagaagaaaagagagatgagacaacggactgtgccaacaaactaaaattttacctgctgctatggataaaatagctttctttttagaaatactcatgttaataaactcctacatgcgacata

SEQ ID NO: 463964 - DNA, 2720 bp, Homo sapiens
ctcccctccccagtccccagccccttgtgagctccgttccactttccgtccctgtgcactgggctactctagacacctcttggagccaggaaggggactgggctggggtgggaaccacaggtaggcatcggaggggctgccagtagacctggtttgggtggcgctgccggtagagctggttggggcggggctgcaggtggagctggttggggcggggctgcaggtggaggtggttggggcggggctgcaggtggagatggttggggcggggctgcaggtggaggtggttggggcggggctgcaggtggaggcggttgaggggagcaaggtgggaggtggagcagctgctatttaagagggggtggtggtgccggttctgcaattaggttactgtgtcttgctggggcttggtcttgtttgctgaaggggcagcagggctctaccatggagggtgtagggggtctctggccttgggtgctgggtctgctctccttgccagggagctccttccctgaggtcatctagaccttggcaccagttggggttgagcagggaggctgggaaggctccttggctttgtgctggagcctactcttcctagggactgagtcttaccgtctgatcccccacacccaccccatgtcctgctgtctggtctcaccggtgggtgctccaggcatctgtgtatgcccctgtctgtctggaccaggtgtgatcctaggagcgcccctggcctccagctgcgcaggagcctgtggtaccagcttcccagatggcctcacccctgagggaacccaggcctccggggacaaggacattcctgcaattaaccaagggctcatcctggaagaaaccccagagagcagcttcctcatcgagggggacatcatccggccgagtcccttccgactgctgtcagcaaccagcaacaaatggcccatgggtggtagtggtgtcgtggaggtccccttcctgctctccagcaagtacggtgagtgagcatggcgcgctccctccctgcctcagccccttcttcctaatgcggcaggtgttcctctcttcccttttcctcttacaccatcacatcccttccacctccccacccgaagaacctgtccacagatgcccttctgttgctgaaggtctcctgagtagggagggttaaaatctgatgggaaggtatgtcgagtggggatctggttccccttgagaccatgcggtgcagaggacagtgacctacccaaggccacacagccagggtctgtctggggcccagcttcttcctggcaccactaagctgccctttcttgatgctattttgggagagtgagttcagagctctgctcccagaccctcaggtagagctcaaagaccaccagggctctgggggctcagccaggtggtgtcttccagatgagcccagccgccaggtcatcctggaggctcttgcggagtttgaacgttccacgtgcatcaggtttgtcacctatcaggaccagagagacttcatttccatcatccccatgtatgggtgcttctcgagtgtggggcgcagtggagggatgcaggtggtctccctggcgcccacgtgtctccagaagggccggggcattgtccttcatgagctcatgcatgtgctgggcttctggcacgagcacacgcgggccgaccgggaccgctatatccgtgtcaactggaacgagatcctgccaggtgagccaggccacacgcaggacaggctggtgccggggaggggacagcacggcttgggcccaagtcgcctggtccccatgggctttgaaatcaacttcatcaagtctcagagcagcaacatgctgacgccctatgactactcctctgtgatgcactatgggaggctcgccttcagccggcgtgggctgcccaccatcacaccactttgggcccccagtgtccacatcggccagcgatggaacctgagtgcctcggacatcacccgggtcctcaaactctacggctgcagcccaagtggccccaggccccgtgggagaggtaatcactaacctactttgcctctccggatttgcctagacatttcccataagtggaatcataacacatagcctcttgtgtctggcttcttaatgttttcaaggttcatccatgttgtagcatgtatcaataacatcgctgaataacattccgttggatagatatgccatacttagtcaccagttgagggacacttgggtttttactttgcagctattatgaatagagctactatggtcatttatgtacaagattttgtgtcaacatgtcatttcttttggcggtatacgagggttccgatttctcccatccttgctgacacttcttatctatcattttggttagaaccagcctagtgagtgtgaagtagtatctcattgtagttctgagttgcatttccctaataactaatgatgaacatcttttaatgtgcttgttggtcatctgcatctttggagaatgttcatatcctctgtctgtttttcttcaattgggttctctcttctgagttgtaagagttctttatatattctagacacatgtccctcatcagatgttgcccttaaatatttcatcacttcctatgttttttgtttttcccactttttaataatgtcctttgaacactaacatcttaaatttggaagtccaactgaccaattttgtcactcctttttggtgtctatgac

SEQ ID NO: 463965 - DNA, 997 bp, Homo sapiens
gtgtccacagctgccccaaacagcacacctacattgtgtgagtggttgaatcctccctctcctctcttcccctcccctccccagcaaaacacggcatgtgaacattctgcttttcatggggtacatgacaaaggacaacctggcaattgtgacccagtggtgcgagggcagcagcctctacaaacacctgcatgtccaggagaccaagtttcagatgttccagctaattgacattgcccggcagacggctcagggaatggactatttgcatgcaaagaacatcatccatagagacatgaaatccaacaaggtgatccgaatgcaggataacaacccattcagtttccagtcggatgtctactcctatggcatcgtattgtatgaactgatgacgggggagcttccttattctcacatcaacaaccgagatcagatcatcttcatggtgggccgaggatatgcctccccagatcttagtaagctatataagaactgccccaaagcaatgaagaggctggtagctgactgtgtgaagaaagtaaaggaagagaggcctctttttccccagatcctgtcttccattgagctgctccaacactctctaccgaagatcaaccggagcgcttccgagccatccttgcatcgggcagcccacactgaggatatcaatgcttgcacgctgaccacgtccccgaggctgcctgtcttctagttgactttgcacctgtcttcaggctgccaggggaggaggagaagccagcaggcaccacttttctgctccctttctccagaggcagaacacatgttttcagagaagctgctgctaaggaccttctagactgtgacaagagcgagactctatccgaaaaacaaaacaaaaaaagggctgggcacggtagttcacacttgcaatcccagcactctgggaggccgaggcgggcggatcacgaggtcaagagatccacaccatcctggccaacaggtgaaaccccatctc

SEQ ID NO: 463966 - DNA, 1277 bp, Homo sapiens
ttccctgactgggggcggtacagatcctcgccattgtgcatggctggtgtgcatgcaaggagtagtgtcaaacacgttgggcggccaaatcagtgttgtaattagtaaaggcattataaccactggatccaccatggtggagcacaattactatgtgtctgcctacagaatcctgtacagtgatgatgggcagaaatggactgtgtacagagagcctggtgtggagcaagataaggatgtgcgtaataactttttgccaccaattattgcacgttttattagagtgaatcctacccaatggcagcagaaaattgccatgaaaatggagctgctcggatgtcagtttattcctaaaggtcgtcctccaaaacttactcaacctccacctcctcggaacagcaatgacctcaaaaacactacagcccctccaaaaatagccaaagatgtagcgctggctgcagttcttgtccctgtgctggtcatggtcctcactactctcattctcatattagtgtgtgcttggcactggagaaacaggaacgtagttgaaatcactgatgagtgtggctttatgacaaggagtaaaggagcagataccattaatatgctgtggaaaatagggaggatgagaatgataataaaaacagctgcagcttattgaatccagagctcattctaagcactttatacgtaatgaataagtaaccagaagctttgtcacttatgtgtataaaatcctttatagtacaacctatggctaatattgatgccataaatttgttgtcctagcaatatagggcatctaacttctatttagaaaagatgatttatttatttttttatttctaaatcatgtgatgattagagcattttcagggagaaaggtgtttaatcagtatttttttttatttcttttccattcaagtgtttcattaacatcttcaacactcattatcttttccacaaattttttattatgctgtactttgaaataatgaaataagtatacctacgctttaaaatgaggatgcatttagtatcaaaaatatagtcttatactggagaatgtttcccagtaggaaaagcacatggcttgggctttttatgaaaaccacatttgtggtgctcacttcggcagcacatatactaacattggaacgacacagagaagattagcatggcccctgtgcaaggatgacacgcaaattcatgaagcgttccatatttttaattgaccacatagttgaaagtaaagcactcatcagcaaatgtaacag

SEQ ID NO: 463967 - DNA, 1004 bp, Homo sapiens
  misc_feature (649)..(649): n is a, c, g, or t
  misc_feature (664)..(664): n is a, c, g, or t
  misc_feature (677)..(677): n is a, c, g, or t
  misc_feature (684)..(685): n is a, c, g, or t
  misc_feature (697)..(697): n is a, c, g, or t
  misc_feature (705)..(705): n is a, c, g, or t
  misc_feature (717)..(717): n is a, c, g, or t
  misc_feature (720)..(720): n is a, c, g, or t
  misc_feature (736)..(736): n is a, c, g, or t
  misc_feature (742)..(742): n is a, c, g, or t
  misc_feature (750)..(750): n is a, c, g, or t
  misc_feature (773)..(774): n is a, c, g, or t
  misc_feature (777)..(777): n is a, c, g, or t
  misc_feature (779)..(779): n is a, c, g, or t
  misc_feature (858)..(858): n is a, c, g, or t
  misc_feature (860)..(860): n is a, c, g, or t
  misc_feature (879)..(879): n is a, c, g, or t
  misc_feature (886)..(886): n is a, c, g, or t
  misc_feature (894)..(894): n is a, c, g, or t
  misc_feature (911)..(911): n is a, c, g, or t
  misc_feature (914)..(914): n is a, c, g, or t
cttactgaagatcctcaaaaccaacagcacacagcttccagcgcatgctcctttccccaagaccctgtgggggaacccgccgccagcgcggagccaccgtgactcgtagcctgacttccgtttccgggggcggcttccggcggcgtgacctgaccgcaagaggccaatggagtgtgggagctgaaagggtcttcgctggcggccggacagtactgcttttaaagagacagtgttagggatcttggaagcacagccaacatgtgtgacattgaagaagccactaaccaactcctagatgtgaaccttcatgagaaccagaagtctgtacaagtgacagaaagtgacctcggaagtgaatctgagcttctagtcactattggagccactgtacctactggctttgagcaaacagctgcagatgaagtcagagagaaacttgggtcatcatgcaaaatcagcagagaccgtggcaagatatattttgtcatttcagtggaaagtctggcacaggttcattgtctgagatcagttgataacttatttgtggtggttcaggagtttcaagattaccagttcaaacaaacaaaggaagaagttctaaaggattttgaagacttggctggaaaactcccatggtcaaaccccttanaagtgtggaaaattnatgccagttttanaaagaannaagcaagcgcanaaagatanatcagaattcangtnaagagaagattaatantggacnagaagtcnaaatcgatcagagaacatgttcnnaanangagttcactagccatgctttagattctcatatcttagatcattgtgcaaatccaggcatcaacagaggctgtatcaacntncataggtgactgattggcntcttgcnaagatganactgatgaaagctcacnagnagaacacgagccacacagtggcgaacgtacagagacccatgcaacacggacggacacgaacatggcaaagcctaacaggggctgcaccaa

SEQ ID NO: 463968 - DNA, 1374 bp, Homo sapiens
cttactgaagatcctcaaaaccaacagcacacagcttccagcgcatgctcctttccccaagaccctgtgggggaacccgccgccagcgcggagccaccgtgactcgtagcctgacttccgtttccgggggcggcttccggcggcgtgacctgaccgcaagaggccaatggagtgtgggagctgaaagggtcttcgctggcggccggacagtactgcttttaaagagacagtgttagggatcttggaagcacagccaacatgtgtgacattgaagaagccactaaccaactcctagatgtgaaccttcatgagaaccagaagtctgtacaagtgacagaaagtgacctcggaagtgaatctgagcttctagtcactattggagccactgtacctactggctttgagcaaacagctgcagatgaagtcagagagaaacttgggtcatcatgcaaaatcagcagagaccgtggcaagatatattttgtcatttcagtggaaagtctggcacaggttcattgtctgagatcagttgataacttatttgtggtggttcaggagtttcaagattaccagttcaaacaaacaaaggtgagctatcctaaacatggtggctgatttttggctgtcttccacaaagagattatttccatttttcatagtctgtgaaagtttagcattactgtagtctttgtaatagagaatactgggaggcttttacagtaaaatctagagttttgctgacagtctatcccaaaagatgttttttgaaaattagtattgaaaaccattaaagtttataagaaagaagaaaacaccttgttttacttgtaagagatataaaccttagatttgctttgcttttacatatatttagttccaaaagagaattgcttccagaacatgaaccaaagaacaagtgacagtttgtgtcttctacaaataacacttcctcaccatcctgcttttgctctgctttcttctctttcttcattttttgaaataaagccaaaataacatctaaatactccttcagttgttaggacaacagctttgtctccaatatgtatttagcatctgaatcctaaatattcagctgctgcctaagctgaaggttgaaaatagattgcagcaaggctttaggttttttccacactgctttttggttaggtttctagagttaaccgcttaaaaacatttttctatcagttttacgtatcttagaaataatctttttaaaaacaactgtgatacgctacctaattgtctaacttttatttattggcaagcatgttgatttccaaaacgttattcaaaaacgagtcaaagttgtatgaaccctcagcctagaaaacaataagaccagacctaaaagaa

SEQ ID NO: 463969 - DNA, 1044 bp, Homo sapiens
  misc_feature (3)..(3): n is a, c, g, or t
  misc_feature (8)..(10): n is a, c, g, or t
  misc_feature (12)..(12): n is a, c, g, or t
  misc_feature (15)..(15): n is a, c, g, or t
  misc_feature (18)..(18): n is a, c, g, or t
agncagannngnacnttnacagtaagcaaaagtgacaatggtaatatggtttggctctgcgttcccatccaaatctcatcttgaatcaataatccccacgtgtcaagggcgggaccaggtggaaatatgggtgactcacgggggtaatttccgccatgctgttcttgtgataccccagaatggtagatccactgacagcttgcactgtatgcctggaaaggctgcagacactcaacaccagcccatgaaagtagctgggaggggggctgtaccttgcaaagccacaggggtggagctgcctaaggctatgggagcccaccttttgcctcagtgtaacctggatgccactccagccatgtggaactgtgagtccattaaatctcttcgtctttataaattacccagtctcaggtatttcttcatagcagtaagaaaatgggctaatacaccaatccttccttccttcaacaggaattttgataccttcacataagattaccacacaggataaaattgtataatataggggatagcatttgtaaactctaaattagtacatactctttagaaattatgattatttagaatgcttaaaacttccagtgtttacttgagaaaagttaatatttattgattcttcagcatgtgccaaaggcttttgaatactttgcatgctttatctcatttaaacccctaacaacctattgggatagatgttattagttatcttttacagaagaggaaactgtggctcaaatgttgtttaacttgctcaaggtcatgtatctagtaagcagttaagtcactgttaaaattcaggcactatgactgcagagtctgtcttcctaacaaatgtgccatgctacctaaagaatcatggcatttcctgtcattaactgctatgataatgggcacttttgttattccaataagcttaggcaataaatatactgagcgtcacataggcaaggcagtatttaataagatcaatgaaattgttatgtaataaatcagaatgaaaatttatatttcattatatatact

SEQ ID NO: 463970 - DNA, 949 bp, Homo sapiens
  misc_feature (3)..(3): n is a, c, g, or t
  misc_feature (8)..(10): n is a, c, g, or t
  misc_feature (12)..(12): n is a, c, g, or t
  misc_feature (15)..(15): n is a, c, g, or t
  misc_feature (18)..(18): n is a, c, g, or t
agncagannngnacnttnacagtaagcaaaagtgacaatggtaatatggtttggctctgcgttcccatccaaatctcatcttgaatcaataatccccacgtgtcaagggcgggaccaggtggaaatatgggtgactcacgggggtaatttccgccatgctgttcttgtgataccccagaatggtagatccactgacagcttgcactgtatgcctggaaaggctgcagacactcaacaccagcccatgaaagtagctgggaggggggctgtaccttgcaaagccacaggggtggagctgcctaaggctatgggagcccaccttttgcctcagtgtaacctggatgccactccagccatgtggaactgtgagtccattaaatctcttcgtctttataaattacccagtctcaggtatttcttcatagcagtaagaaaatgggctaatacaccaatccttccttccttcaacaggaattttgataccttcacataagattaccacacaggataaaattgtataatataggggatagcatttgtaaactctaaattagtacatactctttagaaattatgattatttagaatgcttaaaagataatgggaggatatatgtaggttaaaagcaaataaaagcattttatataagggacttcagcatacttggattctggtgtttagggggtcctctaaccaatgccctgtgaatgctgagggatgactgtgctggcatttttatgttgggagatcaggaaaggctcaaaggacatgagatttgagttgacatctgaatgaaaagaccagtcttgggaagattagggaacataggtgagagaactaatgctaagatgctgagaagatacaactgtgcccagtttgaggaactgaaaaagaccatgtgtctggcaagtgctgggtgagggagagagtggtatgaggagacattgcc

SEQ ID NO: 463971 - DNA, 537 bp, Homo sapiens
gcctcctcctgctggatcgccgcccacgcgctgcttctctatctgagatgtgcacagaaacccagacaggaccagtcggcactgtgtgctgcgtgctgcctcctgaccagtctgtgtgacaccgtcggggctcttctggccagacagctcacaatccaggttttcactggtgcctacctagcagctattgacttagtgaactttatgttcattctcttcccagtctgtggatccaaattcaagtctaattcagatcgggaagcccgagagaggaagaggaggcggcagctcagggccagtgtgtttgccctggccctgccgctgagcctgggcccgtgctgggctctgtgggttgctgtcccgaaggcttcagccaccatccgggggccacagcggaggctgctagcgagcctgctgcaggaaaatactgagatcctcggctacctgctgggtagcgttgctgcctttggctcctgggcttctcggatcccccctctctccagaatttgccgggggaagacatttccctccatccac

SEQ ID NO: 463972 - DNA, 386 bp, Homo sapiens
ttcctgcccttccgtgcatcttctccagtggatatggactggggaggggctgtaaggggagaagtggctgtgggggcgctgagggagggacagctccaagtgccaaaagggctctgtgtttaaagaacatggacacaggccagcagaagccaggctgccccacttcacagatggtttagaagaatttcgtttgaatttatttcagagaaacaagttgtctttttaattcaggcaattaactgtgctctgcagttatctgcagtggttgggttgcttttttttttttttgagacggagtctcgctttgtcacccaggcagaggttgcagtgagccgagattgtgccactgcactccagcctgggcgacaagagggaaactccgtcta

SEQ ID NO: 463973 - DNA, 1068 bp, Homo sapiens
ggcacgagcggcacgagcggcacgaaatgtggacaatacgcaggaagggacgccgtgccttacagcgaccggcagggactcggccgtccgcgagcccagccgcccgccccgctccggccaggatgttggaggcttctctatctgagatgtgcacagaaacccagacaggaccagtcggcactgtgtgctgcgtgctgcctcctgaccagtctgtgtgacaccgtcggggctcttctggccagacagctcacaatccaggttttcactggtgcctacctagcagctattgacttagtgaactttatgttcattctcttcccagtctgtggatccaaattcaagtctaattcagatcgggaagcccgagagaggaagaggaggcggcagctcagggccagtgtgtttgccctggccctgccgctgagcctgggcccgtgctgggctctgtgggttgctgtcccgaaggcttcagccaccatccgggggccacagcggaggctgctagcgagcctgctgcaggaaaatactgagatcctcggctacctgctgggtagcgttgctgcctttggctcctgggcttctcggatcccccctctctccagaattggcgtcctgaggacggcgggagcctctcggggaaagcccgtgtgttcttccccatttcctatagcaaatgaaaagcaggctctgaggaagaagcccctgaggctgaacccataagagaaggagatttgacaccggacaggcagccaggtgtgaggttctgtgtagatcaagagtgtcttaggccgggcgcgggggctcacgcctggaatcccagcactttgcgaggccgaggcggggcgggtcgcttgaggtcaggagttggagactagcctgaccaacacggtgaaaccctgtctctactaaaatacaaaaattagccaggcatggtggtgcatgcttgtaatcccagctactctggaggctgaggtggagaatcgcttgaacccaggaggcagaggttgcagtgagccgagattgtgccactgcactccagcctgggcgacaagagggaaactccgtcta

SEQ ID NO: 463974 - DNA, 326 bp, Homo sapiens
gcaggaggtgtccctggaggagtacgtaagaaagcaccgcatcagtgtaacccatgtgatacagggtcccggatgacaaactctgtaggggctgaggaaagatgcttgaatgccaagactctcttcccgtttgctcccaggttttcactggtgcctacctagcagctattgacttagtgaactttatgttcattctcttcccagtctgtggatccaaattcaagtctaattcaggtgagtgtgtggctgtcttttcctgtctttattcacccattcattcatcagcacgccgaatgcctactccttatcactcccagagcgggccc

SEQ ID NO: 463975 - DNA, 1089 bp, Homo sapiens
cgcctctaacaagccgtaggtagcaaggacgtgatggcccacccgaaatgtggacaatacgcaggaagggacgccgtgccttacagcgaccggcagggactcggccgtccgcgagcccagccgcccgccccgctccggccaggatgttggaggcttctctatctgagatgtgcacagaaacccagacaggaccagtcggcactgtgtgctgcgtgctgcctcctgaccagtctgtgtgacaccgtcggggctcttctggccagacagctcacaatccaggttttcactggtgcctacctagcagctattgacttagtgaactttatgttcattctcttcccagtctgtggatccaaattcaagtctaattcagatcgggaagcccgagagaggaagaggaggcggcagctcagggccagtgtgtttgccctggccctgccgctgagcctgggcccgtgctgggctctgtgggttgctgtcccgaaggcttcagccaccatccgggggccacagcggaggctgctagcgagcctgctgcaggaaaatactgagatcctcggctacctgctgggtagcgttgctgcctttggctcctgggcttctcggatcccccctctctccagaattggcgtcctgaggacggcgggagcctctcggggaaagcccgtgtgttcttccccatttcctatagcaaatgaaaagcaggctctgaggaagaagcccctgaggctgaacccataagagaaggagatttgacaccggacaggcagccaggtgtgaggttctgtgtagatcaagagtgtcttaggccgggcgcgggggctcacgcctggaatcccagcactttgcgaggccgaggcggggcgggtcgcttgaggtcaggagttggagactagcctgaccaacacggtgaaaccctgtctctactaaaatacaaaaattagccaggcatggtggtgcatgcttgtaatcccagctactctggaggctgaggtggagaatcgcttgaacccaggaggcagaggttgcagtgagccgagattgtgccactgcactccagcctgggcgacaagagggaaactccgtcta

SEQ ID NO: 463976 - DNA, 1077 bp, Homo sapiens
  misc_feature (1077)..(1077): n is a, c, g, or t
gccttcagctgggcctgactggaagggcgtgggcatttggaggagccctggctgtggtcggggggcagtgggccatgctgggggcagtggaaggccccaggtggaagcaggcggaggacattagagacatctacgacttccgagatgttctgggcacgggggccttctcggaggtgatcctggcagaagataagaggacgcagaagctggtggccatcaaatgcattgccaaggaggccctggagggcaaggaaggcagcatggagaatgagattgctgtcctgcacaagatcaagcaccccaacattgtagccctggatgacatctatgagagtgggggccacctctacctcttcatgcagctggtgtcgggtggggagctctttgaccgtattgtggaaaaaggcttctacacggagcgggacgccagccgcctcatcttccaggtgctggatgctgtgaaatacctgcatgacctgggcattgtacaccgggatctcaagccagagaatctgctgtactacagcctggatgaagactccaaaatcatgatctccgactttggcctctccaagatggaggacccgggcagtgtgctctccaccgcctgtggaactccgggataccccctgaagtcctggcccagaagccctacagcaaggctgtggattgctggtccataggtgtcatcgcctacatcttccaaagatttcatccggcacttgatggagaaggacccagagaaaagattcacctgtgagcaggccttgcagcacccatggattgcaggagatacagctctagataagaatatccaccagtcggtgagtgagcagatcaagaagaactttgccaagagcaagtggaagcaagccttcaatgccacggctgtggtgcggcacatgaggaaactgcagctgggcaccagccaggaggggcaggggcagacggcgagccatggggagctgctgacaccagtggctggggggccgccaactggctgttgctgtcgagactgctcggtggagcccggcactccttttgccggaaggctttgggggcagcctggtccccttn

SEQ ID NO: 463977 - DNA, 1390 bp, Homo sapiens
gccttcagctgggcctgactggaagggcgtgggcatttggaggagccctggctgtggtcggggggcagtgggccatgctgggggcagtggaaggccccaggtggaagcaggcggaggacattagagacatctacgacttccgagatgttctgggcacgggggccttctcggaggtgatcctggcagaagataagaggacgcagaagctggtggccatcaaatgcattgccaaggaggccctggagggcaaggaaggcagcatggagaatgagattgctgtcctgcacaagatcaagcaccccaacattgtagccctggatgacatctatgagagtgggggccacctctacctcttcatgcagctggtgtcgggtggggagctctttgaccgtattgtggaaaaaggcttctacacggagcgggacgccagccgcctcatcttccaggtgctggatgctgtgaaatacctgcatgacctgggcattgtacaccgggatctcaaggtggggctcaagggggtgtgccttgtccttcctggaatttttggccttcttgagagcttccttgattttcttatgacagccatgaagccacagtggcttttggggatccattatttctcagaaggtgcttggagcggcagaaggttctaccagcctctaaccatctctgattgccccttctcttccctcctgcccttcaagccagagaatctgctgtactacagcctggatgaagactccaaaatcatgatctccgactttggcctctccaagatggaggacccgggcagtgtgctctccaccgcctgtggaactccgggataccccctgaagtcctggcccagaagccctacagcaaggctgtggattgctggtccataggtgtcatcgcctacatcttccaaagatttcatccggcacttgatggagaaggacccagagaaaagattcacctgtgagcaggccttgcagcacccatggattgcaggagatacagctctagataagaatatccaccagtcggtgagtgagcagatcatgatctccgactttggcctctccaagatggaggacccgggcagtgtgctctccaccgcctgtggaactctggggggccggcagctggctgttgctgtcgagactgctgcgtggagccgggcacagaactgtcccccacactgccccaccagctctagggccctggacctcgggtcatgatcctctgcgtgggagggcttgggggcagcctgctccccttccctccctgaaccgggagtttctctgccctgtcccctcctcacctgcttccctaccactcctcactgcattttccatacaaatgtttctattttattgttccttcttgtaataaagggaagataaaacca

SEQ ID NO: 463978 - DNA, 1278 bp, Homo sapiens
  misc_feature (1278)..(1278): n is a, c, g, or t
gccttcagctgggcctgactggaagggcgtgggcatttggaggagccctggctgtggtcggggggcagtgggccatgctgggggcagtggaaggccccaggtggaagcaggcggaggacattagagacatctacgacttccgagatgttctgggcacgggggccttctcggaggtgatcctggcagaagataagaggacgcagaagctggtggccatcaaatgcattgccaaggaggccctggagggcaaggaaggcagcatggagaatgagattgctgtcctgcacaagatcaagcaccccaacattgtagccctggatgacatctatgagagtgggggccacctctacctcttcatgcagctggtgtcgggtggggagctctttgaccgtattgtggaaaaaggcttctacacggagcgggacgccagccgcctcatcttccaggtgctggatgctgtgaaatacctgcatgacctgggcattgtacaccgggatctcaaggtggggctcaagggggtgtgccttgtccttcctggaatttttggccttcttgagagcttccttgattttcttatgacagccatgaagccacagtggcttttggggatccattatttctcagaaggtgcttggagcggcagaaggttctaccagcctctaaccatctctgattgccccttctcttccctcctgcccttcaagccagagaatctgctgtactacagcctggatgaagactccaaaatcatgatctccgactttggcctctccaagatggaggacccgggcagtgtgctctccaccgcctgtggaactccgggataccccctgaagtcctggcccagaagccctacagcaaggctgtggattgctggtccataggtgtcatcgcctacatcttccaaagatttcatccggcacttgatggagaaggacccagagaaaagattcacctgtgagcaggccttgcagcacccatggattgcaggagatacagctctagataagaatatccaccagtcggtgagtgagcagatcaagaagaactttgccaagagcaagtggaagcaagccttcaatgccacggctgtggtgcggcacatgaggaaactgcagctgggcaccagccaggaggggcaggggcagacggcgagccatggggagctgctgacaccagtggctggggggccgccaactggctgttgctgtcgagactgctcggtggagcccggcactccttttgccggaaggctttgggggcagcctggtccccttn

SEQ ID NO: 463979 - DNA, 2155 bp, Homo sapiens
acaaccattaacctaccttttgtctatatggccatgtctttttaccatatatgttttacactgcatcagttttcaatccaacatgccaagctgagagagtttttaaaatatttatttttatttttttgcaccgtccaattaccaggccctatgctcctcgcaccaatctagtaagactgtgtgtgtcaaggagaaaattatgtttatttcagggattgaggatattaattaatttatttatttatttatttattattttcttaagacagagtcttgctctgttgcccaggctggagtgcagtggcacaacctcagctcactgcagctttcgcctcctgggttcaaacgattcttctgcctcagcctcccgagacctgggactacaggcacatggaccacacctggctaatttttgtatttttagtagagacagggtgtcaccatggtggtcaggctggtctcgaactcatgacctcatgatccgcctgtcccggcctcccaaagcgctgggattgcaggcatgagccaccatgcctggccctccttattaatttaaaagattctgcaggcatgaaacttttgcagaataaactgtgtaagtaatcattctatattttatttttaccagatacatttctgagactgggaagtaaacagtcttggccaaatttttatgtttgttgctaggtgaccaaagtcctcttgtgatgccattgctactcaggttggaaaccactgtggtgatctcaattactttacctgagtagactactgaagcagcatttgaagctgcagtcttgaaacacatgcaggctggaaaagtcgctaaagaattacttatttgagatggcacatgtttctgcagaaactcaagatgtttctcctaaagatgaatcaactggttcaaaagcctcctctgggtctccattgtgtgaacacataatccctggggattcagacttaaggtcaatgactgaatcaatgattttcaggttttgccacaaggatccttgataaaaaggccacattatactttatgtctctgagccagataaagataatgattttccttctctgacctttcccagtaaactttggaaaatagctgaaagtgaccaattcaagtctaattcataggataagaatgaaacttgcatagtgactaatgaagaactcttcaagaaagaaaatttggaaataaaggctccttacagaatatttcaaactgacagtatgaaaatcttaatttgacagctcaacctttatggatttagtaaaattcaacagaattttcacagatctgcttttctagccaactttctggcagaagaaaaagaaatttctgttttaagcaagttaaagttgtattatcatccgaatttcaaacgtggctgtccccaacttttaataagaacgaaaagaagaattaagattaaaaacacttctcttgtatctacttcactgaatatttcaagaaacactttagagcaggggctaacacagataaacataattctgtcttagctgctgaaactagtgaagaaagttcattttcaacatctacaaatttaaatatgactctaacaaggaaatcttctgtcagccagggcattgctggttcacctgacccaattagaagtggtttccctcctcttccatttcaacctcagttggacaatcagaacaaattacaacaaatcaacatgctattttaaatcaattgacaaatattcatatgcactctcatagcaccgacatgtaagcaaatggccacgttgtgaattttgttacaaccacagcttctcaatactacatcatatctccctcctttggggctgatagtgaaaccacctactttttcccaccagatatcctgaggtattagccaatgaggctcctcattctaacctgctaccagcaggcaacctgtggttgtaaatgactgcgacagctgatacatcagttgcctttcgttacaggccagctcttcaaccatctttactggaaaaatatcaccctagttacaactgatcttccaccaaaagagtaccagattatgcatgacaacagagactgaaatttatgttgacaagaacattaaaaattcctgcaataatcttactgaacaataaaattacatgttgacctttatggt

SEQ ID NO: 463980 - DNA, 1643 bp, Homo sapiens
acaaccattaacctaccttttgtctatatggccatgtctttttaccatatatgttttacactgcatcagttttcaatccaacatgccaagctgagagagtttttaaaatatttatttttatttttttgcaccgtccaattaccaggccctatgctcctcgcaccaatctagtaagactgtgtgtgtcaaggagaaaattatgtttatttcagggattgaggatattaattaatttatttatttatttatttattattttcttaagacagagtcttgctctgttgcccaggctggagtgcagtggcacaacctcagctcactgcagctttcgcctcctgggttcaaacgattcttctgcctcagcctcccgagacctgggactacaggcacatggaccacacctggctaatttttgtatttttagtagagacagggtgtcaccatggtggtcaggctggtctcgaactcatgacctcatgatccgcctgtcccggcctcccaaagcgctgggattgcaggcatgagccaccatgcctggccctccttattaatttaaaagattctgcaggcatgaaacttttgcagaataaactgtgtaagtaatcattctatattttatttttaccagatacatttctgagactgggaagtaaacagtcttggccaaatttttatgtttgttgctaggtgaccaaagtcctcttgtgatgccattgctactcaggttggaaaccactgtggtgatctcaattactttacctgagtagactactgaagcagcatttgaagctgcagtcttgaaacacatgcaggctggaaaagtcgctaaagaattacttatttgagatggcacatgtttctgcagaaactcaagatgtttctcctaaagatgaatcaactggttcaaaagcctcctctgggtctccattgtgtgaacacataatccctggggattcagacttaaggtcaatgactgaatcaatgattttcaggttttgccacaaggatccttgataaaaaggccacattatactttatgtctctgagccagataaagataatgattttccttctctgacctttcccagtaaactttggaaaatagctgaaagtgaccaattcaagtctaattcataggataagaatgaaacttgcatagtgactaatgaagaactcttcaagaaagaaaatttggaaataaaggctccttacagaatatttcaaactgacagtatgaaaatcttaatttgacagctcaacctttatggatttagtaaaattcaacagaattttcacagatctgcttttctagccaactttctggcagaagaaaaagaaatttctgttttaagcaagatatcctgaggtattagccaatgaggctcctcattctaacctgctaccagcaggcaacctgtggttgtaaatgactgcgacagctgatacatcagttgcctttcgttacaggccagctcttcaaccatctttactggaaaaatatcaccctagttacaactgatcttccaccaaaagagtaccagattatgcatgacaacagagactgaaatttatgttgacaagaacattaaaaattcctgcaataatcttactgaacaataaaattacatgttgacctttatggt

SEQ ID NO: 463981 - DNA, 1532 bp, Homo sapiens
acaaccattaacctaccttttgtctatatggccatgtctttttaccatatatgttttacactgcatcagttttcaatccaacatgccaagctgagagagtttttaaaatatttatttttatttttttgcaccgtccaattaccaggccctatgctcctcgcaccaatctagtaagactgtgtgtgtcaaggagaaaattatgtttatttcagggattgaggatattaattaatttatttatttatttatttattattttcttaagacagagtcttgctctgttgcccaggctggagtgcagtggcacaacctcagctcactgcagctttcgcctcctgggttcaaacgattcttctgcctcagcctcccgagacctgggactacaggcacatggaccacacctggctaatttttgtatttttagtagagacagggtgtcaccatggtggtcaggctggtctcgaactcatgacctcatgatccgcctgtcccggcctcccaaagcgctgggattgcaggcatgagccaccatgcctggccctccttattaatttaaaagattctgcaggcatgaaacttttgcagaataaactgtgtaagtaatcattctatattttatttttaccagatacatttctgagactgggaagtaaacagtcttggccaaatttttatgtttgttgctaggtgaccaaagtcctcttgtgatgccattgctactcaggttggaaaccactgtggtgatctcaattactttacctgagtagactactgaagcagcatttgaagctgcagtcttgaaacacatgcaggctggaaaagtcgctaaagaattacttatttgagatggcacatgtttctgcagaaactcaagatgtttctcctaaagatgaatcaactggttcaaaagcctcctctgggtctccattgtgtgaacacataatccctggggattcagacttaaggtcaatgactgaatcaatgattttcaggttttgccacaaggatccttgataaaaaggccacattatactttatgtctctgagccagataaagataatgattttccttctctgacctttcccagtaaactttggaaaatagctgaaagtgaccaattcaagtctaattcataggataagaatgaaacttgcatagtgactaatgaagaactcttcaagaaagaaaatttggaaataaaggctccttacagaatatttcaaactgacagtatgaaaatcttaatttgacagctcaacctttatggatttagtaaaattcaacagaattttcacagatctgcttttctagccaactttctggcagaagaaaaagaaatttctgttttaagcaaggccagctcttcaaccatctttactggaaaaatatcaccctagttacaactgatcttccaccaaaagagtaccagattatgcatgacaacagagactgaaatttatgttgacaagaacattaaaaattcctgcaataatcttactgaacaataaaattacatgttgacctttatggt

SEQ ID NO: 463982 - DNA, 2192 bp, Homo sapiens
tcctgccaggactgggtccttccctgcaaggcagcaagttcctttctggcccagggccagcctttattattgccatataagccttctggtagtaccaagatgtattatgttccacaattaagacaaattcctccatctccggattccaaatcagataccaccgttgaaagctcccattcaggatccaatgatgccattgctccagacttcccagctcaggtgctaggcacaagagatgatgacctctcagccactgttaacattaaacataaagaaggaatctacagtaagagggtagtgactaaggcatccttgccagtgggagaaaaacccttgcagaatgaaaatgcagatgcctcagttcaagtgctaatcactggggatgagaacctctcagacaaaaaacagcaagagattcacagtacaagggcagtgactgaggctgcccaggctaaagaaaaagaatctttgcagaaagatactgcagattccagtgctgctgctgctgcagagcactcagctcaagtaggagacccagaaatgaagaacttgccagacactaaagccattacacagaaagaggagatccataggaagaagacagttcccgaggaagcctggccaaacaataaagaatccctacagatcaatattgaagagtccgaatgtcattcagaatttgaaaatactacccgttctgtcttcaggtcagcaaagttttacattcatcatcccgtacacctaccaagtgatcaagatatttgccatgaatctttgggaaagagtgttttcatgagacattcttggaaagatttctttcagcatcatccagacaaacatagagaacacatgtgtcttcctcttccttatcaaaacatggacaagactaagacagattataccagaataaagagcctcagcatcaatgtgaatttgggaaacaaagaagtgatggatactactaaaagtcaagttagagattatccaaaacataatggacaaattagtgatccacaaagggatcagaaggtcaccccagagcaaacaactcagcacactgtgagtttgaatgaactgtggaacaagtatcgggagcgacagaggcaacagagacagcctgagttgggtgacaggaaagaactgtccttggtggaccgacttgatcgtttggctaaaattcttcagaatccaatcacacattctctccaggtctcagaaagtacacatgatgatagcagaggggaacgaagtgtgaaggaatggagtggtagacaacagcagagaaataagcttcagaaaaagaagcggtttaaaagcctagagaaaagccataaaaatacaggcgagcttaaaaaaagcaaggtgctttctcatcatcgagctgggaggtctaatcaaattaaaattgaacagattaaatttgataaatatattctgagtaaacagccaggttttaattatataagcaacacttcttcggattgtcggccctcagaggagagtgagctgctcacagatactaccaccaacatcctttccggcaccacttctactgtcgaatcagatatattgacccaaacagatagagaggtggctctgcacgaaaggagtagctctgtttccactattgacactgcccggctgattcaagcttttggccatgaaagagtatgcttgtcacccagacgaattaaattatatagcagcatcaccaaccaacagaggagataccttgagaagcggagcaaacacagcaagaaagtgctgaatacaggtcatcccctagtgacttctgagcacaccagaaggagacacatccaggtacatggctacagattccatctggcaatgtgactgccctcttcatggactttttagttaagctttgcacacaggtgaaaaaaacaagccatttgccctttcctctctataccatttcttaccaactggaaaagagtgagaaagtgtagtacagtgctattgtgagttgtcattattttcatcaacattcatttacgaattaccttttgaatgaagggctttgctgctagatccttcacagtctgcaaagtttacccctgaaatgggggagctttgagggtaactaccccagctctcttttgggtaactatttgcatggaataccttttttatccttttaatttctaactctttgtgtctttggatgtaaa

SEQ ID NO: 463983 - DNA, 2764 bp, Homo sapiens
caggttcaataaactcaggttcaagcagtcaagggtcttgctcaaggtcacacagttcatggcaggtccaactcaagttccactctctttctgcctgggagctcagtgagtgatccaaatgacctaaggaggaggagctgagaccagaatggacattcttttctggaaatcagaggacaagaaagatccaaaccaaagaccaaactgagctaggttcctgatctggggtgtggagaggccaactaaaggacacaggaatgtgacatgaccttgatggtacctgacacattacaggtcctgggaaaactgttgtgggggttaaatatgaaaatgcatgctaagcagttatcctggggcctgggctcagtaaacattgctactacacttattcaagtgactttgccttcttgttctggggagtcaggccccctgggaaatcgtgtgtcctcagaggatgcactttccaaagcctgtaacattcgggcggccagcagcacgggcacctgccatcttgcggacacgagctgcccgtctgattggtttctatgctgcaaagctgagattaaaaatcaaaataagttctgcaatgaactaaagctggtaagagttggagctgagacccgaatccaggacttcctggctctggagcacaaatttgaagcagccttcttcacctgcaggagccaggcctgcatcagtcacctgtttataaggccagcaagtctgatcacctcttgcaatcaacaaacagaccacaatactgactctaccaaggaagttcagaggaacagcgtgaactggggataccatcgagggctccagacaccaaacctgcaacagtgatacatctctctcccactaagattttagacttctagagggttacttgaataagagagtttttatttttatgagagatcttcagtgggtcccagaaaaaaacaagccatcgacgtaatcattcttagaaacttctgagtactgatgcattcctgagctgtcagctgctgctcctctccctccctctccacaccagctgcacacacacacacacatacacaaacacacacacacacacacacacacacacacacacacactctcaccttctggtaaagactctgagcaccaaaaaatttgaactgttcctggctttagccaacagaatattgaaagcaattgttttcagcaaagtcttgcccaaatgtggaagatgaatgttttcagtggacaggcccaacaccaagctcctaaggagcaccttcctacctaagggaggtagatgtacaacctgcattgacagacacagggccgtcagctctgagggcaaatgccccttgcatggcttgtcaagaaataaaattttctcccacctcagaactaggggtaggggtgagggacttgagggagaagtatgtttcttgttttctgatttctagggatttttaaacagccctcagttttttttaaaaataagctatatttccaaatccttcctaaactgatatattttctaagaaaagagaagccagctgtgatttcaactatacatatttgtgtgtgaatatataaatgtatgtatatatgtacatatatgtgtgtatatgtatagtatatatgtgtgtacatatacatatatatatagttgaaatcatagctgaagcctctgaagacaattcacaaatacacacacacacatatacatgcatatgtaattgcatatacagttgtatactacctatatctatatattgactgatatacatgtatacatatatatacatacatttatgtattgaaaactaacaaaatttatcttcctaactgagcatgaagccgcttgcatggactcagctttacccatctttctgtatacctagggatgtgtgaaatatcagactaccttgctgaagtgaccctacaggccaccttgtagcccagaaaaaaaaagtccagtagaaatgagccataaatgagaagctgtaattgcaataaatacctgtgaattcatattctaaagtgaatagctcttggaactcttgttttaaaagttatttagcaaacacttattgaacacttaatatgagccaaaccccttcaagtagggtgtggcctttgcattcctaagtattggtttacagctcattagccctttgacaaggcagctggggttgaagagaaaggtaaccctggagtgtcccaagccattgtcacctggaggtaatgcatctccacagtgttagggaaagcccgtgagaacataagctttattcacaagcaccaaaggtttccatggaggcagaaggaagataaggttggagaagcagctgcctaaatgacctgtgggcctgaatatgaggggtgcccagcccccagggacaccccacttcttgtgcactttcaaagagttttcaaggtggaagaaagcagagttgactggggttgcggactaagctgacacaagtagggtggggacagtgtggcaggctccagcaagcaccagatcagtaccttcagccctagtacttctcagctaactagtggtaaaggtgggcctgggccccaggaccttatggaaatagacatgaaggtccatttggatggatggactgagttttaaaagcctctgcttttgctaatggatggtaaagcccatatgctgttgcaccctctcccagcctctcttcacagggacctacagactcctccaccagaaccctccccagcagacagcaactccccttcagttggtctgtgggcactc

SEQ ID NO: 463984 - DNA, 676 bp, Homo sapiens
ttaggagatgtcctcgccccacccgatctgcctctcttgtggtttgcaggacagcctcctgctgcaggaggtgggaagcgagccagtcagagcccctggagtggaggccccacgaccttctcatctgcaggtcgcgtctcctgtggcggtggcagcagcagctgcccatatgtgtggagcacttaagtgcctgggccctggaccccataccgttctcatgccgggtgccctttactccctgattccacagggctggtcccattgtcctcaggcccagagaggcgggctgggatccaggtctgccacgccagctgcactcagtccccgtgctggtgctgtgagaatgttgtctagacccaaatgggcaggaaaacacttggaggaccacccaggagaccccagggcccagctccctcagagctgtcatgtgcttggcatagtcctttcaaagtctccaattagaatttgataacagtaattcagcgtcataattgatctctgttttttaaaaacattattcttggatatgataataaaagcagtttaattgaaaataataggtgacatttccagagagcttaatttgtgctaggcaccaagcccagggcttggcctatctcatttaatcaccacaacaaccctacaagtagataccattattgtcccatgttatagg

SEQ ID NO: 463985 - DNA, 1006 bp, Homo sapiens
  misc_feature (1)..(1): n is a, c, g, or t
  misc_feature (3)..(3): n is a, c, g, or t
  misc_feature (6)..(7): n is a, c, g, or t
nanctnnagtactcgcttctttgccagatcagttgttatgacatgaataagaagtataattaccttccatttagtgaatctattatgtacctctcatttcacatactgtatcttaacaatacacattccctgatgcgcaaacagcagggaaccctaagtgtcggtccctatctcctaggtccacaccgccttccgtcacaccaggctctctccagactggctgagagggtggagctgggagcctctgaggctgcatcgacattcgccaccagggggtgctgccgcaccgttcccggcgccgcctctgccccgcgagggactggggcgttttccaccgggcgcgtgtctggggctgtgactcagaatcctcaaactcagagttcgcagacggaggaactcatgctcaaacgtctgaacaaaaatatacagagcatgaaatttttactccagaaatagtgcacctctctcccccttggggaaaagcgttttccctacttccgtaggagttaactcgccaaggcttttaggagacgccgcacagctgtgctcccgctcgttgaaaaaaagatgccaaaagtgtagaatttgaccacaaacaaccgagcttcacaacggagtgtggcttgtgtgccaggccctgtgctgggggtgcaaaaggccccccgtgtccagcctggcagcagtgacttcggggtccctcctgcaagcttggctacagggcagaagaagccatcagatatgcatttgtctccggtgagcagagggaacaccgagttctgtccttttcccacacctaggaagacaagctatcaatttacgttgccaggctgaaattcaacagaactgttttagggttttgccgtccacaaggaatttccttgtgggaaattgtgatggagggcctggcctcacacgtgcctggtagcaggatggcaacccgatggcgacttcaggcttcacacccacagacgaccgtaatcagagaaagtaaaaaagaaagaaaaaa

SEQ ID NO: 463986 - DNA, 3718 bp, Homo sapiens
agctgggtcctgcttcctcctggtcttgtcgatgaggatttttagaccgtggagactgcgctgccctgccctgcacctaccctcactctccgtgttctcactaaggtggaaattgccttccctcactactgacgagaccatgtgtaaaagcgtgaccacagatgagtggaagaaagtcttctatgagaagatggaggaggcaaagccggctgacagctgggacctcatcatagaccccaacctcaagcacaatgtgctgagccctggttggaagcagtacctggaattgcatgcttcaggcaggttccactgctcctggtgctggcacacctggcagtcgccctacgtggtcatcctcttccacatgttcctggaccgcgcccagcgggcgggctcggtgcgcatgcgcgtcttcaagcagctgtgctatgagtgcggcacggcgcggctggacgagtccagcatgctggaggagaacatcgagggcctggtggacaacctcatcaccagcctgcgcgagcagtgctacggcgagcgtggcggccagtaccgcatccacgtggccagccgccaggacaaccggcggcaccgcggagagttctgcgaggcctgccaggagggcatcgtgcactggaagcccagcgagaagctgctggaggaggaggcgaccacctacaccttctcccgggcgcccagccccaccaagtcgcaggaccagacgggctcaggctggaacttctgctctatcccctggtgcttgttttgggccacggtcctgctgctgatcatctacctgcagttctctttccgtagctccgtataagattccgtggttgggcccagagcctgtcgagggtgccagttagctgatgcgagggtagaggagagacgtgggttgagaatagtgtaaacttctagcgctggtgatgtcactgactcagtggggatcttggacaaattatacagtttttccatctataaaactcagggtttgggcaagatcattggtttatcatagtgaaacccaggaccccaaagttctgcgtaggtgcctcagggacttttggatttggaaagtaggctaagctagtgggtgtctccaactcctgatctaaacacccatcctccaactcctacctcctcctcttgcttcgatcagaacagctttactttagatagggttccatttaagatttttgtaccaaaaaaaaaaaaaaaaaaagtttaactacttttaaaaaacatctctgcttgctacagaagttttcagccctggctgtacttcagaaattctggggagattttaaagaaatataagtacttagcctctaccccagaccaatgggatcaaaatttgggggaagtgggacctgagcatctgaattagaataaaacacccaggtttgctgctacaatggctgtgttctgctctgagagtctttgtcactgagctctgccacccttgctgggacactcataaaacttgttataattactcatccctgctaggatcatattatgcttgtgacgatattcggagtctccttctcacttcaccactcattctttctatgtcttgaacttacatatcccagagcaaatcagtttaaattaaggtacttgaagtagggacggcgttttgtttttatttttgttttgttttaagatgatagcatggggtcatgtgaaggggcctgaacactgcattgggagctgtgggtcctcattttattttaattgggttctgctgggacttttgggggggtcattattctctctgggtcttagatgctcttatgatatgaagcattctgaagtctgtctttgtgccatcctgtattagcccatataaagcatttttacacactttccaatgacaagttctccagcctgtatttgagcacccccagtgacaggagatcattaccacccaaggcagctcatgccatctttggatagttctgccttttaaagaagactttttccttttaagcctccctcaaaagggtttgaattttttcactttctggttctggttctcacaagtgggatcccacaggggaggatgtttcctattccccatacagatcttttctcagcactgcagccagggcaatccttttaacctaagtcagatcctgccattcttgtgctcccttttgtgttctgtaaaagccaaatcctgcaaggccaaacgtggtgtggcttcagccgtgttactgatatcctctagtactctttgccctcatttctgtagctaccctggtttctttgctgttccccaaatacacaggcatgtatgtgcttagggccttattctacctgttccctctgcctggaatggtctttcccaagaaattcacttgcctcactttgtgacctccctcaagtgttggctcaagtctcaactcagatgctcttctcaggccttctacttcatgctgtcacctgttcccccaccccaccctctcgctcctggttcgccttgcgcttaccttagcctgtgttttcagaaagcagaagtcaaggcagaggtttatgtgatagtatttgactggggagcatgacctcagaaagctggagtaaggcagagggagcacagcaaagcaggagggaaatccaatggaaggaggtcttgtcaagttggccatctccgctggtgaagggttgttcagtcccagaaaaccatctgagaagccggatgaaatgcatctccagatcacttgggagtaaagggctatctatcccctggctcctgtcttccaatagctgaaggttgccccataggatgttaacttccctccactctgggttgtggtacactaattgaatgaaaacatgaatgaataagtactgaaagagtatcagaagacaaggttagtgtccttgctctgactttctcaaggtttctctgcctctgcctgcctcctgaatgttggtattctttaggctccaattccaagtcttagtctctttgatcttctcatatttgtccatgtcctctggctgattgaatctattctgagtgttctttaatatctgtatgctaatgactcaaatatacatctcaaggcatgaattttcttcttgacttcttacatttatgttctccttgacatctctgtttgactgtttcacaggcatttcaaagtcaacatgtcctaactgattctaaagtatgttttccctctggtgttccataagattttttattttaactatttttaattgcacaattcagtgacattaagtacattcacattgctgtgtaaccatcactgctgtttatctccagaaccgtttcatcaacccaaactgaaactatcaaatcatttcacagccccacgacaaccaccattcaagtttctgtctatgagtttgactattttacctagtttactttaatatatagggagtcatttattttcttcccctcatatttatttcaagcaatgacttcatgtttccagtggcatagtagccacaatatttgtccttctgcatctggcttatttcacttagcataatattttcaaggtatgtaatattaaagcatgtatcgcaacttccttcctttttaaggttgaattgtatttccttgaatgtatataccacattttgtttatttattttgtcttagcccattttctgttcttacaacagaatacccgaaactgtgtaatttataaagcaaagaaatatatttcttacagttatg

SEQ ID NO: 463987 - DNA, 1113 bp, Homo sapiens
ggccacatcatctgatttcttactaggtaatatgccttccaagtccactgactctgttggaaaaattagaggaaagcctcttccattactcttattttttgaggccctctttatcacaagtcatgcttttccatgtcctgttgatgcagctctaaccctggaaggaatcaaatgtggattatcagaaaaacggttagatttagttaccaattgggttacacaggaaagactgacattttctgaggaggctggggatgtgatttgtgattatggggagcaggatacttataacaaggccaagtgcctggctttagctcagattatctacagtgaatgtggcctgcacaagaaagctattctttgcttgtgtaaacagggtcagactcatagggtcatggagtacatacagcagttgaaggactttactaccgatgacctgttgcagctattaatgtcatgtccccaagttgaattaattcagtgtctcactaaagagttgaatgagaaacaaccatctttatcttttggtcttgctatacttcatctgttctctgcagacatgaaaaaagttggcattaagctacttcaagaaatcaataaaggtgggatagatgcagtagaaagtcttatgataaatgattccttttgctccatagaaaagtggcaagaagtggcaaatatatgttcacagaatggctttgacaaattatctaatgacatcacgtctattcttcgatctcaggctgcagttacagaaatttctgaagaggatgacgcagtcaacctaatggaacatgtgttttggtagttctatatcttaaccagctgagggagcttgtacaacaccttatgtatgctggttgggaaaaactgattttaacgtaactaacttataaataaatctagagtaagaagatctcagaaataaatcacacttttgttatgatgacatttagatttgtctttgaaatatttatactattgcttccttttccccatatggtcatttcttatattgaatcttgataaaatccaagattataactttgtgtgaaaagataacaattcactggccgtcggtttaaccgtgtgactgggccctggcgtttccct

SEQ ID NO: 463988 - DNA, 914 bp, Homo sapiens
ccggccagtcggttctaccatcaggaaagactgacattttctgaggaggctggggatgtgatttgtgattatggggagcaggatacttataacaaggccaagtgcctggctttagctcagattatctacagtgaatgtggcctgcacaagaaagctattctttgcttgtgtaaacagggtcagactcatagggtcatggagtacatacagcagttgaaggactttactaccgatgacctgttgcagctattaatgtcatgtccccaagttgaattaattcagtgtctcactaaagagttgaatgagaaacaaccatctttatcttttggtcttgctatacttcatctgttctctgcagacatgaaaaaagttggcattaagctacttcaagaaatcaataaaggtgggatagatgcagtagaaagtcttatgataaatgattccttttgctccatagaaaagtggcaagaagtggcaaatatatgttcacagaatggctttgacaaattatctaatgacatcacgtctattcttcgatctcaggctgcagttacagaaatttctgaagaggatgacgcagtcaacctaatggaacatgtgttttggtagttctatatcttaaccagctgagggagcttgtacaacaccttatgtatgctggttgggaaaaactgattttaacgtaactaacttataaataaatctagagtaagaagatctcagaaataaatcacacttttgttatgatgacatttagatttgtctttgaaatatttatactattgcttccttttccccatatggtcatttcttatattgaatcttgataaaatccaagattataactttgtgtgaaaagataacaattcactggccgtcggtttaaccgtgtgactgggccctggcgtttccct

SEQ ID NO: 463989 - DNA, 1302 bp, Homo sapiens
ggccacatcatctgatttcttactaggtaatatgccttccaagtccactgactctgttggaaaaattagaggaaagcctcttccattactcttattttttgaggccctctttatcacaagtcatgcttttccatgtcctgttgatgcagctctaaccctggaaggaatcaaatgtggattatcagaaaaacggttagatttagttaccaattgggttacacaggaaagactgacattttctgaggaggctggggatgtgatttgtgattatggggagcaggatacttataacaaggccaagtgcctggctttagctcagattatctacagtgaatgtggcctgcacaagaaagctattctttgcttgtgtaaacagggtcagactcatagggtcatggagtacatacagcagttgaaggactttactaccgatgacctgttgcagctattaatgtcatgtccccaagttgaattaattcagtgtctcactaaagagttgaatgagaaacaaccatctttatcttttggtcttgctatacttcatctgttctctgcagacatgaaaaaagttggcattaagctacttcaagaaatcaataaaggtgggatagatgcagtagaaagtcttatgataaatgattccttttgctccatagaaaagtggcaagaagtggcaaatatatgttcacagaatggctttgacaaattatctaatgacatcacgtctattcttcgatctcaggctgcagttacagaaatttctgaagaggatgacgcagtcaacctaatggaacatgtgttttggtagttctatatcttaaccagctgagggagcttgtacaacaccttatgtatgctggttgggaaaaactgattttaacgtaactaacttataaataaatctagagtaagaagatctcagaaataaatcacacttttgttatgatgacatttagatttgtctttgaaatatttatactattgcttccttttccccatatggtcatttcttatattgaatcttgataaaatccaagattataactttgtgtgaaacagtgtagggcatttttatctaaggacataagctaatgtccagatatattactttctggtgatgtaatatgatagcaagaactgaggaaggtgagaaattggcatagctattaaactgactgacattcaaaccaagctttattacagaaagctacagagatgataggattgaaaacatgaccttttgccagaaagctagtgggaaatgggatcattaaccttgaagaaatattacagatgaaccat

SEQ ID NO: 463990 - DNA, 1143 bp, Homo sapiens
ggccaggctggttcatgccggacacctaaccccctgctaccacatgctgttttccacactgggtgctggcctgtgggaacctgcacaagtcgggggcaacatggtcccaggaagtctttgacaggctgccccctgctggctgctgcgggaaccacatggcagatggctcctggtgtcccctggaaggtcttgctctgtcacccaggctggagtgtgtggtgcgatcatgcctcacagcagccttgacatccccaggctcagatgatcctcccacctcagcctcctgagtagccgcgactacaggcgcatgccaccacacccaggtgaggaacctgctcagggtcccccagccccagcgccgggtctacccacgactgggagcggaggatggcgaccgtgcgcggggcagggaagcgagggccgggagtgccctccggtggcgaaagccaggaattaccgcgcacctattctggaccagagtaaaaatcgcctggaaaacatcttggccttcacagggacagtacggagaaaggcaagcagccgccaaggccggggtatccgcctgcacttagcggggctctcggaagccggcctggggatgagccaggcgtcctcgggcctggtgctggcgcctggcgcgccctctgctggataccgccgccttgtcaacagggggctctggcatagcatctgggtgtctgactccatcacctctggggaagaaagcaaaggtggtgagaagacgctggaaccggccagccctggaggcggggtcggctggggcacctccttcctggcctctgcgcctactagacgcctaggctgggtgggctggaggctccaggagagagcggtggcaaaagagtggtgtctgctgccccagagcgttcatttcagaggctggagagggaagaaaatcaagaaggaaggaggtggccgcgagcagctgtttttagctgagaaaggagaaatcagtgaagggggctcttaccatgttctggaagcatcctgatgggggtcggggggctaggaccctgcaaagagcacacgaggccacagggcagggctctggctcttgggtcaacgttaacagtcctcttgtcagggacaggaggaaagtcacctggagggggatgttggatt

SEQ ID NO: 463991 - DNA, 1271 bp, Homo sapiens
cctgagtagctgcagttctaacaaatttcctttcgaagtccatgctgctggcctgtgatcacctccctagatctttagcttctactcccactgctcctaccactccagcaacgccagataatgcatcacaggaagaactcatgattacattagtaacaggattggcgtccgttacatctagaacttctatgggcatcattattgttggaggagtgatttggaaaactataggctggaaactcctatctgtttcattaactatgtatggagctttgtatctttatgaaagactgagctggaccacccatgccaaggagcgagcctttaaacagcagtttgtaaactatgcaactgaaaaactgaggatgattgttagctccacgagtgcaaactgcagtcaccaagtaaaacaacaaatagctaccacttttgctcgcctgtgccaacaagttgatattactcaaaaacagctggaagaagaaattgctagattacccaaagaaatagatcagttggagaaaatacaaaacaattcaaagctcttaagaaataaagctgttcaacttgaaaatgagctggagaattttactaagcagtttctaccttcaagcaatgaagaatcctaacaatagagattgctttggtgaccatgataggaggaaacgaaacttgtaagattggaacagttgttatttttatgaaattactttaaatatgaattgtactaactgtacctaaatagcaaagccctgtgtagattctggtaatgatctgtctcagggtatgtgtatttttgaagagtgttatgtccttagttttaattttgagtaaagaaaaggctaaaatcatgaattagttacaagcaacagtaccaacttatgtgacccctgaggggtggggctgtgagctcttaatttgtttttgattctgaaaaactctgcttcctggcatccaggagttagagattgagcctttcatcttctttctcaaaactagtttttgatgctttctttcatgggaatagtcacttttttatttagtaaatcgcattgctggaaccaccaaggagtgtggaatgtccttgagtgtattatttatgcaagtcacagtcacgttgccatcatggcagctatgtgaaacactaataaatgtgtttttactttttattcccgttaaaactgatgtaaaacaggataaaggcttgttatagtcacttataagtatctgggtctaagtaatttccttagatgtttctaaagaaacattttcag

SEQ ID NO: 463992 - DNA, 2175 bp, Homo sapiens
acagttaatcaactggcccatgcccttcacatggacaaagatttgaaagctggctgtcttgtacgtgtgttttgcccaaaagcaaaatgtgccctcttgagagatgacctggtgttagtagacagtccaggcacagatgtcactacagagctggatagctggattgataagttttgcctagatgctgatgtctttgttttggtcgcaaactctgaatcaacactaatgaatacggaaaaacacttttttcacaaggtgaatgagcggctttccaagcctaatattttcattctcaataatcgttgggatgcctctgcatcagagccagaatatatggaagacgtacgcagacagcacatggaaagatgcctgcatttcttggtggaggagctcaaagttgtaaatgctttagaagcacagaatcgtatcttctttgtttcagcaaaggaagttcttagtgctagaaagcaaaaagcacaggggatgccagaaagtggtgtggcacttgctgaaggatttcatgcaagattacaggaatttcagaattttgaacaaatctttgaggagtgtatctcgcagtcagcagtgaaaacaaagttcgaacagcacactatcagagctaaacagatactagctactgtgaaaaacataatggattcagtaaacctggcagctgaagataaaaggcattattcagtggaagagagggaagaccaaattgatagactggactttattcgaaaccagatgaaccttttaacactggatgttaagaaaaaaatcaaggaggttaccgaggaggtgccaaacaaagtttcatgtgcaatgacagatgaaatttgtcgactgtctgttttggttgatgaattttgttcagagtttcatcctaatccagatgtattaaaaatatataaaagtctccctagatctttagcttctactcccactgctcctaccactccagcaacgccagataatgcatcacaggaagaactcatgattacattagtaacaggattggcgtccgttacatctagaacttctatgggcatcattattgttggaggagtgatttggaaaactataggctggaaactcctatctgtttcattaactatgtatggagctttgtatctttatgaaagactgagctggaccacccatgccaaggagcgagcctttaaacagcagtttgtaaactatgcaactgaaaaactgaggatgattgttagctccacgagtgcaaactgcagtcaccaagtaaaacaacaaatagctaccacttttgctcgcctgtgccaacaagttgatattactcaaaaacagctggaagaagaaattgctagattacccaaagaaatagatcagttggagaaaatacaaaacaattcaaagctcttaagaaataaagctgttcaacttgaaaatgagctggagaattttactaagcagtttctaccttcaagcaatgaagaatcctaacaatagagattgctttggtgaccatgataggaggaaacgaaacttgtaagattggaacagttgttatttttatgaaattactttaaatatgaattgtactaactgtacctaaatagcaaagccctgtgtagattctggtaatgatctgtctcagggtatgtgtatttttgaagagtgttatgtccttagttttaattttgagtaaagaaaaggctaaaatcatgaattagttacaagcaacagtaccaacttatgtgacccctgaggggtggggctgtgagctcttaatttgtttttgattctgaaaaactctgcttcctggcatccaggagttagagattgagcctttcatcttctttctcaaaactagtttttgatgctttctttcatgggaatagtcacttttttatttagtaaatcgcattgctggaaccacccgccgcatctcttcttcacggcgcctgcgctcttcctcctgcctgagctccagttgctttcgtttttgcacctcttggttgtgcggctcttccatcctccgaagttcttcttggcgcctcatcaaatcctgtctcattagcatgacctggtgctcatggcgtgcagcttccatctccatctccagcttctcacgagcctagcagaagggggtggtgtctccaaccccccagcactgaggaagagcggggctcttct

SEQ ID NO: 463993 - DNA, 923 bp, Homo sapiens
gattgaatgggcgttgtgagtgagcaaacgtgaagcagggactccgggcctgacagcgctggctgctctcttggccatcctccccagatgtaccgtcccaggtgtattaaatgtcacctggaaatgtggtgacaactccatgacccagcaggaggaattctggcccctgcacaggaagctcagagccagaggggccaccaagggggttttctctgctccctcgcagccagaccccagtgtcttccaggggagggcagccctagtgggctgccccacagccacctgctactctcatcctcattggcagctgcagcctccagggattccacaccctccccagcagacagattccaagggtaccaactgtccacaggagccagattggccatcccttcctagcctctccctgcccctgagagtaaatcccttcctcaatcccacccccaaactctgcgtgcctgccccacaggtccagcagtgcctcacggggcagacacccaagaacaccgtccagccgggaggacacatcttcatctccttggataggcaggtgggccaggcccaccctgagctgaggcctgaaggtgccggaggaagaagaaagctgccctggggtggagcggaggctgctcctcagagcaacacagcccaggccccagctcaaggagggcgaagacaccagccttgcgcttgatggtaaccccgcttggctaacattcttccctgctgacttgaggccccagctcaaggagggcgaagacaccagccttgcgcttgatggtaaccccgcttggctaacattcttccctgctgacttgaggccccagctcaaggagggcgaagacaccagccttgcgcttgatggtaaccccgcttggctaacattcttccctgctgacttgaggccccagctcaaggagggc

SEQ ID NO: 463994 - DNA, 626 bp, Homo sapiens
gtaatccaaatccatgaaattacagatacaccttggctttctaccattctagtgcactgctctgtaaatgggaggtggctcaaatattaattgagttgggaggaagcagtggttaatctctatactatactaatgggtctgggtgaaatgacctcttatgatcttttccagtaaaatattcaacaaacaacataagtctgttatcttcaacaatatataatctatcaggatagctattttttaaatcacaggtgatttgggaggaaggtctcttgagaggagcattctgccattctggtgtagctgtttctgttctctccagcagctattttaggtatttaattattttagagtgtgtgcttgcatgtgttttgtctcaatgtatgccaattttttgcctagtcctcctgacatcttaatctatctgccaacgctacatgccgtcaagccaaggaagaatttccttctcactgttgcttctctgaccaaggaagacataagcacaaccaatcaccagactgatgaaattccttccagtttcagaaaagattatcaccaatccctacattataaaattcatactaataaagcacaaacattgaattctaacattatatgctatgtga

SEQ ID NO: 463995 - DNA, 872 bp, Homo sapiens
  misc_feature (39)..(40): n is a, c, g, or t
  misc_feature (42)..(46): n is a, c, g, or t
agcgccgactgcatgccacctgcgagaggaagaggccgnnannnnnggttctgggagggtggggacagaatttccccggtgctaatgcggcactgaatcgcaggaggctgcccatgcatttcttcagtcatctacaaccaagaattctcagagcagtccctcggcagccttttgaagctgtgctagagcagaaagctgctattgttctcatctctcaacaaggaaaggttcaaactttgcctcttcaatttgaaagattttttttttatggtggtggggggagggattgcaatctgatactcaaagttaactttgaggatttggagtggtctcccagtttaagctgcagatcaaatcacagatgccctaacgcctgcatctcaaattttggctggctgctcgtgaagaaacgcctgcagaaagctgtaaatgccggcagtggcagtgagtgtgatggacaaggctaaagagaagactcatgaactttcggcacaagaaaccaaatctttactgagtgtggtggaagaatgcccaggtgagcacaggcacagtgccaggtgctgcagaggacctgagacaaagagtcactgcgccctcagagagtttagaatccagcactgaggaaaagagaggtcatggggagcacagtcctcctgacatcttaatctatctgccaacgctacatgccgtcaagccaaggaagaatttccttctcactgttgcttctctgaccaaggaagacataagcacaaccaatcaccagactgatgaaattccttccagtttcagaaaagattatcaccaatccctacattataaaattcatactaataaagcacaaacattgaattctaacattatatgctatgtga

SEQ ID NO: 463996 - DNA, 793 bp, Homo sapiens
tcagggtgtgtgtatgtgtgtgtgtgtgtgtttaactgagagtactgagatgatttactaccagggttgtcatgaagatgaaacaagcttggatgttctgttctgcagttacctaatatctcgcaatgagaaaggtttgcgtccagcgatggaggaaaggtcacagaacaatctgcagcaggtgaaatgaaaccgcagagcctccagagagcacatgaaccacgagaaaactctgtggggatcaccaggggatggaccagggaggctcaggactgggagatgagacaagcaccctcagaaggcgcagacttagctagattaggaaaaagaggcccagccaggcaggtggcacaagatgttagaggtggaagatatgaaggagttactgcatctgtggccttctcagtggagcccaagaacaagacttcagtaatcatttttcaatcagtacccacttggtgccaagaaacgagattcacaaatggagtaaacacagctcttgctgtgatgggcttacatggtagggggcagataaaggggactcaaaaagaagaagaaaaagaagaagaattcaataacagtcatcaccaaaagacagaaagagaggaagacagaatgtctgcattgagaaaatcttggtatcttatctctgggatgttattgatgatctgagtatagtgcaaaatcttaagtgaaatgaattggtggtttcagttccggatatggtatgcaaagaaaaaaaaaatttgctctttgaaattcaacgcttcctcgtctgtgcttcaggaagcca

SEQ ID NO: 463997 - DNA, 1992 bp, Homo sapiens
agtaaggttttggggatgctggcgaacactgatttgtgggtgatggtgttagatttcagcaggttgttccagtggctgttagataaaactggtttcaggttacacctggcagttccagcagccaggtctgcagagaatctgagagcagcccagggatgggcactcatgaaggagagtgatgctgcccacaggaagcaggccagtgctgagcagagagaaccacaagaaaagcagacaggtctgcccgcgtttgagctggtcagctcaaaccagatggagcctgggactgtgaccaaggagcgagtgaaggtcaaagccacacatggggctgaggggccaggtggccgccttatgagatcgaaggcgggaagctttggaacagggcaaaaaggggagcccagggtgaggggagagggccgagcagctcggatctctgatggctgagtggcctgttctgggtctgactaccctaccctggggcctgactctgccccgcccctcgcaacactcaacaaacgcttgtggaaggagtgaacaaatgacaagtcacgaaacctaaatacagagtcttcagctttggaggagactgaggtgcgggacatggaaaagaaggtcattctcttggagccccaacaatgaccaggagaaattcatttggcggtaaaaccacacgaaccctattacatcaccaagccctcaccgtttccagcacccagctattaaacatatggaaatgatgacaatttaaagcttataaataacattagcggtggcttggatttattgttgtggcctccggaagaacttgggcacagtgtaacttcctggggcccgaggttgttaatcggtgaattgttcatgaaggacagtgctcactgtgaaggtgggtgtcctgggatgctctgcctggcccgcgggagacaaggctatggtctgacatccctcagcctgtcctcattgtcctggctctgagaagaagctacaaaacacagtagaagaaaaagaaaacagtcttttaaagacttgtaatgagttgttaatgataaaagtaacacatgccaactggaaaaatgtgaattttttatctcagccaaaagtataaagatacttcgatttctttaaaaacttatggaaatctgttgttgtatgcatagattgttgaatacatctctgcttatttaaactcctgaaagtcttatcaatgaggtcaaaaggcaggaacaggttgtttgttgttgttggttatttgtctttttgagacagggttttgctctgtcaccaaggctggagtgcagtggcgcagtcacaactcattgcagcctccatctcctgggctcaagcaatcctcccacctcagcctctagagtagctaggactacaggtgcacaccaccatgcctggctaatttttttttttttggtagagatagtgtcttgctatgttgcccaggctggtcttgaactcctggcctcaagcgatccttccaacttggcctcccaaagcacaaggattacaggcatgagccattgcaccaagcagaaacgtgtttaaggctcttaaaaattattagaaaatattgctaacttttcttccagaaaggttttaccaatgcatgctttcatcagcaatgtgtaggaagtatttcattgcagcctcagcaatactgcatatattcatttcaaaaacatagccagcttgcaaaaaaatgtatttggtggtagcatttcattaataatgaagtcacagtttttctatgtactgatttctgacttctatgattctatttacttgaaactgtagaacatatatagagttttttggatatttctattacgtctatatgttgttttactttcccttatttttgacatgctgtatatattcatttattatgttattgtcagtcctcccccacaagaatataagctctgccaggttagggatttctgtcaattttgttcactgactcagaaaagcacctggcatcatatt

SEQ ID NO: 463998 - DNA, 3278 bp, Homo sapiens
atcggttaggagtcggctttatgtgggaagagagaaaaaaacttggtgaaatgctttctggactaattgaagaaaaatgtaaactacttgaaaaatttagccttattccaaaagagtatgaaggctatgaagtacagtcatctttagaggatgccagctttgagaaggcggcagcagaagcacgaagtttggaggcaacctgtgaaaagctgaacaggtccaattctgaacttgaggatgaaatcctctgtctagaaatagagttaaaagaagagaaatctaaacattctccacaagatgaactgatggcagatatttcaaaaaggatacaatctctagaagatgagtcaaaatccctcaaatcacaaatagctgaagccaaaatcatctgcaagattcttccaatgactgaagaacgacgggcgatagcaataaaagatgctttgagtgaaaattctcaacttcaggaaagccagaaacagcttttgcgagaagctgaagtatggaaagaacaagtgactgaacttaataaacagaaaataacatttgaagactccaaagctgctgtgcttgaagaagacacaacggatgatgataacttggaattagaagtgaacagtcaatcggaaaatggtgcttacttagatgatcctcccaaaggagctttgaagaaactgattcatgctgctaacttaaatgtttctttaaaagccttagaaggagaaagaaaccacattattattcagttatctgaagtggacaaaacaaaggaagagcttaccgagcatattaaaaatcttcagactcaacaagcatctttgcagtcagaaaacatatattttgaaatggaagaaaagatcagccatgtcactgaagagctggagacctatagaaagctagccaaagatcttgaagaagaattggagagaactgttcatttttatcaaaagcaggttatttcctacgagaaaaaaggacataataattggttggcagctcggactgctgaaagaaacctcaatgatttaaggaaagaaaatgctcacaacaaacaaaaattaactgaaacagagtttaaatctgaacttttagaaaaagatcctaatgcacttgatgtttcaaatacaacatttggcagagagcgttcgccatatggtccctcaccgttgggtcagccttcatctgaaacgagagcttttctctctcctcaaactttgttggaggatccactcagactctcacctgtgcttccagggggaggaggaagcccaagcagcccagggaatcctctggaccatcagattaccaataaaagaggagaaccaagctgtgataggtcaactgatgctcacagggctccttctgacactgggtccctctcatctccatgggaacaggaccgtaggatgatgtttcctccaccaggacaatcatatcctgattcagctcttcctccacaaagggaagacagattttattctaattctgatagactgtctggaccagcagaactcagaagttttaatatgccttgtttggataaaatggatgggtcaatgccttcagaaatggaatccactagaaatgatgccaaagatgatcctggtcatttaaatgtgcctgattcatctctccctgccgaaaatgaagcaactggccccggctttattcctccacctcttgctgcaatcagtggtccattgtttccagtggatacaaggggcctgttcacgagaagaggacctcctttcccccaacctcctccaggaaccatgtttggagcttcacgaggttattttctatcaagggatttcccaggtccaccacatgctccatttgcaatgagaaacatctatccacagaggggtttacctccttactttcatccaagacctggattttaccccaaccccacattctgaaggtagaagcaagttcccttgagggttgattccaccttcaaaggagcctgctactgaacatccagaaccacagcaagaaatctgacaatatttttgctttcttcaaaagcaactttgactgatctcattttcagtttaagtaactgctgttacttaagtgattacacttttctcaaattgaagtttaatggaattacagttctcaggacagtattttgtaaataaagatggtttaaacatgaaaaaaacaaaaacaaaatgtatagtgatgtagaaacatgtttgaaagatatacaatacagataagtttgttaggatggtgcaattaagtgtgttttcccatgtgatttccattttatagaattttcacttcattttgtgataataattaattaaaacaattaaaattcatgttttatctctcagttcaaacagatcttccttccaagaaaaccttccccttttatgttcagaaagactttcttgtaatagaaaatctgcaccaaaaataaaactcaacaatgacaattatgttttttaaggatttcacttttgaaaaataaatattacttcactttctttttaaaaattatttgttaaatgttatttatttgtacttataaataatttatttttgaactattttgtaattacttttactgagtaattattttcattggaatgttaagttatgcttagcatttatattttatagttaacttttacttgatgttttataatgtttataaatgttcatattttatagtattaatatttattttgatttttttaaatcataaattttcaacattttaaattgattgtttttgtcatttttctctcgtaataaatcattgtttatctatagctcaaatcacagttaatggtttggactatttccaaatctccaaatttcaggatgtctctaatatgcaaacagataaatgtggctttctgcatgtctgtataagaacataattaaggaatttaaattttatcaaaatttacttctcgatgtcttcttacgaagctcattcccttattcccatttctgctctaccagaagccttttcaatatcaagttattctcacacatattcaagtttgagaatctgctgcagtaataggtcattgaagacttttaagcaagagagggggataataggttaaaccttttagaaggaatgctctgttagctgtgcagaagagggcagagcattttaactttgcaatgcaaatgggaccattgtgataacatggcagcagaaattacgagatgagagatgcaaagatatcaaataatatttggaatttggatgaagaattattttcatagctatttgatacttttaattc

SEQ ID NO: 463999 - DNA, 728 bp, Homo sapiens
acaaatgctaaacaggcatatgaaaatgtgctcaacatcattgatcatcaaagaaatgcaactccaaactacaatgagatatcatcagctctgtaactctgagtttgaaaagatacaaatcacaatggaaattctggccaagcatagtcctgttggagcagaatggggcagagcagaaacaacgcaggatttttctgatgggtgcctgtggcctctgactacttactggggcctattcattcaaggaagcagaggtgaaaaagagcatgttagtgaccacctcgtttcatggtcttcttacagaccattctctgggagtctcaccctccttacccaaagtggcccatcactttgtagtttcttgaacaaatatgagagatgctgttgccagccaaaatgctacaaccattttacaggaaactagacgacatgaaggctgacacatcaagtgagagaagcaaacactgagagggaaagtccctaagtccttaataacctcactgactgtgctggtcctggaaacaactgttttctggactctcagagcaagaaaggaattatcaagccatttccaactggggttttttgttaccagcagtccaatacattctaactgataaactacctcaaagaactattgcaaagattaagggggaaaggtctgtatatagggctgtccagtggacacctccgtgataataaaaatgttccgtgtctacactgtacaa

SEQ ID NO: 464000 - DNA, 3099 bp, Homo sapiens
ggcggggtggggaggtagaagggtgagagcagcctttcccagcatcgtcctttaagatgcgacagaaacaggtcccacctgagccagcaggaatgcggcacccagtggctggctctgcagtcttgatgctcgccggcaccttcagggtgaaggacgccctgtcggaggcccagaaccagggaggagaggtgctgggaggtccccctctgggagagccagcacaggagctaaccagtcagaggagaaggcggctcgtggaggagttcatgctcttggccaacatggcagtggcccacaagatccaccgcgccttccccgagcaggccctgctgcgccggcaccccccgccccaaacaaggatgctcagtgacctggtggaattctgcgaccagatggggctgcccgtggacttcagctccgcaggagccctcaataaaagcctgacccaaacatttggagatgacaagtactcactggcccgcaaggaggtgctcaccaacatgtgctcccggcccatgcaggcagtagcactggccctgacacccagccctgaaagctcggggactgcaggacaaacagcttcaggggctgtggccccagctgggacgggctatgcgctggtccctagagactctcgatgggaggatggacgttgcctccttgaacaaagacccacaggctccttggcttctgcttgtgtctccagcagacagcgtctgcagcccctggtccaacaaaaccgcaggcggcctcctcctcttcctcctcctcattgtcctcctcgaccaccaccacctcctccttccaccacctcctccttctcctcctccgctgtcgcctcctcctcctcctcctcctcctcctcctcctcctcctcctccgctgtcgcctcctcctcctcctcctcctcctcctccgctgtctgtccacacatcgctgccgacggtgaggctgtgggtggtgccagccttccaggcctggctgggcagctctgggcttgtcaggctctgacccatcccgtcccgcagatggcactgtacttctgctcggggctgctgcaggacccagcgcagttccggcactacgcgctcaatgtgcccctgtacacacacttcacctcgcccatccgccgctttgccgacgtcctggtgcaccgcctcctggctgccgcgttagaagctgcatggagcccacagccagccctggacacagccgggaggagggcgctgacctcgaagggccgctttctgctgccctgggagctgggtgcttggggctatagggagcgactagacatggcgcccgataccctgcagaaacaggcggaccactgtaacgaccgccgcatggcgtccaagcgcgtgcaggagctcagtaccagtctcttctttgctgttctggtcaaggagcccagggcagtgccaggaggtgccatggctgcagcactgtccctgcaggagagtggccccctggagtcagaagccatggtgatgggcatcctgaagcaagccttcgacgtgctggtgctgcgctacggcgtgcagaagcgcatctactgcaacgcactggccctgcggtcccaccacttccagaaggtgggcaagaagccggaactcacgctggtctgggagcctgaggacatggagcaggagccagcacagcagggcattcttcctggagggggcccccattacagacaggcgagcagaggcttccagaggccgaaggaggggccaggggtcctgctgcagggatggaggcagagctgcgcctcgacatcaggccctgccatccttgtcccctcacggctgggctctgcacaggtcatcaccatcttcagcctggtggaggtggtcctgcaggcagagtccacagccctcaagtacagcgccatcctgaagcggccaggcacccagggccacctgggccctgagaaggaggaggaggagtctgacggtgagcccgaggactcaagcaccagctgagctccaccagccgcctgccccgcctgccccgcctgcctgtcccgccacactggctttaggacctgttgacacggaggggggtttttaatttggtttttaacaactcaggggtttgtttttatttttatttaatttttgcagctcaacttttaaacaaactgcaggggagagggtggggctggaaggaaggctgaggcctggtcagcagtgaccccagcagagcaggccccagtcctcctgggaggctggccccccttttttctgggccctactgccctcctctgcccaggaaatgggggggtttcagcaactcagtgtcacagaataaaatcaagtgtggagtgccatctggtgtgtagggcgcctctgggaagcctgggcagcagaatgccccttgcacccagggcaagggacccagttcaggcttcacccctcgctgctgagccgatgtcaacacctggaactttcctgtcagttccaacacgattcagagctggctgcctggcagatgattgatactggagtctcattctgcctgattaaaaatggaattagtatgcaacactgagagcgcccccatcaccctgacgaatgtgactgtgtctgacgaatgtgactgtgtccaaccctgcccccacttcctctctgcaccagctccgcagggcctggtgggagtcatgggtcctgtgataccccctcccctcagttcctcaagcagcactctgtgaggtcctgtgcccagctctggtgtgagtgggtgccccggcagcaccaagggagcctggacagaggagccggcctgggcctgggggaggggaggagggccctccagtgccttccaaaccaggaggggaaactggctgctggtgacacagcctgggtgacacggatcccacctgcctcagtcccgagcagagctggctggccactgggcagtcccttccccagccagcctgaccccagcctgtactccttccccctccgtgggggaagctccgtggcttggcgtccccgagagctgccagaaactaggatgaaagccatggtgagcacggcctctgttcccctgcaccatttcctggggtgtccggattaacaagctcatttgatctgg

SEQ ID NO: 464001 - DNA, 784 bp, Homo sapiens
tttcctttcatgaagtcttcctgcccacagctctcgcctgcactgccgcagagtctctatccagcacatctgccatggggcatctgcatcacagcccagtcctggagataggtggtcaggtcatttctcacacagaacgctatgtcaccctgtttgcctctatcatcctcaaatgtgactacaccacctctgcccagctccaggacgtggtggtgacatggcgcttcaagtccttctgcaaggaccctatctttgactactactcagcgtcataccaggcagctttatccctgggccaggacccatccaatgactgcaacgacaaccagcgggaagttcgcatagtggcccagcggcgggggcagaatgagcccgtgctgggggtagattaccggcagcgcaagatcaccatccagaaccgagcagatctcatgataaatgaagtgatgtggtgggaccatggagtgtattactgcaccaaaagagctccaggggacacatcaggagaccccgataaggaagtaaagctcatcgtcctacgtaagtgctactggagctttctattcagtcaccctcactgccgtaacacttttactcacaggaaaaaaaaaaaaaaaccagaaataagcaagcctaaactggctgacagtgatcttcatcatcctgggagccctcctcctcctgctgctgattggagtgtgctggtgccagtgctgtcctcagtattgctgctgctatatccgctgtccctgctgtcctgcccactgctgctgtcctgaggaag

SEQ ID NO: 464002 - DNA, 1682 bp, Homo sapiens
gccactgcactccagcctggcgacagagcaagactgcgtctcaaaaaaaaaaaaaaaaaaaaggctggagtgcaacggcacaatctcggctcaccgcaacctccgcctcccgggttcaagcgattctgctgcctcagcctcctgagtagctgggattacaggcatgtgccaccacgcccggctaattttgtatttttagtacagatagggtttctccatattggtcaggctggtctcgaactcccaacctcaggtgatccgcatgcctcagcctcccaaagttctgggattacaggcatgagccaccgcacccggccatttgtatgtaattttctatatttattgaaatgcattttaagtaatatgaaagcatttttctccttacaatggaaaaaccaacttgattttacatttatttatataacctgacttaattctatgtaagtcaagtgaaaaaggaaacaactgctctgtggaatcaacctgaagatgtctaatttttcctctgatgccaccagacttaaagcagttcacgatcctctctacaaagaagtatatttaggttctccctctccctctccctctccctctccccacggtctccctctgatgccgagccgaagctggactgtactgctgccatctcggctcactgcagcctccctgcctgattctcctgcctcagcctgcccagtgcctgcgattgcaggtgcgcgccgccacgcctgactggttttcgtatttttttggtggagacggggtttcgctgtgttggccaggctggtctccagctcctaaccgcgagtgatccgccagccttggcctcccgaggtgccaggatggcagacggagtcgcgttcactcagtgctcaatggtgcccaggctggagtgcagtggcatgatctcggctcgctacaacctccacctcccagctgcctgccttggccccccaaagtgccgagattgcagcctctgcctggccaccaccccgtctgggaagtgaggagcgtctctgcctggccgcccatcgtctgggatgtgaggagcctctctgactggctgcccagtctggaaagtgaggagcgtctctgcccggccgccatcccatctaggaagtgaggagcgtctctgccaggccgcccatcgtctgagatgtggggagcgcctctgccctgccgccccgtctgggatgtgaggagcgtctctgcccggctgacccgtctgagaagtgaggagaccctctgcctggcaaccgccccgtctgagaacccaaagactagaattccatttctaaacccagcccagcagccggaagtcatgaagcagtcaacctgcctggacatccagctacgctctgctgcgccattctatccacccatcaagactcccctcccttctactgataaccctcctaaaagccaactgggattgaattactcctctgccaagaaccctctgctgcaccttatccaaggcccaccataaaatgatgccagcccacctcacccaaaacctcttccagaaagtcccagctccaccctggttctctcctccacagatgtcagacctgtatgtggtctgatggctctctcagcctccttcattctctccccatttctgccacattttccccaataaatcttgtgtgtgtctaattccattttggtgtctgcatctcaga

SEQ ID NO: 464003 - DNA, 3945 bp, Homo sapiens
gccaggcggctgcccgccatctccccagtgggatgggtcgctagctatctcacgcaggtcactaagtcggcatttatttcctgataggagatggcgttacaagggatcctgtgcacacagggcagctttacttcagctgtgattaggattatctacgatctacactctcatgccatccccccaccttctgccacccccatcttaaaatgggtcccccagaatcagatctggagactacaattcacttgtcagttatatatcaataaagtgctcccaggagaaaacggaaaggggatgaggggaacagaacagaaatggggaaaaagccaagcacagagtacagaaaatcgtttctcctataccccacacagaaacaaagccctgtttcctggccacatcccgtgggctgctttcagagaggcccttcacactcagggctgctctcagggaacagaagggctcgatttgccagccgttgtcgcgggaacccgggccaatccgtggcctctagttaatacttgagcgcattcaagcctcccccaagaaaaaaatgaaaatagccagcaaggagggaaaggcagccagggacgtcccccttccacttcagaagagcagtagaaaccgtcacctccctataggacaacaaatcacccccataaacacccaccagccacctctcgccccttctcacagttctggtggtttagctatttctctcctcaaatgcacggaaaactgtgatttggttctctacaaatgacactttctgtttttgtgtttgtttttcaaaataccttggcataactcatacaatgagattagaatttgttggtgaactatttttcagctcagtaacctatttttttaattgtggtaaaaataaaaccacataacataaagtgtaccatcttaaccatttttaagtgtacagttcagtagtactaaatatattcacattgctgtgagatacatctccagaactttctcatcttgcagaactgaaactctataactataaataactctcttttgccccttcccccagctcttggcaaccacccttctacttcctattatctacgatttgactaatttagatatctcatgtgagtagaattatacaatgtttttccttttgtgtctggcttgtttcacagagcataatgtcttcaaggttcatccacgctgcaccaagtgtcagaattcctctcccttttaaggctgaataatattccattgtatgtaaatgccacattttgtttatccattcatccactgatgaatatgtaggttgcttctacctcttggctcttgcaaataaccctgctatgaacatgagtgtgcaaataccttttcaagaccctgcttttaattcttttggatataggcccagaagtgagattctggatcataaggtagtcctagtttcaatttttttgaggaacaatgatactgtttcccatagcagtggcaccattctacatcctccaacaattcccagggttccaacttctccacatccctttcaacacttactgtctgttattgttgttgtttatagtagccactgtaatggttgggtaatgcctcagttgtggtcttgatttgcatttctctggtagttagtgatgttgagcatcttttcatatgctttttggccatttgtaactcagcaaccatttttaaaagtgttgatttttgaagctctgaaattgagttttcctgttttggggcaggccccaactgccacttttcacagaggaggtcccagtgaaaaagaggcagtttctgtttttgactttaacatatgactaaagtaaggtttctcagcctcatcacaattgacattttggttgaggaatgccccgtgcattgtagggagtttaccagcatccctggcctctagatgccagtagcattccggctcccctggtgacagccaaaaatatctccagacattaccaaatgtctccgggggaacaaaactgcccctggttgagagccactggattagagttttcaaactagcatgtttgagttggccaacgtgacaattttaaatttttgagacaacattaaaaattttgtagatatcacctaaaaattcagatttccagcttctcttgaggaagcagaggatacaggctatcttgggcctgcattgccccatggcaatatttggctgggctgagtagctactgccccacccaagtttgaggtggttccctcaatgtagcccataaaataaaaccattgtgaatgccagatacatctgcctctagtttatccagtgaaataattctgatttgtctgagttttcctactagctggagtgcaacggcacaatctcggctcaccgcaacctccgcctcccgggttcaagcgattctgctgcctcagcctcctgagtagctgggattacaggcatgtgccaccacgcccggctaattttgtatttttagtacagatagggtttctccatattggtcaggctggtctcgaactcccaacctcaggtgatccgcatgcctcagcctcccaaagttctgggattacaggcatgagccaccgcacccggccatttgtatgtaattttctatatttattgaaatgcattttaagtaatatgaaagcatttttctccttacaatggaaaaaccaacttgattttacatttatttatataacctgacttaattctatgtaagtcaagtgaaaaaggaaacaactgctctgtggaatcaacctgaagatgtctaatttttcctctgatgccaccagacttaaagcagttcacgatcctctctacaaagaagtatatttaggttctccctctccctctccctctccctctccccacggtctccctctgatgccgagccgaagctggactgtactgctgccatctcggctcactgcagcctccctgcctgattctcctgcctcagcctgcccagtgcctgcgattgcaggtgcgcgccgccacgcctgactggttttcgtatttttttggtggagacggggtttcgctgtgttggccaggctggtctccagctcctaaccgcgagtgatccgccagccttggcctcccgaggtgccaggatggcagacggagtcgcgttcactcagtgctcaatggtgcccaggctggagtgcagtggcatgatctcggctcgctacaacctccacctcccagctgcctgccttggccccccaaagtgccgagattgcagcctctgcctggccaccaccccgtctgggaagtgaggagcgtctctgcctggccgcccatcgtctgggatgtgaggagcctctctgactggctgcccagtctggaaagtgaggagcgtctctgcccggccgccatcccatctaggaagtgaggagcgtctctgccaggccgcccatcgtctgagatgtggggagcgcctctgccctgccgccccgtctgggatgtgaggagcgtctctgcccggctgacccgtctgagaagtgaggagaccctctgcctggcaaccgccccgtctgagaacccaaagactagaattccatttctaaacccagcccagcagccggaagtcatgaagcagtcaacctgcctggacatccagctacgctctgctgcgccattctatccacccatcaagactcccctcccttctactgataaccctcctaaaagccaactgggattgaattactcctctgccaagaaccctctgctgcaccttatccaaggcccaccataaaatgatgccagcccacctcacccaaaacctcttccagaaagtcccagctccaccctggttctctcctccacagatgtcagacctgtatgtggtctgatggctctctcagcctccttcattctctccccatttctgccacattttccccaataaatcttgtgtgtgtctaattccattttggtgtctgcatctcaga

SEQ ID NO: 464004 - DNA, 4647 bp, Homo sapiens
ggaaattagctctacccacttgcacagttaattgcagggcagctcccactccaattcccctgcaggccggaatcacagtctgcccctcccatgtgcaggcctttgtacaagctctctgggcaccacatgctctcgcagaggctgcctgtggcatgttttttgggtgctcctgaccagatgccctggacagtgccagaggcctttggattttctgagtgtgagtgggtggagccttcctctggtgcccccagcctactgctgctgctcctctcactggccctgcccaatacccacacacgtgcaaatgcacacatgcatcgtcctccccggggctgctgcagccccttgcagtgccaggagcacaccgggccctggactgaacaaaccgccttcccaggccctctttcttggcagctccgtgggccccaaagcctgacaggagtttctgggctgacaattaggctactgaaaaaggacaattcacaacaggcccacacagagaaggcctttcatgccgcacagagcccggcccagcagcctggggttcggtccaagtgtgctgagtgggtggtggagctgacagggcctgcagggttgctctggctggcagagcctctgtggttgagtccgtgggtggcagggtaggggggaggcgaggaagctgtctcatgggttacagaaaaccatcgtccttcccatgtggggctcttgtttctaatactgtaatcttaaatcattaatgaacccaagcttttcttggaatgtgtgaagtcggtgtttctgagtcatgagccatggaagaagaaaaagaaggaacaaatcacaggctcggggtttttatccctattagaagaaaaagtttccttcacagtgatttatgtctgcctctgcagatcatttttaaaagtgtttcagagactttcagaattatttttgtttgaatattagacttctgtctctgcaaaatgtataaccatatgctgtcaaccctggatattggctttggtagagtagacaccctgaattttttaacctagatgttaatcaagcattctgtctcaagacaacacaaaccttaactggagaaatgctgagagaataaggaacaggtttaggctcagggatacacaatatctgtcatcccagttacctccataaacccacgttagtaagaagtgaaactgaggcagatgggcacaggcttcaggggaggaagagaagggaggcaggacaagtggctgaaaccttcaacacagggctgagccctcaggcctgtttatgagtggtggagcgcaggcttggatgcagatggcctgggttcacatcctggctgtgccacttgctcactgctgtgtacctttgagcaagtaagttgacctctctgtgcatcagtttttgaatctgtaaagtaacagtaccgtcttacaggctagttttgaggactgaatgagtggatgtatacagtacactgagaaaagtgcctggcacatgttaggtgctcagtgttgctggagacaagagactgatttcagaacaaacggctggggctgtttttcatccagtagtaatccctctgttttatataggcagagagggttgacaggtctggtgaggtgcccacctaaaatcagaaaaggtcctttccagccacatcacaggattcagggagattatgtgatttattgtttatttaatttatttgtgccacgctgagttccacgcagggtctgagctgtcttccgtctgctttctctccatgttctgtggcttcttggtgaatgagattagggcaggaattggccccagttctggaagctggactggtcctatcagagcaatcccattctttgtgtgtttgcctgtacttgatgcattgctgttgcctttgattccctctgcctggcaggggtgacaggtggggggagggatttgtccacctgccattgtgtatatctgtgtctttttgaaaggcacctgctaacatgactctttttttcttttaagaaagcctctcttgtgctgaaaaactaaggccttatccagtggcaaagtcctctataggccagcccagtagtgacagccgagtcaggttattacaggcatttctgccacatctaaattccacaaagaagacatcagatggtggcctgagggtgcgtgtcattatatacaacaagggatgtggtttaaggacctcatccacccctccctgccccagctgctcccttgtgggacattcttatcctcatggtggccaggatgtgggtacacttcaggggactgaaagtctcttctgtagttgccaggcaccaggaaccccaggcagccagtgtgtaagcccaaccctgctgtcatctctggctccttcatctccctcccgcccacatccactctttctccagagttaccatccaagcacaagatgatcccatgctggttattcagtgctccagactcctgagggagacgccctgaagtcggtagacatcatgttggattgggacagtaacttgctgggtcacctccttcctgtcactttgcctcttctgcaaaatagaactgccacgcaccatcctcaccgtagtgccacaaatgtcaagtttatgtaaatgcaaactgcattcaggtctattctgttttcctttcaaacacagatactttaatggcttaaaccactgtgaccctgtaactctacagggtagcgttagttttttataattatcatcttgtgactgcacatgagagactcacaaagcacttgtggtccaactggactgcctccataacatgaggatcacacacagtcgataacgattagtgccaaggccaagaaaatgagcatccaatgacatctggaccaggaggaaagcacagggcactgggctggaagatgagctgtcccaagtggcccactccacccgagggatgccctccagttgacagtcccaggccttcccccagatagttgattgctcttgctctccatcccaaaatccctgcccaagttcatcataaagtgaatggaccgactcctctgcaggatggagtgattctgtcttagtctctttgttttaagattatggaccaatgctccaggaactttatatcttgtactgttgggtgaaaaataaagaggggaactctagctcaggagccattagccggtaccaagaaggaaaatggagcttgtcctgcagtcaggtgaacaagacagtgattttggtctgagtagaaccacatgcagttgagacaaaaaagctcaaaatgtttaaacagctgtaaatcctatgagcagtgaaaatgtccccaacatcctaggaggtttgtttttgttgttgtttaaactgtaatcactacaataaacatttttctatagaggatgaaaaatctaaatttgaacactgttgtctgtattctatgtaatggctatgagaatggtgagatttttgttttctcttaggaatgggaaattcatctatattccccttaaattttaaaaaatatattaaagaggaaattgtttgtgttctcccaatgaatagtaacctagtagaaattatttttcctattaaaaattattaacatgagatgtggtaaagtgttttctttttttcctcccaccaagatgaacttttccatatttaaaacggcatctcaagacagttggggagtgatttttatactagaaataagggatgactgcatagtcctacctggttcaatttataccctcttcaaaattctgttacttcttctgctaatactttgttctgtggaacgcttgctgtgctcctatagggcctaataggaagcttgatacacacttttagcaaacccatattagttactttctaaatgaatttgagccccttcccttgaatgtagacacttcaatatggatgcaaatgtttcatgatagaaatttgatgattatattacaaattccagtcgtacttgaagggaagcagtttggttggatgttgaacacaggaataaaattccacagcttcccaaggtctaagttagaacgttagttgcccccaaaagagggatttatttttaaagggaaaattcatttttaaaaatcagcaagctaatcaaccacggcagattttgaatcccagtcctgaccgggaagcaggaaaaagaattctcaaatgtactattaagaggtggctgtatatgtggagaatacaaattgattttaacattagaataaacacagcataatttgaaatgccaaccgaaaatacatatattgtctcccccaacctattgtgtatttgttgggtgaaccttgtcattgcgcctttcgaaggcagtggtggcgtgtgtgcctcacccacacattcacgacagatcctcgctggctgccatgttcgtttgtgagaaataaaggaatctgaaggtgattcgtcccatcgtgggcctgataaattaaaaatttgcatatgtctgacagtagttttgcagttctaggaaagcaaataagaaagtggaaagcatttaaattaagtgttgcctctaacaaagcttttagaaatggacaaatataaatgatattgattgatttcaattgattttttaaaaatgttttattctgtggagtttcggaagtgacccaaagctttgggggagcttgtgagc

SEQ ID NO: 464005 - DNA, 1773 bp, Homo sapiens
tgctccctcagtttggggccagctaggcccgctgggacagcaggacccagaacccaggtctgccgttgtcctcaagccctggactccagccccctgaccacagccagtttctggccaggctgctcatgaaaggccatgggcctggctggaacctgctgccttagagccaggcctcttcccgggggaggggcgtttgcccgttgccaggtgcccgggttccggccctggcactagcgacggccatgctgcatgtgctggcctcgctgcctttgctgctcctgctggtgacgtctgcctccacccacgcctggtcgagacccctctggtaccaggtggggctggacttgcagccctgggggtgtcagccaaagagtgtggagggctgtaggggtggcctgagctgtcctggctactggctgggccctggagcaagccgcatctaccccgtggctgcggtcatgatcaccaccacgatgctgatgatctgccgcaagatactgcaggggcggcggcgctcacaggccaccaagggtgagcatccgcaggtgaccactgagccctgcggaccctggaaacggcgggccccaatctcagaccacaccctgctccgtggggtcctgcacatgctggatgccctcctggtccacatcgaaggccacctacgtcatctagccacccagcggcaaatccaaataaaggggacttccacccagagtgggtgaccgaacatgtgcctctctttgcctgacagcctgaggtcctgggccaggtctgctctttccaggcctgtctggaccgtgtgtcccttttcagcttttagagtcagctgacttggtgtccaggacgggcgggcaggttcctgctttagaaaaaggcaacaacgttatgaattcaaaaatggaagtgaattaaaataatgagaaaagaaatgatgatacttttttttgaaaactttttttttaaattgacaaatactacaatactaaatccagaaaaataacataacttgtggcaacttcctgacatatttctaataccttggtcccctacatggtctggcttcttactctgaaggcctctacagaggacaaggattttgtgatttttgggggagatattttccatacagagaaaagatacttcagtcttcctcctaacatggttgaaatttgtgttttaattattggtagtttaggaaagttaaacttcctaatctgttgttgacggtgccatacaaatgttctggattgttgtaaaatttgagaaactgtcatcagccttctttcatataggaactatgaaatttggaagaattttccacagacgaggttctggctccacgcatttcaaaccttgttttccttccatggctcacagttttcccagcactgggtgccgtggggcatgtccttaaggcaataggactttgcacttctgtccttacccagcaggattttcctacgagccacattcctagtttattctagaacaagaccaataaactaactttacacaagggtggagcaaaccacataaatatgtccctcttaacctggtgtagaaagtaaaaaaaaaaaagttcctcttcaaagtttcccttcttgttaaagaataaattataagtgttacaaataatagtttcttttaaagactaacttcctttaagcctcctcactttgtgctaataactctttgttaagccctatcttatgtagctgttagatataaagaaataagtacattctgtgtccttgtactttaaccaaaatattt

SEQ ID NO: 464006 - DNA, 1367 bp, Homo sapiens
cctgccacataagcacacgattaatattaacaacgtggcttatgaaacaggagtctttaattcaagaaggaaaacaggaattcaccagaattgtgaaggacaccccagatcctgaagagaatgctggcaaacagcccccccaacttggggagagggttggagacgctgtgaaggacagacatcgtgaaaagctgcagacattctcccagacctgggatggagaacaggacaccatttttaatccaggcacgtatgaagccagccattccttggtgactcagcagcatggcagtgtaggcatttcagtcttaggccagagattagagcacctgctctggagtggggtaggggcctccatagccagaattgtggaaagcacctcagctgtagggctagaattgtgctttcctccattgcaagcctggggcaggaggagagctgctaagttgcactttctcctgggcagcaacacttgcagccaaggccagcttggcgacctggaactgatccacctgtgtcattgttgggtgccccactctgctctactgatactgtggtatgacagggccgcctctgctccactcccaggcagaaatccagacatttggagcacctgtttgcctggaccagcagactgagccaccccacccctcctggacacagatcatggtgaagtgaggctctctctgctccacacccaggcaaatctacaggcattcagagcatctgcttgtctggttcagcagcctgagccaccccagtcttcctggacatagactgtggttcaagggtatcctgtctgttccatgcccaggcagatttccaagcatctggaatggcaactcttctagattagaagtttaagccatctcccattcctgtgtagagaacatggagcccagatggtttcccagctgcatgcctaggcacaatcctgcattctcggtggctgccctctggattctcccttggcgctagtgtctgtgcctgccactgggggatctgtaggccaacctgctctgtttggccctgctctttgtggcccctgccccccagggctgagcagggagctcagaccactatatactccacaaaccagcttattgcctgaggcaatagagagcttctgccagtaaacaaggatcaagtatatacgcagctatgttggctgcagctggctttcacctataagcaccatctgtgggcttgtaggttgaactccacagcctgatataaaacctgccaaaagaagtgtatagggctatagaagcaaagcccaaaagccctacctagcattctctacagtcacactcattaagaagggagaaaaaggaaaaaggaaagaagaaataacattatagggaagg

SEQ ID NO: 464007 - DNA, 2406 bp, Homo sapiens
acccacagtgcctggcaacctagaccagtcagggacgcggcaggaaatggaagagcctccgcaagaggctctggctgaacccttgaaacatgaaagcccagccgctccctcaagtgctggccacactaagggccaggaagaagacgaccagaagaaccaggccgaaaggaaggcagataaccacactgctcacagaatagctgaccagactgccctaagagtgcctagccaggctgaatccagcatatttagccaagctaccaacggagtagctgaacaaaatgggcatagtacacctggtcaggctggccgcagagcatccaaccctgctgatgtttctgaccttagagcagatgatcaggttaatcaaacaccgtctgaacagactaaaggcaaggcatctagccaagctaataatgtacagcatgaacagagtgatggtcaggtgtctggcctgacggaggaaagaactgctgaacagactgaacgaagattacctacccaggctgagagaagaacttctgggcagattgatggtagactggctatgccatctgaccagagaggttccagacagaccgaccacagaatggcaggccagtctgagagaagagcttccgagcagatggaccgcagaatgtctggcgaggctgagcgaagaacttctgagcagattacacacagattatccaaactatctgagagaagaccttctgtgcagattgacagtgggtcatccgtcccatctgaccaaagtccttctgtacagattgacagtggatcgtccgtaccatctgaccaaagaccttccgtacagattgaccgcagaatgtcagggaaagttaggagaagaagttctgagaagactgactacagattggctggcctggctgacccaggaacttctgagcagactgacctcagattgtatggcctcgttgaccacaaaacatctgtaaagactcaccaccaagtgtacggccaagccactgaactagctgaacaccaggctattgaccaagctcatagtaatgctgatcaacctccagttgacaatgctcactacactgaatctgaccagactgaccacttagcagacagacaagctaatcataaagaccagctgtcttactatgaaacacgtggccagtctgaagacagaatatttccccagttaggcaacagcaaagaggacaaagaggctgactacagagtacaaccctgcaaatttgaggatagccaagtagacctcaattccaagccttcagttgaaatggaaactcagaatgcaaccactatcccaccctacaacccagttgatgccagattcaccagtaacttccaagcaaaagaccaagctcttttcccaagactcccctccatctcatccaaattgaactataccagcagtcaagaaaaaactcaagccatagtaaccaaatctgtttactaaggactttttggtggggggatttaaatttcaggatgaattttcagaaattgaccaaggaaagggttatcatatacgcaatcaaacttatagaaggttcccttctatagtttatgaagatccttaccaagtttcactccaatacatggaaaaacaccacattctgcaaatattccaggaatgtcagcgagtcatagatttggtcccttcacaatcccacatgtttttggaggttttattcattttttaaatttaaaaaaaattttcgtctgactgaatttattctaaaaactggtcttccagctctgatattctttcctcaccttggtcaattctgctgttaatgattctaactgtattagtcattcttgaagtgaattcttcaattccataagttcagtttggttctttcttaaaatggttatttcatctttcagttcctaaaatggatcattttattggattccttgggttgggtttcaactttctgctggatctcaatgatctttcttgccatccagattctgaattctgtctgtcatttcaatctggtttaaaaccattgctgggggactagtctgttaatttggaggtgcaggaaatgatgaaaaagagagacaaaatgtgaaatctacaaagaacgagcctctcttcagtattgtttacaatcatgtgtcaatactatgttctgttttccatctgaaaaaaaaatggttttgaatagacattagtggtgactctacctgaatgcattattaatttttaagtaaaaaatctatagaatatctatgtaaaatttacataacaattacagatatctctggataatcatacaaaaatatacacattatacttatgcatgcattgatatttcaatactcattcccctaaatctctgaataagtccacaaatcacaactagcaatttatatgtacttcttataaagcatataaat

SEQ ID NO: 464008 - DNA, 964 bp, Homo sapiens
taaaggaagagctctcaaggatggaaaaaaggggggtcaaagaggaaaactggggttcagaggtcccccttctgctcagtgacacagaagggaaagttcagaaagctgaagagatcagaaaaatgatattcccttgttcttctcaacaaaataacagagaagattatttgctgagggtggagggattgagagctttaaagaaactgataaagtttgaaagagtcattgaaggcaatgaaagaagagctgatcaaagtcaagttcaagaattgactgacaaggcaacacggagagccaggctgaggtttggagccatgagtctgctgttgcatgaatctgcaggctgtgttcccaaaacaccaaaggttcagtctaggtcctgctgctcacctcacagaaagccaatcactgagacaagagtatttccagagaagaaggctttaattaggtactgcagctgggaagatgggacgtcagtctcaaatccatctccctgaccaactaaaaccaggaacttatatagcagggaagaaatgtaacatgcaggaaaacaggaattagggaggggtagggaagaggagttggtcaacagaaagcaagtggtcagataggcaatcatgatgggtgaggggtctggaatgttgtccagatggagtgatctgtggttttggtttggctgcctctgacactttattccatgttgcctaatagttttaaaagcccctattttatagtcagtgcatctttctgtgggtccccagagaagggaagactgtgagagaaaagtgaacacagagccgtgcagaggaaagatgatacaaggagacacagggaaaagacagccatcaacaagccaaggagtgagtctctcacagccctcaggaggagctagctctgccaacaccttgatcttggacttctagcctctagaactgtaagaaaataaatgtctgttgtttaaatc

SEQ ID NO: 464009 - DNA, 2850 bp, Homo sapiens
gaagacttgtgttctcaacccacagctgctactgctacatttaaagacactgtagtgaacatttgccactgtgtgtgctgagtttttcaaaggtcagagcagattgaacctttgtggtttcattttccctgattttgatttttcttatggggaacctgtcttgctgcattcaaggtgactcgaagaagccttcccaaaggcgtgtgaaaaggcagccctactctactaccaaggtgacgtcagggagcacattcaatgagaatacaagaagatatgctgtgcacaccaaccagtgtaggagacctcatggctcccgggtaaagaagaagaggtacccacaagaagctccccatgaggacaccgtacacgacatcactaacgaggacgccacacacgacatcgctaacgaggatactgtacacgacatcgctaacgaggccgccgacaagggcatcgccaacgaggacgccgcccacggcatcgccagcgaggacgccgcccacggaatcgccagcgaggacgccgcccacggcatcgccagcgaggacgccgcccagggcatcgccagcgaggacgccgcccagggcatcgccagggaggacgccgcccagggcatcgccaaggaggacgccgcccagggcatcgccaaggagggcgccgcccagggcatcgccaaggaggacgccgcccacggcatcgccaacgaggactccgcccacggaatcgccagcgaggacgccgcccacggcatcgccagcgaggacgccgtccagggcatcgccaaggaggacgccgcccagggcatcgccaacgaggacgccgcccagggcatcgccaaggaggacgccgcccagggcatcgccaaggaggacgccgcccagggcatcgccaacgagggcgccgcccagggcatcgccaaagaggacgccgcccagggcatcgccaacgaggacgccgcccagggcatcgccaacgaggacgccgcccacggaatcgccagcgaggacgccgcccacggcatcgccagcgaggacgccgtccagggcatcgccaaggaggatgccgcccagggcatcgccaacgaggacgccgcccagggcatcgccaacgaggacgccgcccagggcatcgccaaagaggacgccgcccacggcatcgccaacgagctgtatacgacatcgctaacgaggacaccctacaagccgtcgctaacaagtacactgtacacaacatcgctaatgagggcactgtacaagacatcaccaatgagggcgctttatacgacattgctaatggcaccgacaaggcacgctaacgtggacgctgtacacgacattgctaatgaggacagcgtataagacatcgctagtaactatcgcaagaacaaaaaaccaaacaccgcatattctcactcatagatgggaattgaacaatgagatcacatggacacaggaaggggaatatcacactctggggactgttgtggggtggggggggagggatagcatcgggagatatacctaatgctagatgatgagttagtgggtgcagcgcaccagcgtggcacatgtatacatatgtaactaacctgcacaatgtgcacatgtaccctaaaacttaaagtatatatatataaaaaaagacatcgctagtgagcacgctgtatacgacatcgctaatgaggacaccatacaaggcatcgctaacgatgacgctgtacacaacatcactaatgatgacaccgtataagacatcgctaattatgacgctgtatacgacatcgctaatgacaccgtacaaggcacgctaacgaggatgctgtacacgacatcactaatgaggacagtgtacaagccatcactaatgaggacactgtatatggcatcgctaacgaggacactgtacaaggcattgctaacgaggacgctgtacacaacatcgctaatgaggacaccatataagacatcaccaatgaggatgctgtatatgacatcgctaatggcatccacaaggcatgctaacgaggacgctgtagacgacattgcttataaggacaccgtacaagacatcgctaacgaggacgctgtatacgacatcgctaatgaggacgttgtatatgacatcgctaatgaggatgctttacaagacatagctaatgaggttgctgtatatgacatcgctaatgaggacattgtatatgacatcgctaatgaggacgctctatacgacatcattaatgaggacgctgtatacaacatcgctaatgaggacgctgtatatggcatcgctaatgaggatgctgtatacgaattcgctaataaggacgctgtatatgacattgctaatgaggacactgtacaagacatctgtaaaaaagaagatgctgccaatgtaagacacttttctttgtcttgaagagaaatgttactttcctggcttctttccaatcagatgtagacatgaacatctgccagtgtgcattatcgatgtcatctgcagtttaatcaaatgtagacatgaacatctgccaatgtggactatttatgacatctgcaattcccttggtgtggtgctattgattggcagcctctcaccaacccatgccaggcacactggggtgtggtagatggcagcatccacgatccactgcaatgcagaggtgtttccctccacagcagttttcccccatggattaagagttgtgaaactgccaatctagatacactttaaagataaattctgtgggaaaaggtcttgtcttttccacaggtgtcttccgtgccagttttgggggacttcgacctttgactcaatcactataccccttcatattttctctctcaagttgtc

SEQ ID NO: 464010 - DNA, 435 bp, Homo sapiens
  misc_feature (2)..(3): n is a, c, g, or t
  misc_feature (5)..(5): n is a, c, g, or t
  misc_feature (7)..(7): n is a, c, g, or t
  misc_feature (9)..(9): n is a, c, g, or t
  misc_feature (11)..(11): n is a, c, g, or t
cnntntnantnactgacgccgctgggttggagtctccacgaccgagctggtctcggcaagtggtgcccaacacgggggctcgaacctgggtcgaatagtcgccagagcgatggttagaaaatgtggaactacactggaggacacccgagtactgttaaagcaatcctcatggtgagtaagaaggggagctcagaagcatcagggtaacaatgggacaagggtcgagcaggcatgaggcttatttgagtctgcttcgccatctcagaaaaggaggagtgaacgttagcactagctgacttacgcagctttttagtgcagtagagaaatattgccgctggtttccggaccgaggaactgtgaatgtagaggtctgggaaaaggtagcagcacactgaaaaaggcatataaggatggtgttggggatattcctataac

SEQ ID NO: 464011 - DNA, 1472 bp, Homo sapiens
  misc_feature (2)..(3): n is a, c, g, or t
  misc_feature (5)..(5): n is a, c, g, or t
  misc_feature (7)..(7): n is a, c, g, or t
  misc_feature (9)..(9): n is a, c, g, or t
  misc_feature (11)..(11): n is a, c, g, or t
cnntntnantnactgacgccgctgggttggagtctccacgaccgagctggtctcggcaagtggtgcccaacacgggggctcgaacctgggtcgaatagtcgccagagcgatggttagaaaatgtggaactacactggaggacacccgagtactgttaaagcaatcctcatggccaaaaccagcggccaatttggatatcatcaagacacctgaaacttcatcatgagccagatgctgaggaagagattttgggaggaacccaaggacctcccacttgcagccatgttgagactgacaataagtccacctttcctgcttgtagtgggtcatttaaaacttgatctccctaatcatcatgggacttgtcaagaatgtagattgttttcttgtgtgaattcttccttgtataatactgatcattctattttagcggtaagaacccaagaaggagtatggatacctgtaaagctttctggtccttgggaagcctctccttctgtgcatattattactgaaattcttcaaaagattctgagatgctctcagtgtttcattgctactttaattttaatcattatgggattgattgctgtcacagctactgccgcggcagctggagttgctttgcatttcacagtacaaacagcagactatgtaaataattggcagaaaaattctactttgctgtggaattcccaaactaatatggaccagaaactagctaatcaaatcaattatctccaacaaactgtaatgtggctaggagattgagtagttagtctagaatatagaatgcagttacaatgtgattggaatacttctgatttttgcattactcctcatctgtataatgaaagacagcatgagtgggaaagagttaagaaacatttgaaaggtcatactggaaatttactttagatattatgcaactgaaggaacaaatatttcaatcttctctggcacatctgacactaatgccaggaactgaagtgcttgaaggcgcttcagatggattagcagctattaacccattaaaatggatcaagacacttggaggctctgcaatttgaatgatgactgtgcttttaattggtgttgtttgtctttgtatatcaaattgaaatacaaatgaaattggtcatttgtacatctgcaaatgtggatcacgaatcctgcgagaagtagcctactgtgacaaagctgcctatgcctttatcactttgcaaaaacagaaaggttaattcccaaatattaggggattttccagataactttttgctagaatttggttttgttatttaatgtcatctgtgtggtctaagaatatgctctgcataaattcaagtttttaaaacttactgacatttattttttggcccagcatatagtttaattttgggggatgttatgtgtgcatttgaaaaaaatgtgttttctctcttgttgagtgttctgtaaatgacaataaggtc

SEQ ID NO: 464012 - DNA, 1530 bp, Homo sapiens
ggaccgaagatttctaactcagcttaaattacatggaattagtatcatagcatagccaagaaacacagctaccaggagccagagtcttcttctccacacaagatgaaagagtccagcccattgagcagtagaaaaatttgtgataaaagtcactttcaggccattcacagcgaatcttcagacacttttagtgaccaatcgccaactctggtcggtggggcacttttggaccagaacaagcctcagacagaaatgcagtttgtgaatgaagaagacctggagaccttaggagcagcagcgccactcttgcccatgatcgaggagctcaaacccccctctgccagtgtagtccagacagcaaacaagacggattctccttccaggaaaagaggccacacgatggtggatgacggccctggtttgtggaccttggtggtctacggtcacgttgtactgcccaccattttccaatgggaaaagcgcaggctgtggcctccagcgaggggcctcggtacctacaagtgtgacctcaatccactctttctccagcaacatcatggaataagtccatcaaaaccacctcaccctcaacgcggagatccttccggactcgcaaaacatgcaagcgacaacggagcccggtcagccaaccagtccccgcagtcggtgggcagctcgggcgtggacagtggcgtggagagcacctcggacgggctgagggacctcccttccatcgccatctccctctgcgggggcctcagcgaccaccgggagatcacgaaagaaaacacttgtgagtgagcaaatgaaaggtaggcctaattttgaactgaattttctttttgtttttccctgatcctctgcaattgctgtcacagatgcattcctggagcaagctgtgtcatatcaacagtttgtggacaaccccgctattatcgatgaccccaatctcgtggtaaagattgggagtaaatattataactggacaacagcagcacccctcctcctggcaatgcaggccttccagaaacctttgccaaaggccactgtggaatctatcatgagggataaaatgcccaaaaagggaggaagatggtggttttcatggaggggaagaaacaccacaatcaaggaggtaagcccagaagacaaagcagtgctcacacttagcaagtgttggttttgtgtagtgagattggttttcatgtacttacatcagagaaatgaagataggccctagtgctgagtttccatgagccagctctgccatgaagtagggcgagtgctcgtggaacgtggggaaggtggggaggaaggtcaggagccagcagcataggtgtcacctcctggctctgtaactgttgggagactgtggtccagtcactccctcatggtaagatttcgtcatctataaaagaagggattcagcctgggaattcagtttcttaagaaattaaatatcttccttctgcttgtggagacaatttttctttttctttttctcccctcccctcccctcctttctttttt

SEQ ID NO: 464013 - DNA, 5804 bp, Homo sapiens
ccatgcgcagggcatggatgaaagcaagctggagagggagagaggatgggaggcgaggaggcagcctgagggaaggaacaggagggaagagagatgaagggcaagaccggggccagccatgcctgtcctaacagcagccacccagcagtggcccagcctgctgagaactagaaaatcagaagaaaaaggagaatccaccaggagacccaggttcgcatgagcaggggcctttatctgaagttaatggaagctgagccaggtcctgacaatgtgccttctgatggggagatgagactttcctctgaaagctaaggtaactctgaagcgtgagctgccagaattcaaggccacctgcttaacagaagacaactagaaacctcatccatgagcagagtgcagaccatgaattacgtggggcagttagccggccaggtgtttgtcaccgtgaaggagctctacaaggggctgaatcccgccacactctcagggtgcattgacatcattgtcatccgccagcccaatggaaacctccaatgctcccctttccacgtccgctttgggaagatgggggtcctgcgctcccgagagaaagtggttgacatagaaatcaatggggaatctgtggatttgcatatgaaattgggagataatggagaagcattttttgttcaagaaacagataatgatcaggaagttatccctatgcacctggccacctcccccatcctgtcagaaggagcttcgagaatggaatgccagctgaaaaggggctctgtggacaggatgagaggcctggaccccagcacgccagcccaagtgatcgctcccagcgagacgccgtcaagcagctctgtagtaaagaagagaagaaaaaggaggagaaagtcacagctggacagcctgaagagagatgacaacatgaacacatctgaggatgaggacatgttccccatcgagatgagctcggatgaggccatggagctgctggagagcagcagaactcttcctaatgatatacctccattccaagatgatattcctgaggaaaacctctccctggctgtgatttaccctcagtcagcctcataccctaattcggatagagagtggtcacccactcccagtccttccggttcccgaccttcaacacctaaaagtgattcagaattggtcagcaagtccacggaaaggacagggcagaagaacccagaaatgctttggctgtggggagagctgccgcaggctgctaagtcttcttctccacacaagatgaaagagtccagcccattgagcagtagaaaaatttgtgataaaagtcactttcaggccattcacagcgaatcttcagacacttttagtgaccaatcgccaactctggtcggtggggcacttttggaccagaacaagcctcagacagaaatgcagtttgtgaatgaagaagacctggagaccttaggagcagcagcgccactcttgcccatgatcgaggagctcaaacccccctctgccagtgtagtccagacagcaaacaagacggattctccttccaggaaaagagataaacgaagccgacatcttggtgctgacggcgtctacttggatgacctcacagacatggatcctgaagtggcggccctgtattttcccaaaaatgctgagatgcagccgtctgcggctctgagggtggccgcgtgccagagcatcactggatggtgatgtaggaccctgaactgggacagtcctcagccggtctctgccgcttttcctccttccagcggagatccttccggactcgcaaaacatgcaagcgacaacggagcccggtcagccaaccagtccccgcagtcggtgggcagctcgggcgtggacagtggcgtggagagcacctcggacgggctgagggacctcccttccatcgccatctccctctgcgggggcctcagcgaccaccgggagatcacgaaagatgcattcctggagcaagctgtgtcatatcaacagtttgtggacaaccccgctattatcgatgaccccaatctcgtggtaaagattgggagtaaatattataactggacaacagcagcacccctcctcctggcaatgcaggccttccagaaacctttgccaaaggccactgtggaatctatcatgagggataaaatgcccaaaaagggaggaagatggtggttttcatggaggggaagaaacaccacaatcaaggaggaaagtaagccagagcagtgcttggctggcaaggcccatagcaccggagagcaaccgccgcagctcagcttggccaccagggtaaagcatgaatcatcctccagtgatgaggagcgcgcagctgccaagccatcaaacgcaggccacctccctcttctgcctaatgtcagctacaagaagactctccggctgacttccgagcagcttaaaagcttgaagttgaagaatggccccaacgacgtggttttcagtgtcaccacgcagtaccaaggcacgtgccgctgtgagggcaccatctatctgtggaactgggatgataaagtcatcatttctgatattgatgggacaattaccagatcagatactcttggccacattttgcccacccttgggaaggattggacccatcagggcatcgctaagctgtaccataaagtgagccagaatggatataaatttctctactgttctgcccgtgccatcgggatggcggacatgacgcggggctacctgcactgggtcaacgagaggggcacggtgctgccccaggggcccctgctgctgagtcccagcagcctcttctctgccctgcacagagaagtgattgaaaagaagccagaaaagtttaaagtccagtgtttgacagacatcaaaaacctgtttttccccaacacagaacccttttatgctgcttttggaaaccgaccagctgatgtgtattcatacaagcaagtaggagtgtctttgaatagaatatttaccgtcaaccctaaaggagagctggtacaggaacatgcaaagaccaacatctcttcgtatgtgagactctgtgaagtagtcgaccacgttttcccgttgctgaaaagaagccattcttcagactttccctgttcggataccttcagtaacttcaccttttggagagagccactgccaccttttgaaaaccaggacattcattctgcctcagcgtaaaatgtcccaagcagcctcttgccagcagtgcagagcctggttgtcacccattaaaggataggtctccccggagtgcacagctccacctgggagcctggcgcgtcatcattggcctgacagcagagagaattgagaagcatttctcccctgccccaccccggggctgacatttctaagcaagataggaagggagcactttctaggctaggagttgggtgcatttgtaccgtgaaaagcattcctcagttgtggcttaatgccagttacgacgctgcctttccggcctgctccagcaagtagctactggttcacgtgcagtttggggctgtgaaacctaggcagaaggcggctgtctgagggctgtccccgcctaggacagggtcaatcgaggaatgccagatgtgcacggtttttggcaaagtagggggcacatttccattatagcaatgttagtgccaccaccttctgaacacagtggggagggctgtgaaggctcatgtgacctggatctgaggtctctgatagaaatctggacgccaccgggtccaggcctggcctcagacttggccttgtggatgggccccttacagtatttgctgactagtctcatttttaggtgataagtttttctttaattcctttggttaaagatagtctatttcattggcatatctccccccagtttttgtggctcaaggctggaatatttatgccttaatatatctatggcagacatttaagaatgcgctttatctagctcatggtaactttgcaacgccttagattaaaatgacagtaaatattactaaggcagtattttgaatgagtttgacactgccggcttccttccatccagcgaggtggtgctgacagtgtggacttgagcacacttatgccaaatgataatgatactgacttctgttgggagctctccaaagaaactggttggttttaagaaaatagtttcaagaagttcaactatattcttttagatattatgtattgttttactctgattaggttactgtgataggcatttattcatattctttctataccactgtcattaatatattaaaaagatgtatgtgttagactatcgaaagggccttattctctctttctcatagactgaccttcttttggaatttctgagtcatttattttccttagctttttccactcaaattaagggcaagcgaaaaagtaataatttggcattctttaagcctacagaatgtgattctttcacttgtttattacactggctcgtggacagaacaatttgaaaagtgaaagaattattttggtaaaagattttgctttacttttcgaagcattatttttttaaagagtgttttactccaacgattgaaacattttcctatttaaatttcattgttagaatcacaggaggcaaaaaatggaacggttgaatgaaattttactctttctgtgaaagaaaatccacagagttgttgcctccgttgtagttggtgggccccgttagcattggatgcctttgccaaatggttcatgtggacacacaaaggcaaacagatctgccatcgatcgcagatttctgtagaaacacggatgtgcatgtgcagattcccttttgcaggtattaaaaataattaaaaatagtcctgcctgaggttgcagtgagccgagcttgcactactgcactccagcctgggtgacagagtaagactccatgtcaaaaaaaaaaaaaaaaaaaaaaagtcctgccttaactaactcctctgcgcttgttcactagtaacctaaagaggctatattcattctttatgcaatgagggtatttttgagtgaattttaactgctctgaactaagtataagctcatgggcctgcaaaggttcagacggtttctcctttgcacccaggaggaactttggctgcgagaatggggggatgtatccctcatgcagttggcatccaggcagccctctgcagcagcacaccctgcaggcggagttttcagaggatgcaattttggatcccgaattttgatgtaccttaaacttccacatcactgcaccctgaaacagagcatgctttccagaaagtcacactctcagatctgtgtcaagttcaatgtgagccctggcaaggctggcatattaacacctgccttctggcttctgaaagtgagatttgtatatgggctgcactcacgcatatacgagttggtttatctttgtgtacatgactataacccagtgatgctgaggtcatgtgctggaatgctgtatttggaccacacatttcaaagttgccctatggaaatgaatcctacttagtgacaagtcatcaaatgtttgtcacatgtgatgaagacaaatatgtatacctggcatagagaaaaatatatacctggtacattggagaaaaataattacactttcaaagagaattccctttgcaattttatgtttggatcaccactgtaagcacactttatttgcatttgatctgtatttgtatatgctgatgcaatgataaaaatcactgtaatacttcattgtgttgtactggatgcaaagctagaaaatattgcaataaatgagaccgatgaaagac

SEQ ID NO: 464014 - DNA, 5855 bp, Homo sapiens
ccatgcgcagggcatggatgaaagcaagctggagagggagagaggatgggaggcgaggaggcagcctgagggaaggaacaggagggaagagagatgaagggcaagaccggggccagccatgcctgtcctaacagcagccacccagcagtggcccagcctgctgagaactagaaaatcagaagaaaaaggagaatccaccaggagacccaggttcgcatgagcaggggcctttatctgaagttaatggaagctgagccaggtcctgacaatgtgccttctgatggggagatgagactttcctctgaaagctaaggtaactctgaagcgtgagctgccagaattcaaggccacctgcttaacagaagacaactagaaacctcatccatgagcagagtgcagaccatgaattacgtggggcagttagccggccaggtgtttgtcaccgtgaaggagctctacaaggggctgaatcccgccacactctcagggtgcattgacatcattgtcatccgccagcccaatggaaacctccaatgctcccctttccacgtccgctttgggaagatgggggtcctgcgctcccgagagaaagtggttgacatagaaatcaatggggaatctgtggatttgcatatgaaattgggagataatggagaagcattttttgttcaagaaacagataatgatcaggaagttatccctatgcacctggccacctcccccatcctgtcagaaggagcttcgagaatggaatgccagctgaaaaggggctctgtggacaggatgagaggcctggaccccagcacgccagcccaagtgatcgctcccagcgagacgccgtcaagcagctctgtagtaaagaagagaagaaaaaggaggagaaagtcacagctggacagcctgaagagagatgacaacatgaacacatctgaggatgaggacatgttccccatcgagatgagctcggatgaggccatggagctgctggagagcagcagaactcttcctaatgatatacctccattccaagatgatattcctgaggaaaacctctccctggctgtgatttaccctcagtcagcctcataccctaattcggatagagagtggtcacccactcccagtccttccggttcccgaccttcaacacctaaaagtgattcagaattggtcagcaagtccacggaaaggacagggcagaagaacccagaaatgctttggctgtggggagagctgccgcaggctgctaagtcttcttctccacacaagatgaaagagtccagcccattgagcagtagaaaaatttgtgataaaagtcactttcaggccattcacagcgaatcttcagacacttttagtgaccaatcgccaactctggtcggtggggcacttttggaccagaacaagcctcagacagaaatgcagtttgtgaatgaagaagacctggagaccttaggagcagcagcgccactcttgcccatgatcgaggagctcaaacccccctctgccagtgtagtccagacagcaaacaagacggattctccttccaggaaaagagataaacgaagccgacatcttggtgctgacggcgtctacttggatgacctcacagacatggatcctgaagtggcggccctgtattttcccaaaaactaaggcgtttaatgtctctttccttgtcgtggtgctttaataaacatctgtgctgagatgcagccgtctgcggctctgagggtggccgcgtgccagagcatcactggatggtgatgtaggaccctgaactgggacagtcctcagccggtctctgccgcttttcctccttccagcggagatccttccggactcgcaaaacatgcaagcgacaacggagcccggtcagccaaccagtccccgcagtcggtgggcagctcgggcgtggacagtggcgtggagagcacctcggacgggctgagggacctcccttccatcgccatctccctctgcgggggcctcagcgaccaccgggagatcacgaaagatgcattcctggagcaagctgtgtcatatcaacagtttgtggacaaccccgctattatcgatgaccccaatctcgtggtaaagattgggagtaaatattataactggacaacagcagcacccctcctcctggcaatgcaggccttccagaaacctttgccaaaggccactgtggaatctatcatgagggataaaatgcccaaaaagggaggaagatggtggttttcatggaggggaagaaacaccacaatcaaggaggaaagtaagccagagcagtgcttggctggcaaggcccatagcaccggagagcaaccgccgcagctcagcttggccaccagggtaaagcatgaatcatcctccagtgatgaggagcgcgcagctgccaagccatcaaacgcaggccacctccctcttctgcctaatgtcagctacaagaagactctccggctgacttccgagcagcttaaaagcttgaagttgaagaatggccccaacgacgtggttttcagtgtcaccacgcagtaccaaggcacgtgccgctgtgagggcaccatctatctgtggaactgggatgataaagtcatcatttctgatattgatgggacaattaccagatcagatactcttggccacattttgcccacccttgggaaggattggacccatcagggcatcgctaagctgtaccataaagtgagccagaatggatataaatttctctactgttctgcccgtgccatcgggatggcggacatgacgcggggctacctgcactgggtcaacgagaggggcacggtgctgccccaggggcccctgctgctgagtcccagcagcctcttctctgccctgcacagagaagtgattgaaaagaagccagaaaagtttaaagtccagtgtttgacagacatcaaaaacctgtttttccccaacacagaacccttttatgctgcttttggaaaccgaccagctgatgtgtattcatacaagcaagtaggagtgtctttgaatagaatatttaccgtcaaccctaaaggagagctggtacaggaacatgcaaagaccaacatctcttcgtatgtgagactctgtgaagtagtcgaccacgttttcccgttgctgaaaagaagccattcttcagactttccctgttcggataccttcagtaacttcaccttttggagagagccactgccaccttttgaaaaccaggacattcattctgcctcagcgtaaaatgtcccaagcagcctcttgccagcagtgcagagcctggttgtcacccattaaaggataggtctccccggagtgcacagctccacctgggagcctggcgcgtcatcattggcctgacagcagagagaattgagaagcatttctcccctgccccaccccggggctgacatttctaagcaagataggaagggagcactttctaggctaggagttgggtgcatttgtaccgtgaaaagcattcctcagttgtggcttaatgccagttacgacgctgcctttccggcctgctccagcaagtagctactggttcacgtgcagtttggggctgtgaaacctaggcagaaggcggctgtctgagggctgtccccgcctaggacagggtcaatcgaggaatgccagatgtgcacggtttttggcaaagtagggggcacatttccattatagcaatgttagtgccaccaccttctgaacacagtggggagggctgtgaaggctcatgtgacctggatctgaggtctctgatagaaatctggacgccaccgggtccaggcctggcctcagacttggccttgtggatgggccccttacagtatttgctgactagtctcatttttaggtgataagtttttctttaattcctttggttaaagatagtctatttcattggcatatctccccccagtttttgtggctcaaggctggaatatttatgccttaatatatctatggcagacatttaagaatgcgctttatctagctcatggtaactttgcaacgccttagattaaaatgacagtaaatattactaaggcagtattttgaatgagtttgacactgccggcttccttccatccagcgaggtggtgctgacagtgtggacttgagcacacttatgccaaatgataatgatactgacttctgttgggagctctccaaagaaactggttggttttaagaaaatagtttcaagaagttcaactatattcttttagatattatgtattgttttactctgattaggttactgtgataggcatttattcatattctttctataccactgtcattaatatattaaaaagatgtatgtgttagactatcgaaagggccttattctctctttctcatagactgaccttcttttggaatttctgagtcatttattttccttagctttttccactcaaattaagggcaagcgaaaaagtaataatttggcattctttaagcctacagaatgtgattctttcacttgtttattacactggctcgtggacagaacaatttgaaaagtgaaagaattattttggtaaaagattttgctttacttttcgaagcattatttttttaaagagtgttttactccaacgattgaaacattttcctatttaaatttcattgttagaatcacaggaggcaaaaaatggaacggttgaatgaaattttactctttctgtgaaagaaaatccacagagttgttgcctccgttgtagttggtgggccccgttagcattggatgcctttgccaaatggttcatgtggacacacaaaggcaaacagatctgccatcgatcgcagatttctgtagaaacacggatgtgcatgtgcagattcccttttgcaggtattaaaaataattaaaaatagtcctgcctgaggttgcagtgagccgagcttgcactactgcactccagcctgggtgacagagtaagactccatgtcaaaaaaaaaaaaaaaaaaaaaaagtcctgccttaactaactcctctgcgcttgttcactagtaacctaaagaggctatattcattctttatgcaatgagggtatttttgagtgaattttaactgctctgaactaagtataagctcatgggcctgcaaaggttcagacggtttctcctttgcacccaggaggaactttggctgcgagaatggggggatgtatccctcatgcagttggcatccaggcagccctctgcagcagcacaccctgcaggcggagttttcagaggatgcaattttggatcccgaattttgatgtaccttaaacttccacatcactgcaccctgaaacagagcatgctttccagaaagtcacactctcagatctgtgtcaagttcaatgtgagccctggcaaggctggcatattaacacctgccttctggcttctgaaagtgagatttgtatatgggctgcactcacgcatatacgagttggtttatctttgtgtacatgactataacccagtgatgctgaggtcatgtgctggaatgctgtatttggaccacacatttcaaagttgccctatggaaatgaatcctacttagtgacaagtcatcaaatgtttgtcacatgtgatgaagacaaatatgtatacctggcatagagaaaaatatatacctggtacattggagaaaaataattacactttcaaagagaattccctttgcaattttatgtttggatcaccactgtaagcacactttatttgcatttgatctgtatttgtatatgctgatgcaatgataaaaatcactgtaatacttcattgtgttgtactggatgcaaagctagaaaatattgcaataaatgagaccgatgaaagac

SEQ ID NO: 464015 - DNA, 5414 bp, Homo sapiens
tgtcatatatatggtcttgcgctccgtggctggagtgcagtggcacgatctcagctcactgcagcctccacctcctgggttcaagtgatcttcccacctcagcctcccaagtagctgggactacaggtgcagaccatgaattacgtggggcagttagccggccaggtgtttgtcaccgtgaaggagctctacaaggggctgaatcccgccacactctcagggtgcattgacatcattgtcatccgccagcccaatggaaacctccaatgctcccctttccacgtccgctttgggaagatgggggtcctgcgctcccgagagaaagtggttgacatagaaatcaatggggaatctgtggatttgcatatgaaattgggagataatggagaagcattttttgttcaagaaacagataatgatcaggaagttatccctatgcacctggccacctcccccatcctgtcagaaggagcttcgagaatggaatgccagctgaaaaggggctctgtggacaggatgagaggcctggaccccagcacgccagcccaagtgatcgctcccagcgagacgccgtcaagcagctctgtagtaaagaagagaagaaaaaggaggagaaagtcacagctggacagcctgaagagagatgacaacatgaacacatctgaggatgaggacatgttccccatcgagatgagctcggatgaggccatggagctgctggagagcagcagaactcttcctaatgatatacctccattccaagatgatattcctgaggaaaacctctccctggctgtgatttaccctcagtcagcctcataccctaattcggatagagagtggtcacccactcccagtccttccggttcccgaccttcaacacctaaaagtgattcagaattggtcagcaagtccacggaaaggacagggcagaagaacccagaaatgctttggctgtggggagagctgccgcaggctgctaagtcttcttctccacacaagatgaaagagtccagcccattgagcagtagaaaaatttgtgataaaagtcactttcaggccattcacagcgaatcttcagacacttttagtgaccaatcgccaactctggtcggtggggcacttttggaccagaacaagcctcagacagaaatgcagtttgtgaatgaagaagacctggagaccttaggagcagcagcgccactcttgcccatgatcgaggagctcaaacccccctctgccagtgtagtccagacagcaaacaagacggattctccttccaggaaaagagataaacgaagccgacatcttggtgctgacggcgtctacttggatgacctcacagacatggatcctgaagtggcggccctgtattttcccaaaaacggagatccttccggactcgcaaaacatgcaagcgacaacggagcccggtcagccaaccagtccccgcagtcggtgggcagctcgggcgtggacagtggcgtggagagcacctcggacgggctgagggacctcccttccatcgccatctccctctgcgggggcctcagcgaccaccgggagatcacgaaagatgcattcctggagcaagctgtgtcatatcaacagtttgtggacaaccccgctattatcgatgaccccaatctcgtggtaaagattgggagtaaatattataactggacaacagcagcacccctcctcctggcaatgcaggccttccagaaacctttgccaaaggccactgtggaatctatcatgagggataaaatgcccaaaaagggaggaagatggtggttttcatggaggggaagaaacaccacaatcaaggaggaaagtaagccagagcagtgcttggctggcaaggcccatagcaccggagagcaaccgccgcagctcagcttggccaccagggtaaagcatgaatcatcctccagtgatgaggagcgcgcagctgccaagccatcaaacgcaggccacctccctcttctgcctaatgtcagctacaagaagactctccggctgacttccgagcagcttaaaagcttgaagttgaagaatggccccaacgacgtggttttcagtgtcaccacgcagtaccaaggcacgtgccgctgtgagggcaccatctatctgtggaactgggatgataaagtcatcatttctgatattgatgggacaattaccagatcagatactcttggccacattttgcccacccttgggaaggattggacccatcagggcatcgctaagctgtaccataaagtgagccagaatggatataaatttctctactgttctgcccgtgccatcgggatggcggacatgacgcggggctacctgcactgggtcaacgagaggggcacggtgctgccccaggggcccctgctgctgagtcccagcagcctcttctctgccctgcacagagaagtgattgaaaagaagccagaaaagtttaaagtccagtgtttgacagacatcaaaaacctgtttttccccaacacagaacccttttatgctgcttttggaaaccgaccagctgatgtgtattcatacaagcaagtaggagtgtctttgaatagaatatttaccgtcaaccctaaaggagagctggtacaggaacatgcaaagaccaacatctcttcgtatgtgagactctgtgaagtagtcgaccacgttttcccgttgctgaaaagaagccattcttcagactttccctgttcggataccttcagtaacttcaccttttggagagagccactgccaccttttgaaaaccaggacattcattctgcctcagcgtaaaatgtcccaagcagcctcttgccagcagtgcagagcctggttgtcacccattaaaggataggtctccccggagtgcacagctccacctgggagcctggcgcgtcatcattggcctgacagcagagagaattgagaagcatttctcccctgccccaccccggggctgacatttctaagcaagataggaagggagcactttctaggctaggagttgggtgcatttgtaccgtgaaaagcattcctcagttgtggcttaatgccagttacgacgctgcctttccggcctgctccagcaagtagctactggttcacgtgcagtttggggctgtgaaacctaggcagaaggcggctgtctgagggctgtccccgcctaggacagggtcaatcgaggaatgccagatgtgcacggtttttggcaaagtagggggcacatttccattatagcaatgttagtgccaccaccttctgaacacagtggggagggctgtgaaggctcatgtgacctggatctgaggtctctgatagaaatctggacgccaccgggtccaggcctggcctcagacttggccttgtggatgggccccttacagtatttgctgactagtctcatttttaggtgataagtttttctttaattcctttggttaaagatagtctatttcattggcatatctccccccagtttttgtggctcaaggctggaatatttatgccttaatatatctatggcagacatttaagaatgcgctttatctagctcatggtaactttgcaacgccttagattaaaatgacagtaaatattactaaggcagtattttgaatgagtttgacactgccggcttccttccatccagcgaggtggtgctgacagtgtggacttgagcacacttatgccaaatgataatgatactgacttctgttgggagctctccaaagaaactggttggttttaagaaaatagtttcaagaagttcaactatattcttttagatattatgtattgttttactctgattaggttactgtgataggcatttattcatattctttctataccactgtcattaatatattaaaaagatgtatgtgttagactatcgaaagggccttattctctctttctcatagactgaccttcttttggaatttctgagtcatttattttccttagctttttccactcaaattaagggcaagcgaaaaagtaataatttggcattctttaagcctacagaatgtgattctttcacttgtttattacactggctcgtggacagaacaatttgaaaagtgaaagaattattttggtaaaagattttgctttacttttcgaagcattatttttttaaagagtgttttactccaacgattgaaacattttcctatttaaatttcattgttagaatcacaggaggcaaaaaatggaacggttgaatgaaattttactctttctgtgaaagaaaatccacagagttgttgcctccgttgtagttggtgggccccgttagcattggatgcctttgccaaatggttcatgtggacacacaaaggcaaacagatctgccatcgatcgcagatttctgtagaaacacggatgtgcatgtgcagattcccttttgcaggtattaaaaataattaaaaatagtcctgcctgaggttgcagtgagccgagcttgcactactgcactccagcctgggtgacagagtaagactccatgtcaaaaaaaaaaaaaaaaaaaaaaagtcctgccttaactaactcctctgcgcttgttcactagtaacctaaagaggctatattcattctttatgcaatgagggtatttttgagtgaattttaactgctctgaactaagtataagctcatgggcctgcaaaggttcagacggtttctcctttgcacccaggaggaactttggctgcgagaatggggggatgtatccctcatgcagttggcatccaggcagccctctgcagcagcacaccctgcaggcggagttttcagaggatgcaattttggatcccgaattttgatgtaccttaaacttccacatcactgcaccctgaaacagagcatgctttccagaaagtcacactctcagatctgtgtcaagttcaatgtgagccctggcaaggctggcatattaacacctgccttctggcttctgaaagtgagatttgtatatgggctgcactcacgcatatacgagttggtttatctttgtgtacatgactataacccagtgatgctgaggtcatgtgctggaatgctgtatttggaccacacatttcaaagttgccctatggaaatgaatcctacttagtgacaagtcatcaaatgtttgtcacatgtgatgaagacaaatatgtatacctggcatagagaaaaatatatacctggtacattggagaaaaataattacactttcaaagagaattccctttgcaattttatgtttggatcaccactgtaagcacactttatttgcatttgatctgtatttgtatatgctgatgcaatgataaaaatcactgtaatacttcattgtgttgtactggatgcaaagctagaaaatattgcaataaatgagaccgatgaaagac

SEQ ID NO: 464016 - DNA, 5627 bp, Homo sapiens
ccatgcgcagggcatggatgaaagcaagctggagagggagagaggatgggaggcgaggaggcagcctgagggaaggaacaggagggaagagagatgaagggcaagaccggggccagccatgcctgtcctaacagcagccacccagcagtggcccagcctgctgagaactagaaaatcagaagaaaaaggagaatccaccaggagacccaggttcgcatgagcaggggcctttatctgaagttaatggaagctgagccaggtcctgacaatgtgccttctgatggggagatgagactttcctctgaaagctaaggtaactctgaagcgtgagctgccagaattcaaggccacctgcttaacagaagacaactagaaacctcatccatgagcagagtgcagaccatgaattacgtggggcagttagccggccaggtgtttgtcaccgtgaaggagctctacaaggggctgaatcccgccacactctcagggtgcattgacatcattgtcatccgccagcccaatggaaacctccaatgctcccctttccacgtccgctttgggaagatgggggtcctgcgctcccgagagaaagtggttgacatagaaatcaatggggaatctgtggatttgcatatgaaattgggagataatggagaagcattttttgttcaagaaacagataatgatcaggaagttatccctatgcacctggccacctcccccatcctgtcagaaggagcttcgagaatggaatgccagctgaaaaggggctctgtggacaggatgagaggcctggaccccagcacgccagcccaagtgatcgctcccagcgagacgccgtcaagcagctctgtagtaaagaagagaagaaaaaggaggagaaagtcacagctggacagcctgaagagagatgacaacatgaacacatctgaggatgaggacatgttccccatcgagatgagctcggatgaggccatggagctgctggagagcagcagaactcttcctaatgatatacctccattccaagatgatattcctgaggaaaacctctccctggctgtgatttaccctcagtcagcctcataccctaattcggatagagagtggtcacccactcccagtccttccggttcccgaccttcaacacctaaaagtgattcagaattggtcagcaagtccacggaaaggacagggcagaagaacccagaaatgctttggctgtggggagagctgccgcaggctgctaagtcttcttctccacacaagatgaaagagtccagcccattgagcagtagaaaaatttgtgataaaagtcactttcaggccattcacagcgaatcttcagacacttttagtgaccaatcgccaactctggtcggtggggcacttttggaccagaacaagcctcagacagaaatgcagtttgtgaatgaagaagacctggagaccttaggagcagcagcgccactcttgcccatgatcgaggagctcaaacccccctctgccagtgtagtccagacagcaaacaagacggattctccttccaggaaaagagataaacgaagccgacatcttggtgctgacggcgtctacttggatgacctcacagacatggatcctgaagtggcggccctgtattttcccaaaaacggagatccttccggactcgcaaaacatgcaagcgacaacggagcccggtcagccaaccagtccccgcagtcggtgggcagctcgggcgtggacagtggcgtggagagcacctcggacgggctgagggacctcccttccatcgccatctccctctgcgggggcctcagcgaccaccgggagatcacgaaagatgcattcctggagcaagctgtgtcatatcaacagtttgtggacaaccccgctattatcgatgaccccaatctcgtggtaaagattgggagtaaatattataactggacaacagcagcacccctcctcctggcaatgcaggccttccagaaacctttgccaaaggccactgtggaatctatcatgagggataaaatgcccaaaaagggaggaagatggtggttttcatggaggggaagaaacaccacaatcaaggaggaaagtaagccagagcagtgcttggctggcaaggcccatagcaccggagagcaaccgccgcagctcagcttggccaccagggtaaagcatgaatcatcctccagtgatgaggagcgcgcagctgccaagccatcaaacgcaggccacctccctcttctgcctaatgtcagctacaagaagactctccggctgacttccgagcagcttaaaagcttgaagttgaagaatggccccaacgacgtggttttcagtgtcaccacgcagtaccaaggcacgtgccgctgtgagggcaccatctatctgtggaactgggatgataaagtcatcatttctgatattgatgggacaattaccagatcagatactcttggccacattttgcccacccttgggaaggattggacccatcagggcatcgctaagctgtaccataaagtgagccagaatggatataaatttctctactgttctgcccgtgccatcgggatggcggacatgacgcggggctacctgcactgggtcaacgagaggggcacggtgctgccccaggggcccctgctgctgagtcccagcagcctcttctctgccctgcacagagaagtgattgaaaagaagccagaaaagtttaaagtccagtgtttgacagacatcaaaaacctgtttttccccaacacagaacccttttatgctgcttttggaaaccgaccagctgatgtgtattcatacaagcaagtaggagtgtctttgaatagaatatttaccgtcaaccctaaaggagagctggtacaggaacatgcaaagaccaacatctcttcgtatgtgagactctgtgaagtagtcgaccacgttttcccgttgctgaaaagaagccattcttcagactttccctgttcggataccttcagtaacttcaccttttggagagagccactgccaccttttgaaaaccaggacattcattctgcctcagcgtaaaatgtcccaagcagcctcttgccagcagtgcagagcctggttgtcacccattaaaggataggtctccccggagtgcacagctccacctgggagcctggcgcgtcatcattggcctgacagcagagagaattgagaagcatttctcccctgccccaccccggggctgacatttctaagcaagataggaagggagcactttctaggctaggagttgggtgcatttgtaccgtgtgctccagcaagtagctactggttcacgtgcagtttggggctgtgaaacctaggcagaaggcggctgtctgagggctgtccccgcctaggacagggtcaatcgaggaatgccagatgtgcacggtttttggcaaagtagggggcacatttccattatagcaatgttagtgccaccaccttctgaacacagtggggagggctgtgaaggctcatgtgacctggatctgaggtctctgatagaaatctggacgccaccgggtccaggcctggcctcagacttggccttgtggatgggccccttacagtatttgctgactagtctcatttttaggtgataagtttttctttaattcctttggttaaagatagtctatttcattggcatatctccccccagtttttgtggctcaaggctggaatatttatgccttaatatatctatggcagacatttaagaatgcgctttatctagctcatggtaactttgcaacgccttagattaaaatgacagtaaatattactaaggcagtattttgaatgagtttgacactgccggcttccttccatccagcgaggtggtgctgacagtgtggacttgagcacacttatgccaaatgataatgatactgacttctgttgggagctctccaaagaaactggttggttttaagaaaatagtttcaagaagttcaactatattcttttagatattatgtattgttttactctgattaggttactgtgataggcatttattcatattctttctataccactgtcattaatatattaaaaagatgtatgtgttagactatcgaaagggccttattctctctttctcatagactgaccttcttttggaatttctgagtcatttattttccttagctttttccactcaaattaagggcaagcgaaaaagtaataatttggcattctttaagcctacagaatgtgattctttcacttgtttattacactggctcgtggacagaacaatttgaaaagtgaaagaattattttggtaaaagattttgctttacttttcgaagcattatttttttaaagagtgttttactccaacgattgaaacattttcctatttaaatttcattgttagaatcacaggaggcaaaaaatggaacggttgaatgaaattttactctttctgtgaaagaaaatccacagagttgttgcctccgttgtagttggtgggccccgttagcattggatgcctttgccaaatggttcatgtggacacacaaaggcaaacagatctgccatcgatcgcagatttctgtagaaacacggatgtgcatgtgcagattcccttttgcaggtattaaaaataattaaaaatagtcctgcctgaggttgcagtgagccgagcttgcactactgcactccagcctgggtgacagagtaagactccatgtcaaaaaaaaaaaaaaaaaaaaaaagtcctgccttaactaactcctctgcgcttgttcactagtaacctaaagaggctatattcattctttatgcaatgagggtatttttgagtgaattttaactgctctgaactaagtataagctcatgggcctgcaaaggttcagacggtttctcctttgcacccaggaggaactttggctgcgagaatggggggatgtatccctcatgcagttggcatccaggcagccctctgcagcagcacaccctgcaggcggagttttcagaggatgcaattttggatcccgaattttgatgtaccttaaacttccacatcactgcaccctgaaacagagcatgctttccagaaagtcacactctcagatctgtgtcaagttcaatgtgagccctggcaaggctggcatattaacacctgccttctggcttctgaaagtgagatttgtatatgggctgcactcacgcatatacgagttggtttatctttgtgtacatgactataacccagtgatgctgaggtcatgtgctggaatgctgtatttggaccacacatttcaaagttgccctatggaaatgaatcctacttagtgacaagtcatcaaatgtttgtcacatgtgatgaagacaaatatgtatacctggcatagagaaaaatatatacctggtacattggagaaaaataattacactttcaaagagaattccctttgcaattttatgtttggatcaccactgtaagcacactttatttgcatttgatctgtatttgtatatgctgatgcaatgataaaaatcactgtaatacttcattgtgttgtactggatgcaaagctagaaaatattgcaataaatgagaccgatgaaagac

SEQ ID NO: 464017 - DNA, 4514 bp, Homo sapiens
ctgggcggcgccccacctctggacaggggcgcagcaccgggctgccctccctgcaaagcctgaggtcatgttgtccacagtggtcgtggtccacagcccagtaagtggcagctgtgcagcccttttttcccccaggagggtctcccgtgatcctggggacccaccctcagtccccctgcgatctagggcagggctggcgcctggaggggaagggcagggaacagggaggacagcttgcttcttcttcagtatattttagggggatacagggagatgcagccagctgagaagtaatggttttctctcctaagctaaggcgtttaatgtctctttccttgtcgtggtgctttaataaacatctgtgctgagatgcagccgtctgcggctctgagggtggccgcgtgccagagcatcactggatggtgatgtaggaccctgaactgggacagtcctcagccggtctctgccgcttttcctccttccagcggagatccttccggactcgcaaaacatgcaagcgacaacggagcccggtcagccaaccagtccccgcagtcggtgggcagctcgggcgtggacagtggcgtggagagcacctcggacgggctgagggacctcccttccatcgccatctccctctgcgggggcctcagcgaccaccgggagatcacgaaagatgcattcctggagcaagctgtgtcatatcaacagtttgtggacaaccccgctattatcgatgaccccaatctcgtggtaaagattgggagtaaatattataactggacaacagcagcacccctcctcctggcaatgcaggccttccagaaacctttgccaaaggccactgtggaatctatcatgagggataaaatgcccaaaaagggaggaagatggtggttttcatggaggggaagaaacaccacaatcaaggaggaaagtaagccagagcagtgcttggctggcaaggcccatagcaccggagagcaaccgccgcagctcagcttggccaccagggtaaagcatgaatcatcctccagtgatgaggagcgcgcagctgccaagccatcaaacgcaggccacctccctcttctgcctaatgtcagctacaagaagactctccggctgacttccgagcagcttaaaagcttgaagttgaagaatggccccaacgacgtggttttcagtgtcaccacgcagtaccaaggcacgtgccgctgtgagggcaccatctatctgtggaactgggatgataaagtcatcatttctgatattgatgggacaattaccagatcagatactcttggccacattttgcccacccttgggaaggattggacccatcagggcatcgctaagctgtaccataaagtgagccagaatggatataaatttctctactgttctgcccgtgccatcgggatggcggacatgacgcggggctacctgcactgggtcaacgagaggggcacggtgctgccccaggggcccctgctgctgagtcccagcagcctcttctctgccctgcacagagaagtgattgaaaagaagccagaaaagtttaaagtccagtgtttgacagacatcaaaaacctgtttttccccaacacagaacccttttatgctgcttttggaaaccgaccagctgatgtgtattcatacaagcaagtaggagtgtctttgaatagaatatttaccgtcaaccctaaaggagagctggtacaggaacatgcaaagaccaacatctcttcgtatgtgagactctgtgaagtagtcgaccacgttttcccgttgctgaaaagaagccattcttcagactttccctgttcggataccttcagtaacttcaccttttggagagagccactgccaccttttgaaaaccaggacattcattctgcctcagcgtaaaatgtcccaagcagcctcttgccagcagtgcagagcctggttgtcacccattaaaggataggtctccccggagtgcacagctccacctgggagcctggcgcgtcatcattggcctgacagcagagagaattgagaagcatttctcccctgccccaccccggggctgacatttctaagcaagataggaagggagcactttctaggctaggagttgggtgcatttgtaccgtgaaaagcattcctcagttgtggcttaatgccagttacgacgctgcctttccggcctgctccagcaagtagctactggttcacgtgcagtttggggctgtgaaacctaggcagaaggcggctgtctgagggctgtccccgcctaggacagggtcaatcgaggaatgccagatgtgcacggtttttggcaaagtagggggcacatttccattatagcaatgttagtgccaccaccttctgaacacagtggggagggctgtgaaggctcatgtgacctggatctgaggtctctgatagaaatctggacgccaccgggtccaggcctggcctcagacttggccttgtggatgggccccttacagtatttgctgactagtctcatttttaggtgataagtttttctttaattcctttggttaaagatagtctatttcattggcatatctccccccagtttttgtggctcaaggctggaatatttatgccttaatatatctatggcagacatttaagaatgcgctttatctagctcatggtaactttgcaacgccttagattaaaatgacagtaaatattactaaggcagtattttgaatgagtttgacactgccggcttccttccatccagcgaggtggtgctgacagtgtggacttgagcacacttatgccaaatgataatgatactgacttctgttgggagctctccaaagaaactggttggttttaagaaaatagtttcaagaagttcaactatattcttttagatattatgtattgttttactctgattaggttactgtgataggcatttattcatattctttctataccactgtcattaatatattaaaaagatgtatgtgttagactatcgaaagggccttattctctctttctcatagactgaccttcttttggaatttctgagtcatttattttccttagctttttccactcaaattaagggcaagcgaaaaagtaataatttggcattctttaagcctacagaatgtgattctttcacttgtttattacactggctcgtggacagaacaatttgaaaagtgaaagaattattttggtaaaagattttgctttacttttcgaagcattatttttttaaagagtgttttactccaacgattgaaacattttcctatttaaatttcattgttagaatcacaggaggcaaaaaatggaacggttgaatgaaattttactctttctgtgaaagaaaatccacagagttgttgcctccgttgtagttggtgggccccgttagcattggatgcctttgccaaatggttcatgtggacacacaaaggcaaacagatctgccatcgatcgcagatttctgtagaaacacggatgtgcatgtgcagattcccttttgcaggtattaaaaataattaaaaatagtcctgcctgaggttgcagtgagccgagcttgcactactgcactccagcctgggtgacagagtaagactccatgtcaaaaaaaaaaaaaaaaaaaaaaagtcctgccttaactaactcctctgcgcttgttcactagtaacctaaagaggctatattcattctttatgcaatgagggtatttttgagtgaattttaactgctctgaactaagtataagctcatgggcctgcaaaggttcagacggtttctcctttgcacccaggaggaactttggctgcgagaatggggggatgtatccctcatgcagttggcatccaggcagccctctgcagcagcacaccctgcaggcggagttttcagaggatgcaattttggatcccgaattttgatgtaccttaaacttccacatcactgcaccctgaaacagagcatgctttccagaaagtcacactctcagatctgtgtcaagttcaatgtgagccctggcaaggctggcatattaacacctgccttctggcttctgaaagtgagatttgtatatgggctgcactcacgcatatacgagttggtttatctttgtgtacatgactataacccagtgatgctgaggtcatgtgctggaatgctgtatttggaccacacatttcaaagttgccctatggaaatgaatcctacttagtgacaagtcatcaaatgtttgtcacatgtgatgaagacaaatatgtatacctggcatagagaaaaatatatacctggtacattggagaaaaataattacactttcaaagagaattccctttgcaattttatgtttggatcaccactgtaagcacactttatttgcatttgatctgtatttgtatatgctgatgcaatgataaaaatcactgtaatacttcattgtgttgtactggatgcaaagctagaaaatattgcaataaatgagaccgatgaaagac

SEQ ID NO: 464018 - DNA, 5769 bp, Homo sapiens
ccatgcgcagggcatggatgaaagcaagctggagagggagagaggatgggaggcgaggaggcagcctgagggaaggaacaggagggaagagagatgaagggcaagaccggggccagccatgcctgtcctaacagcagccacccagcagtggcccagcctgctgagaactagaaaatcagaagaaaaaggagaatccaccaggagacccaggttcgcatgagcaggggcctttatctgaagttaatggaagctgagccaggtcctgacaatgtgccttctgatggggagatgagactttcctctgaaagctaaggtaactctgaagcgtgagctgccagaattcaaggccacctgcttaacagaagacaactagaaacctcatccatgagcagagtgcagaccatgaattacgtggggcagttagccggccaggtgtttgtcaccgtgaaggagctctacaaggggctgaatcccgccacactctcagggtgcattgacatcattgtcatccgccagcccaatggaaacctccaatgctcccctttccacgtccgctttgggaagatgggggtcctgcgctcccgagagaaagtggttgacatagaaatcaatggggaatctgtggatttgcatatgaaattgggagataatggagaagcattttttgttcaagaaacagataatgatcaggaagttatccctatgcacctggccacctcccccatcctgtcagaaggagcttcgagaatggaatgccagctgaaaaggggctctgtggacaggatgagaggcctggaccccagcacgccagcccaagtgatcgctcccagcgagacgccgtcaagcagctctgtagtaaagaagagaagaaaaaggaggagaaagtcacagctggacagcctgaagagagatgacaacatgaacacatctgaggatgaggacatgttccccatcgagatgagctcggatgaggccatggagctgctggagagcagcagaactcttcctaatgatatacctccattccaagatgatattcctgaggaaaacctctccctggctgtgatttaccctcagtcagcctcataccctaattcggatagagagtggtcacccactcccagtccttccggttcccgaccttcaacacctaaaagtgattcagaattggtcagcaagtccacggaaaggacagggcagaagaacccagaaatgctttggctgtggggagagctgccgcaggctgctaagtcttcttctccacacaagatgaaagagtccagcccattgagcagtagaaaaatttgtgataaaagtcactttcaggccattcacagcgaatcttcagacacttttagtgaccaatcgccaactctggtcggtggggcacttttggaccagaacaagcctcagacagaaatgcagtttgtgaatgaagaagacctggagaccttaggagcagcagcgccactcttgcccatgatcgaggagctcaaacccccctctgccagtgtagtccagacagcaaacaagacggattctccttccaggaaaagagataaacgaagccgacatcttggtgctgacggcgtctacttggatgacctcacagacatggatcctgaagtggcggccctgtattttcccaaaaacggagatccttccggactcgcaaaacatgcaagcgacaacggagcccggtcagccaaccagtccccgcagtcggtgggcagctcgggcgtggacagtggcgtggagagcacctcggacgggctgagggacctcccttccatcgccatctccctctgcgggggcctcagcgaccaccgggagatcacgaaagatgcattcctggagcaagctgtgtcatatcaacagtttgtggacaaccccgctattatcgatgaccccaatctcgtggtaaagattgggagtaaatattataactggacaacagcagcacccctcctcctggcaatgcaggccttccagaaacctttgccaaaggccactgtggaatctatcatgagggataaaatgcccaaaaagggaggaagatggtggttttcatggaggggaagaaacaccacaatcaaggaggaaagtaagccagagcagtgcttggctggcaaggcccatagcaccggagagcaaccgccgcagctcagcttggccaccagggtaaagcatgaatcatcctccagtgatgaggagcgcgcagctgccaagccatcaaacgcaggccacctccctcttctgcctaatgtcagctacaagaagactctccggctgacttccgagcagcttaaaagcttgaagttgaagaatggccccaacgacgtggttttcagtgtcaccacgcagtaccaaggcacgtgccgctgtgagggcaccatctatctgtggaactgggatgataaagtcatcatttctgatattgatgggacaattaccagatcagatactcttggccacattttgcccacccttgggaaggattggacccatcagggcatcgctaagctgtaccataaagtgagccagaatggatataaatttctctactgttctgcccgtgccatcgggatggcggacatgacgcggggctacctgcactgggtcaacgagaggggcacggtgctgccccaggggcccctgctgctgagtcccagcagcctcttctctgccctgcacagagaagtgattgaaaagaagccagaaaagtttaaagtccagtgtttgacagacatcaaaaacctgtttttccccaacacagaacccttttatgctgcttttggaaaccgaccagctgatgtgtattcatacaagcaagtaggagtgtctttgaatagaatatttaccgtcaaccctaaaggagagctggtacaggaacatgcaaagaccaacatctcttcgtatgtgagactctgtgaagtagtcgaccacgttttcccgttgctgaaaagaagccattcttcagactttccctgttcggataccttcagtaacttcaccttttggagagagccactgccaccttttgaaaaccaggacattcattctgcctcagcgtaaaatgtcccaagcagcctcttgccagcagtgcagagcctggttgtcacccattaaaggataggtctccccggagtgcacagctccacctgggagcctggcgcgtcatcattggcctgacagcagagagaattgagaagcatttctcccctgccccaccccggggctgacatttctaagcaagataggaagggagcactttctaggctaggagttgggtgcatttgtaccgtgaaaagcattcctcagttgtggcttaatgccagttacgacgctgcctttccggcctgctccagcaagtagctactggttcacgtgcagtttggggctgtgaaacctaggcagaaggcggctgtctgagggctgtccccgcctaggacagggtcaatcgaggaatgccagatgtgcacggtttttggcaaagtagggggcacatttccattatagcaatgttagtgccaccaccttctgaacacagtggggagggctgtgaaggctcatgtgacctggatctgaggtctctgatagaaatctggacgccaccgggtccaggcctggcctcagacttggccttgtggatgggccccttacagtatttgctgactagtctcatttttaggtgataagtttttctttaattcctttggttaaagatagtctatttcattggcatatctccccccagtttttgtggctcaaggctggaatatttatgccttaatatatctatggcagacatttaagaatgcgctttatctagctcatggtaactttgcaacgccttagattaaaatgacagtaaatattactaaggcagtattttgaatgagtttgacactgccggcttccttccatccagcgaggtggtgctgacagtgtggacttgagcacacttatgccaaatgataatgatactgacttctgttgggagctctccaaagaaactggttggttttaagaaaatagtttcaagaagttcaactatattcttttagatattatgtattgttttactctgattaggttactgtgataggcatttattcatattctttctataccactgtcattaatatattaaaaagatgtatgtgttagactatcgaaagggccttattctctctttctcatagactgaccttcttttggaatttctgagtcatttattttccttagctttttccactcaaattaagggcaagcgaaaaagtaataatttggcattctttaagcctacagaatgtgattctttcacttgtttattacactggctcgtggacagaacaatttgaaaagtgaaagaattattttggtaaaagattttgctttacttttcgaagcattatttttttaaagagtgttttactccaacgattgaaacattttcctatttaaatttcattgttagaatcacaggaggcaaaaaatggaacggttgaatgaaattttactctttctgtgaaagaaaatccacagagttgttgcctccgttgtagttggtgggccccgttagcattggatgcctttgccaaatggttcatgtggacacacaaaggcaaacagatctgccatcgatcgcagatttctgtagaaacacggatgtgcatgtgcagattcccttttgcaggtattaaaaataattaaaaatagtcctgcctgaggttgcagtgagccgagcttgcactactgcactccagcctgggtgacagagtaagactccatgtcaaaaaaaaaaaaaaaaaaaaaaagtcctgccttaactaactcctctgcgcttgttcactagtaacctaaagaggctatattcattctttatgcaatgagggtatttttgagtgaattttaactgctctgaactaagtataagctcatgggcctgcaaaggttcagacggtttctcctttgcacccaggaggaactttggctgcgagaatggggggatgtatccctcatgcagttggcatccaggcagccctctgcagcagcacaccctgcaggcggagttttcagaggatgcaattttggatcccgaattttgatgtaccttaaacttccacatcactgcaccctgaaacagagcatgctttccagaaagtcacactctcagatctgtgtcaagttcaatgtgagccctggcaaggctggcatattaacacctgccttctggcttctgaaagtgagatttgtatatgggctgcactcacgcatatacgagttggtttatctttgtgtacatgactataacccagtgatgctgaggtcatgtgctggaatgctgtatttggaccacacatttcaaagttgccctatggaaatgaatcctacttagtgacaagtcatcaaatgtttgtcacatgtgatgaagacaaatatgtatacctggcatagagaaaaatatatacctggtacattggagaaaaataattacactttcaaagagaattccctttgcaattttatgtttggatcaccactgtaagcacactttatttgcatttgatctgtatttgtatatgctgatgcaatgataaaaatcactgtaatacttcattgtgttgtactggatgcaaagctagaaaatattgcaataaatgagaccgatgaaagacaaaaaaaaaacagaacaacaaacaaaagaaaacaacaccacaaaaaaaaaaaagaaacgagagacacaaaaatcatccgcaaacaaaa

SEQ ID NO: 464019 - DNA, 3348 bp, Homo sapiens
aacctgaaatgctgatagtctgaatctagagtatcccccacggacatcagctggaaacgcaggccacctccctcttctgcctaatgtcagctacaagaagactctccggctgacttccgagcagcttaaaagcttgaagttgaagaatggccccaacgacgtggttttcagtgtcaccacgcagtaccaaggcacgtgccgctgtgagggcaccatctatctgtggaactgggatgataaagtcatcatttctgatattgatgggacaattaccagatcagatactcttggccacattttgcccacccttgggaaggattggacccatcagggcatcgctaagctgtaccataaagtgagccaagaagtgattgaaaagaagccagaaaagtttaaagtccagtgtttgacagacatcaaaaacctgtttttccccaacacagaacccttttatgctgcttttggaaaccgaccagctgatgtgtattcatacaagcaagtaggagtgtctttgaatagaatatttaccgtcaaccctaaaggagagctggtacaggaacatgcaaagaccaacatctcttcgtatgtgagactctgtgaagtagtcgaccacgttttcccgttgctgaaaagaagccattcttcagactttccctgttcggataccttcagtaacttcaccttttggagagagccactgccaccttttgaaaaccaggacattcattctgcctcagcgtaaaatgtcccaagcagcctcttgccagcagtgcagagcctggttgtcacccattaaaggataggtctccccggagtgcacagctccacctgggagcctggcgcgtcatcattggcctgacagcagagagaattgagaagcatttctcccctgccccaccccggggctgacatttctaagcaagataggaagggagcactttctaggctaggagttgggtgcatttgtaccgtgaaaagcattcctcagttgtggcttaatgccagttacgacgctgcctttccggcctgctccagcaagtagctactggttcacgtgcagtttggggctgtgaaacctaggcagaaggcggctgtctgagggctgtccccgcctaggacagggtcaatcgaggaatgccagatgtgcacggtttttggcaaagtagggggcacatttccattatagcaatgttagtgccaccaccttctgaacacagtggggagggctgtgaaggctcatgtgacctggatctgaggtctctgatagaaatctggacgccaccgggtccaggcctggcctcagacttggccttgtggatgggccccttacagtatttgctgactagtctcatttttaggtgataagtttttctttaattcctttggttaaagatagtctatttcattggcatatctccccccagtttttgtggctcaaggctggaatatttatgccttaatatatctatggcagacatttaagaatgcgctttatctagctcatggtaactttgcaacgccttagattaaaatgacagtaaatattactaaggcagtattttgaatgagtttgacactgccggcttccttccatccagcgaggtggtgctgacagtgtggacttgagcacacttatgccaaatgataatgatactgacttctgttgggagctctccaaagaaactggttggttttaagaaaatagtttcaagaagttcaactatattcttttagatattatgtattgttttactctgattaggttactgtgataggcatttattcatattctttctataccactgtcattaatatattaaaaagatgtatgtgttagactatcgaaagggccttattctctctttctcatagactgaccttcttttggaatttctgagtcatttattttccttagctttttccactcaaattaagggcaagcgaaaaagtaataatttggcattctttaagcctacagaatgtgattctttcacttgtttattacactggctcgtggacagaacaatttgaaaagtgaaagaattattttggtaaaagattttgctttacttttcgaagcattatttttttaaagagtgttttactccaacgattgaaacattttcctatttaaatttcattgttagaatcacaggaggcaaaaaatggaacggttgaatgaaattttactctttctgtgaaagaaaatccacagagttgttgcctccgttgtagttggtgggccccgttagcattggatgcctttgccaaatggttcatgtggacacacaaaggcaaacagatctgccatcgatcgcagatttctgtagaaacacggatgtgcatgtgcagattcccttttgcaggtattaaaaataattaaaaatagtcctgcctgaggttgcagtgagccgagcttgcactactgcactccagcctgggtgacagagtaagactccatgtcaaaaaaaaaaaaaaaaaaaaaaagtcctgccttaactaactcctctgcgcttgttcactagtaacctaaagaggctatattcattctttatgcaatgagggtatttttgagtgaattttaactgctctgaactaagtataagctcatgggcctgcaaaggttcagacggtttctcctttgcacccaggaggaactttggctgcgagaatggggggatgtatccctcatgcagttggcatccaggcagccctctgcagcagcacaccctgcaggcggagttttcagaggatgcaattttggatcccgaattttgatgtaccttaaacttccacatcactgcaccctgaaacagagcatgctttccagaaagtcacactctcagatctgtgtcaagttcaatgtgagccctggcaaggctggcatattaacacctgccttctggcttctgaaagtgagatttgtatatgggctgcactcacgcatatacgagttggtttatctttgtgtacatgactataacccagtgatgctgaggtcatgtgctggaatgctgtatttggaccacacatttcaaagttgccctatggaaatgaatcctacttagtgacaagtcatcaaatgtttgtcacatgtgatgaagacaaatatgtatacctggcatagagaaaaatatatacctggtacattggagaaaaataattacactttcaaagagaattccctttgcaattttatgtttggatcaccactgtaagcacactttatttgcatttgatctgtatttgtatatgctgatgcaatgataaaaatcactgtaatacttcattgtgttgtactggatgcaaagctagaaaatattgcaataaatgagaccgatgaaagac

SEQ ID NO: 464020 - DNA, 3015 bp, Homo sapiens
gtagattgggtatagaagaacccttgaaatgactgccttttctggttgctgtcatctgaaagccctatccgagaaccatatgtagagtcagattctcatcccagaagcagtagcctggtgaagagccacttgcccacatctaaaggatgtgtattcatacaagcaagtaggagtgtctttgaatagaatatttaccgtcaaccctaaaggagagctggtacaggaacatgcaaagaccaacatctcttcgtatgtgagactctgtgaagtagtcgaccacgttttcccgttgctgaaaagaagccattcttcagactttccctgttcggataccttcagtaacttcaccttttggagagagccactgccaccttttgaaaaccaggacattcattctgcctcagcgtaaaatgtcccaagcagcctcttgccagcagtgcagagcctggttgtcacccattaaaggataggtctccccggagtgcacagctccacctgggagcctggcgcgtcatcattggcctgacagcagagagaattgagaagcatttctcccctgccccaccccggggctgacatttctaagcaagataggaagggagcactttctaggctaggagttgggtgcatttgtaccgtgaaaagcattcctcagttgtggcttaatgccagttacgacgctgcctttccggcctgctccagcaagtagctactggttcacgtgcagtttggggctgtgaaacctaggcagaaggcggctgtctgagggctgtccccgcctaggacagggtcaatcgaggaatgccagatgtgcacggtttttggcaaagtagggggcacatttccattatagcaatgttagtgccaccaccttctgaacacagtggggagggctgtgaaggctcatgtgacctggatctgaggtctctgatagaaatctggacgccaccgggtccaggcctggcctcagacttggccttgtggatgggccccttacagtatttgctgactagtctcatttttaggtgataagtttttctttaattcctttggttaaagatagtctatttcattggcatatctccccccagtttttgtggctcaaggctggaatatttatgccttaatatatctatggcagacatttaagaatgcgctttatctagctcatggtaactttgcaacgccttagattaaaatgacagtaaatattactaaggcagtattttgaatgagtttgacactgccggcttccttccatccagcgaggtggtgctgacagtgtggacttgagcacacttatgccaaatgataatgatactgacttctgttgggagctctccaaagaaactggttggttttaagaaaatagtttcaagaagttcaactatattcttttagatattatgtattgttttactctgattaggttactgtgataggcatttattcatattctttctataccactgtcattaatatattaaaaagatgtatgtgttagactatcgaaagggccttattctctctttctcatagactgaccttcttttggaatttctgagtcatttattttccttagctttttccactcaaattaagggcaagcgaaaaagtaataatttggcattctttaagcctacagaatgtgattctttcacttgtttattacactggctcgtggacagaacaatttgaaaagtgaaagaattattttggtaaaagattttgctttacttttcgaagcattatttttttaaagagtgttttactccaacgattgaaacattttcctatttaaatttcattgttagaatcacaggaggcaaaaaatggaacggttgaatgaaattttactctttctgtgaaagaaaatccacagagttgttgcctccgttgtagttggtgggccccgttagcattggatgcctttgccaaatggttcatgtggacacacaaaggcaaacagatctgccatcgatcgcagatttctgtagaaacacggatgtgcatgtgcagattcccttttgcaggtattaaaaataattaaaaatagtcctgcctgaggttgcagtgagccgagcttgcactactgcactccagcctgggtgacagagtaagactccatgtcaaaaaaaaaaaaaaaaaaaaaaagtcctgccttaactaactcctctgcgcttgttcactagtaacctaaagaggctatattcattctttatgcaatgagggtatttttgagtgaattttaactgctctgaactaagtataagctcatgggcctgcaaaggttcagacggtttctcctttgcacccaggaggaactttggctgcgagaatggggggatgtatccctcatgcagttggcatccaggcagccctctgcagcagcacaccctgcaggcggagttttcagaggatgcaattttggatcccgaattttgatgtaccttaaacttccacatcactgcaccctgaaacagagcatgctttccagaaagtcacactctcagatctgtgtcaagttcaatgtgagccctggcaaggctggcatattaacacctgccttctggcttctgaaagtgagatttgtatatgggctgcactcacgcatatacgagttggtttatctttgtgtacatgactataacccagtgatgctgaggtcatgtgctggaatgctgtatttggaccacacatttcaaagttgccctatggaaatgaatcctacttagtgacaagtcatcaaatgtttgtcacatgtgatgaagacaaatatgtatacctggcatagagaaaaatatatacctggtacattggagaaaaataattacactttcaaagagaattccctttgcaattttatgtttggatcaccactgtaagcacactttatttgcatttgatctgtatttgtatatgctgatgcaatgataaaaatcactgtaatacttcattgtgttgtactggatgcaaagctagaaaatattgcaataaatgagaccgatgaaagac

SEQ ID NO: 464021 - DNA, 1644 bp, Homo sapiens
gccaaaagaaggtcagtctatgagaaagagagaataaggccctttcgatagtctaacacatacatctttttaatatattaatgacagtggtatagaaagaatatgaataaatgcctatcacagtaacctaatcagagtaaaacaatacataatatctaaaagaatatagttgaccttcttttggaatttctgagtcatttattttccttagctttttccactcaaattaagggcaagcgaaaaagtaataatttggcattctttaagcctacagaatgtgattctttcacttgtttattacactggctcgtggacagaacaatttgaaaagtgaaagaattattttggtaaaagattttgctttacttttcgaagcattatttttttaaagagtgttttactccaacgattgaaacattttcctatttaaatttcattgttagaatcacaggaggcaaaaaatggaacggttgaatgaaattttactctttctgtgaaagaaaatccacagagttgttgcctccgttgtagttggtgggccccgttagcattggatgcctttgccaaatggttcatgtggacacacaaaggcaaacagatctgccatcgatcgcagatttctgtagaaacacggatgtgcatgtgcagattcccttttgcaggtattaaaaataattaaaaatagtcctgcctgaggttgcagtgagccgagcttgcactactgcactccagcctgggtgacagagtaagactccatgtcaaaaaaaaaaaaaaaaaaaaaaagtcctgccttaactaactcctctgcgcttgttcactagtaacctaaagaggctatattcattctttatgcaatgagggtatttttgagtgaattttaactgctctgaactaagtataagctcatgggcctgcaaaggttcagacggtttctcctttgcacccaggaggaactttggctgcgagaatggggggatgtatccctcatgcagttggcatccaggcagccctctgcagcagcacaccctgcaggcggagttttcagaggatgcaattttggatcccgaattttgatgtaccttaaacttccacatcactgcaccctgaaacagagcatgctttccagaaagtcacactctcagatctgtgtcaagttcaatgtgagccctggcaaggctggcatattaacacctgccttctggcttctgaaagtgagatttgtatatgggctgcactcacgcatatacgagttggtttatctttgtgtacatgactataacccagtgatgctgaggtcatgtgctggaatgctgtatttggaccacacatttcaaagttgccctatggaaatgaatcctacttagtgacaagtcatcaaatgtttgtcacatgtgatgaagacaaatatgtatacctggcatagagaaaaatatatacctggtacattggagaaaaataattacactttcaaagagaattccctttgcaattttatgtttggatcaccactgtaagcacactttatttgcatttgatctgtatttgtatatgctgatgcaatgataaaaatcactgtaatacttcattgtgttgtactggatgcaaagctagaaaatattgcaataaatgagaccgatgaaagac

SEQ ID NO: 464022 - DNA, 2043 bp, Homo sapiens
ccatgcgcagggcatggatgaaagcaagctggagagggagagaggatgggaggcgaggaggcagcctgagggaaggaacaggagggaagagagatgaagggcaagaccggggccagccatgcctgtcctaacagcagccacccagcagtggcccagcctgctgagaactagaaaatcagaagaaaaaggagaatccaccaggagacccaggttcgcatgagcaggggcctttatctgaagttaatggaagctgagccaggtcctgacaatgtgccttctgatggggagatgagactttcctctgaaagctaaggtaactctgaagcgtgagctgccagaattcaaggccacctgcttaacagaagacaactagaaacctcatccatgagcagagtgcagaccatgaattacgtggggcagttagccggccaggtgtttgtcaccgtgaaggagctctacaaggggctgaatcccgccacactctcagggtgcattgacatcattgtcatccgccagcccaatggaaacctccaatgctcccctttccacgtccgctttgggaagatgggggtcctgcgctcccgagagaaagtggttgacatagaaatcaatggggaatctgtggatttgcatatgaaattgggagataatggagaagcattttttgttcaagaaacagataatgatcaggaagttatccctatgcacctggccacctcccccatcctgtcagaaggagcttcgagaatggaatgccagctgaaaaggggctctgtggacaggatgagaggcctggaccccagcacgccagcccaagtgatcgctcccagcgagacgccgtcaagcagctctgtagtaaagaagagaagaaaaaggaggagaaagtcacagctggacagcctgaagagagatgacaacatgaacacatctgaggatgaggacatgttccccatcgagatgagctcggatgaggccatggagctgctggagagcagcagaactcttcctaatgatatacctccattccaagatgatattcctgaggaaaacctctccctggctgtgatttaccctcagtcagcctcataccctaattcggatagagagtggtcacccactcccagtccttccggttcccgaccttcaacacctaaaagtgattcagaattggtcagcaagtccacggaaaggacagggcagaagaacccagaaatgctttggctgtggggagagctgccgcaggctgctaagtcttcttctccacacaagatgaaagagtccagcccattgagcagtagaaaaatttgtgataaaagtcactttcaggccattcacagcgaatcttcagacacttttagtgaccaatcgccaactctggtcggtggggcacttttggaccagaacaagcctcagacagaaatgcagtttgtgaatgaagaagacctggagaccttaggagcagcagcgccactcttgcccatgatcgaggagctcaaacccccctctgccagtgtagtccagacagcaaacaagacggattctccttccaggaaaagagataaacgaagccgacatcttggtgctgacggcgtctacttggatgacctcacagacatggatcctgaagtggcggccctgtattttcccaaaaagtaaaattcctgttaattcctcacatcatttcctataatctgaatatcattctgtgtgagaccagtttccccttatgtttgattagaaagtgtgcaagacagctgggcgcggtggctcacgcctgtaatcccagcactttgggaggctgaggtgggcggatcacttgaggtcaggagttcaagaccaccctggccaacatggtgaatcctcgttctactgaaaataccaaaattggctgcacgtgctggcatgcacctgtaatcccagctactcgggaggctgaggcaggagaattgcttgaatccaggaggcggaggttgcattgagctgagatcatgccactgcacaccagcctgggccacagagtgagactccatctcaaaaaaaaaa

SEQ ID NO: 464023 - DNA, 1919 bp, Homo sapiens
ccatgcgcagggcatggatgaaagcaagctggagagggagagaggatgggaggcgaggaggcagcctgagggaaggaacaggagggaagagagatgaagggcaagaccggggccagccatgcctgtcctaacagcagccacccagcagtggcccagcctgctgagaactagaaaatcagaagaaaaaggagaatccaccaggagacccaggttcgcatgagcaggggcctttatctgaagttaatggaagctgagccaggtcctgacaatgtgccttctgatggggagatgagactttcctctgaaagctaaggtaactctgaagcgtgagctgccagaattcaaggccacctgcttaacagaagacaactagaaacctcatccatgagcagagtgcagaccatgaattacgtggggcagttagccggccaggtgtttgtcaccgtgaaggagctctacaaggggctgaatcccgccacactctcagggtgcattgacatcattgtcatccgccagcccaatggaaacctccaatgctcccctttccacgtccgctttgggaagatgggggtcctgcgctcccgagagaaagtggttgacatagaaatcaatggggaatctgtggatttgcatatgaaattgggagataatggagaagcattttttgttcaagaaacagataatgatcaggaagttatccctatgcacctggccacctcccccatcctgtcagaaggagcttcgagaatggaatgccagctgaaaaggggctctgtggacaggatgagaggcctggaccccagcacgccagcccaagtgatcgctcccagcgagacgccgtcaagcagctctgtagtaaagaagagaagaaaaaggaggagaaagtcacagctggacagcctgaagagagatgacaacatgaacacatctgaggatgaggacatgttccccatcgagatgagctcggatgaggccatggagctgctggagagcagcagaactcttcctaatgatatacctccattccaagatgatattcctgaggaaaacctctccctggctgtgatttaccctcagtcagcctcataccctaattcggatagagagtggtcacccactcccagtccttccggttcccgaccttcaacacctaaaagtgattcagaattggtcagcaagtccacggaaaggacagggcagaagaacccagaaatgctttggctgtggggagagctgccgcaggctgctaagtcttcttctccacacaagatgaaagagtccagcccattgagcagtagaaaaatttgtgataaaagtcactttcaggccattcacagcgaatcttcagacacttttagtgaccaatcgccaactctggtcggtggggcacttttggaccagaacaagcctcagacagaaatgcagtttgtgaatgaagaagacctggagaccttaggagcagcagcgccactcttgcccatgatcgaggagctcaaacccccctctgccagtgtagtccagacagcaaacaagacggattctccttccaggaaaagagataaacgaagccgacatcttggtgctgacggcgtctacttggatgacctcacagacatggatcctgaagtggcggccctgtattttcccaaaaagtaaaattcctgttaattcctcacatcatttcctataatctgaatatcattctgtgtgagaccagtttccccttatgtttgattagaaagtgtgcaagacagctgggcgcggtggctcacgcctgtaatcccagcactttgggaggctgaggtgggcggatcacttgaggtcaggagttcaagaccaccctggccaacatggtgaatcctcgttctactgaaaataccaaaattggctgcacacccagaccaatattggtctgcaca

SEQ ID NO: 464024 - DNA, 2372 bp, Homo sapiens
ccatgcgcagggcatggatgaaagcaagctggagagggagagaggatgggaggcgaggaggcagcctgagggaaggaacaggagggaagagagatgaagggcaagaccggggccagccatgcctgtcctaacagcagccacccagcagtggcccagcctgctgagaactagaaaatcagaagaaaaaggagaatccaccaggagacccaggttcgcatgagcaggggcctttatctgaagttaatggaagctgagccaggtcctgacaatgtgccttctgatggggagatgagactttcctctgaaagctaaggtaactctgaagcgtgagctgccagaattcaaggccacctgcttaacagaagacaactagaaacctcatccatgagcagagtgcagaccatgaattacgtggggcagttagccggccaggtgtttgtcaccgtgaaggagctctacaaggggctgaatcccgccacactctcagggtgcattgacatcattgtcatccgccagcccaatggaaacctccaatgctcccctttccacgtccgctttgggaagatgggggtcctgcgctcccgagagaaagtggttgacatagaaatcaatggggaatctgtggatttgcatatgaaattgggagataatggagaagcattttttgttcaagaaacagataatgatcaggaagttatccctatgcacctggccacctcccccatcctgtcagaaggagcttcgagaatggaatgccagctgaaaaggggctctgtggacaggatgagaggcctggaccccagcacgccagcccaagtgatcgctcccagcgagacgccgtcaagcagctctgtagtaaagaagagaagaaaaaggaggagaaagtcacagctggacagcctgaagagagatgacaacatgaacacatctgaggatgaggacatgttccccatcgagatgagctcggatgaggccatggagctgctggagagcagcagaactcttcctaatgatatacctccattccaagatgatattcctgaggaaaacctctccctggctgtgatttaccctcagtcagcctcataccctaattcggatagagagtggtcacccactcccagtccttccggttcccgaccttcaacacctaaaagtgattcagaattggtcagcaagtccacggaaaggacagggcagaagaacccagaaatgctttggctgtggggagagctgccgcaggctgctaagtcttcttctccacacaagatgaaagagtccagcccattgagcagtagaaaaatttgtgataaaagtcactttcaggccattcacagcgaatcttcagacacttttagtgaccaatcgccaactctggtcggtggggcacttttggaccagaacaagcctcagacagaaatgcagtttgtgaatgaagaagacctggagaccttaggagcagcagcgccactcttgcccatgatcgaggagctcaaacccccctctgccagtgtagtccagacagcaaacaagacggattctccttccaggaaaagagataaacgaagccgacatcttggtgctgacggcgtctacttggatgacctcacagacatggatcctgaagtggcggccctgtattttcccaaaaacggagatccttccggactcgcaaaacatgcaagcgacaacggagcccggtcagccaaccagtccccgcagtcggtgggcagctcgggcgtggacagtggcgtggagagcacctcggacgggctgagggacctcccttccatcgccatctccctctgcgggggcctcagcgaccaccgggagatcacgaaagatgcattcctggagcaagctgtgtcatatcaacagtttgtggacaaccccgctattatcgatgaccccaatctcgtggtaaagattgggagtaaatattataactggacaacagcagcacccctcctcctggcaatgcaggccttccagaaacctttgccaaaggccactgtggaatctatcatgagggataaaatgcccaaaaagggaggaagatggtggttttcatggaggggaagaaacaccacaatcaaggaggaaagtaagccagagcagtgcttggctggcaaggcccatagcaccggagagcaaccgccgcagctcagcttggccaccagtgcatataacctacagcaagcgagcatgcagctggctgcacggactccggaggcgggagtaccgggcttcaactcgtaaactcaccagtcggcttctctgtacctcaagtttcttcatctgtgaaatggagataatcgaatttagtattttgaaaagattgagttaatacatgttaaacacatgaaaaaaaa

SEQ ID NO: 464025 - DNA, 5340 bp, Homo sapiens
gcggcgggctgggtgtttgcaatacaaaggcggccacgcgcggcgccgctcggtgcagaccatgaattacgtggggcagttagccggccaggtgtttgtcaccgtgaaggagctctacaaggggctgaatcccgccacactctcagggtgcattgacatcattgtcatccgccagcccaatggaaacctccaatgctcccctttccacgtccgctttgggaagatgggggtcctgcgctcccgagagaaagtggttgacatagaaatcaatggggaatctgtggatttgcatatgaaattgggagataatggagaagcattttttgttcaagaaacagataatgatcaggaagttatccctatgcacctggccacctcccccatcctgtcagaaggagcttcgagaatggaatgccagctgaaaaggggctctgtggacaggatgagaggcctggaccccagcacgccagcccaagtgatcgctcccagcgagacgccgtcaagcagctctgtagtaaagaagagaagaaaaaggaggagaaagtcacagctggacagcctgaagagagatgacaacatgaacacatctgaggatgaggacatgttccccatcgagatgagctcggatgaggccatggagctgctggagagcagcagaactcttcctaatgatatacctccattccaagatgatattcctgaggaaaacctctccctggctgtgatttaccctcagtcagcctcataccctaattcggatagagagtggtcacccactcccagtccttccggttcccgaccttcaacacctaaaagtgattcagaattggtcagcaagtccacggaaaggacagggcagaagaacccagaaatgctttggctgtggggagagctgccgcaggctgctaagtcttcttctccacacaagatgaaagagtccagcccattgagcagtagaaaaatttgtgataaaagtcactttcaggccattcacagcgaatcttcagacacttttagtgaccaatcgccaactctggtcggtggggcacttttggaccagaacaagcctcagacagaaatgcagtttgtgaatgaagaagacctggagaccttaggagcagcagcgccactcttgcccatgatcgaggagctcaaacccccctctgccagtgtagtccagacagcaaacaagacggattctccttccaggaaaagagataaacgaagccgacatcttggtgctgacggcgtctacttggatgacctcacagacatggatcctgaagtggcggccctgtattttcccaaaaacggagatccttccggactcgcaaaacatgcaagcgacaacggagcccggtcagccaaccagtccccgcagtcggtgggcagctcgggcgtggacagtggcgtggagagcacctcggacgggctgagggacctcccttccatcgccatctccctctgcgggggcctcagcgaccaccgggagatcacgaaagatgcattcctggagcaagctgtgtcatatcaacagtttgtggacaaccccgctattatcgatgaccccaatctcgtggtaaagattgggagtaaatattataactggacaacagcagcacccctcctcctggcaatgcaggccttccagaaacctttgccaaaggccactgtggaatctatcatgagggataaaatgcccaaaaagggaggaagatggtggttttcatggaggggaagaaacaccacaatcaaggaggaaagtaagccagagcagtgcttggctggcaaggcccatagcaccggagagcaaccgccgcagctcagcttggccaccagggtaaagcatgaatcatcctccagtgatgaggagcgcgcagctgccaagccatcaaacgcaggccacctccctcttctgcctaatgtcagctacaagaagactctccggctgacttccgagcagcttaaaagcttgaagttgaagaatggccccaacgacgtggttttcagtgtcaccacgcagtaccaaggcacgtgccgctgtgagggcaccatctatctgtggaactgggatgataaagtcatcatttctgatattgatgggacaattaccagatcagatactcttggccacattttgcccacccttgggaaggattggacccatcagggcatcgctaagctgtaccataaagtgagccagaatggatataaatttctctactgttctgcccgtgccatcgggatggcggacatgacgcggggctacctgcactgggtcaacgagaggggcacggtgctgccccaggggcccctgctgctgagtcccagcagcctcttctctgccctgcacagagaagtgattgaaaagaagccagaaaagtttaaagtccagtgtttgacagacatcaaaaacctgtttttccccaacacagaacccttttatgctgcttttggaaaccgaccagctgatgtgtattcatacaagcaagtaggagtgtctttgaatagaatatttaccgtcaaccctaaaggagagctggtacaggaacatgcaaagaccaacatctcttcgtatgtgagactctgtgaagtagtcgaccacgttttcccgttgctgaaaagaagccattcttcagactttccctgttcggataccttcagtaacttcaccttttggagagagccactgccaccttttgaaaaccaggacattcattctgcctcagcgtaaaatgtcccaagcagcctcttgccagcagtgcagagcctggttgtcacccattaaaggataggtctccccggagtgcacagctccacctgggagcctggcgcgtcatcattggcctgacagcagagagaattgagaagcatttctcccctgccccaccccggggctgacatttctaagcaagataggaagggagcactttctaggctaggagttgggtgcatttgtaccgtgaaaagcattcctcagttgtggcttaatgccagttacgacgctgcctttccggcctgctccagcaagtagctactggttcacgtgcagtttggggctgtgaaacctaggcagaaggcggctgtctgagggctgtccccgcctaggacagggtcaatcgaggaatgccagatgtgcacggtttttggcaaagtagggggcacatttccattatagcaatgttagtgccaccaccttctgaacacagtggggagggctgtgaaggctcatgtgacctggatctgaggtctctgatagaaatctggacgccaccgggtccaggcctggcctcagacttggccttgtggatgggccccttacagtatttgctgactagtctcatttttaggtgataagtttttctttaattcctttggttaaagatagtctatttcattggcatatctccccccagtttttgtggctcaaggctggaatatttatgccttaatatatctatggcagacatttaagaatgcgctttatctagctcatggtaactttgcaacgccttagattaaaatgacagtaaatattactaaggcagtattttgaatgagtttgacactgccggcttccttccatccagcgaggtggtgctgacagtgtggacttgagcacacttatgccaaatgataatgatactgacttctgttgggagctctccaaagaaactggttggttttaagaaaatagtttcaagaagttcaactatattcttttagatattatgtattgttttactctgattaggttactgtgataggcatttattcatattctttctataccactgtcattaatatattaaaaagatgtatgtgttagactatcgaaagggccttattctctctttctcatagactgaccttcttttggaatttctgagtcatttattttccttagctttttccactcaaattaagggcaagcgaaaaagtaataatttggcattctttaagcctacagaatgtgattctttcacttgtttattacactggctcgtggacagaacaatttgaaaagtgaaagaattattttggtaaaagattttgctttacttttcgaagcattatttttttaaagagtgttttactccaacgattgaaacattttcctatttaaatttcattgttagaatcacaggaggcaaaaaatggaacggttgaatgaaattttactctttctgtgaaagaaaatccacagagttgttgcctccgttgtagttggtgggccccgttagcattggatgcctttgccaaatggttcatgtggacacacaaaggcaaacagatctgccatcgatcgcagatttctgtagaaacacggatgtgcatgtgcagattcccttttgcaggtattaaaaataattaaaaatagtcctgcctgaggttgcagtgagccgagcttgcactactgcactccagcctgggtgacagagtaagactccatgtcaaaaaaaaaaaaaaaaaaaaaaagtcctgccttaactaactcctctgcgcttgttcactagtaacctaaagaggctatattcattctttatgcaatgagggtatttttgagtgaattttaactgctctgaactaagtataagctcatgggcctgcaaaggttcagacggtttctcctttgcacccaggaggaactttggctgcgagaatggggggatgtatccctcatgcagttggcatccaggcagccctctgcagcagcacaccctgcaggcggagttttcagaggatgcaattttggatcccgaattttgatgtaccttaaacttccacatcactgcaccctgaaacagagcatgctttccagaaagtcacactctcagatctgtgtcaagttcaatgtgagccctggcaaggctggcatattaacacctgccttctggcttctgaaagtgagatttgtatatgggctgcactcacgcatatacgagttggtttatctttgtgtacatgactataacccagtgatgctgaggtcatgtgctggaatgctgtatttggaccacacatttcaaagttgccctatggaaatgaatcctacttagtgacaagtcatcaaatgtttgtcacatgtgatgaagacaaatatgtatacctggcatagagaaaaatatatacctggtacattggagaaaaataattacactttcaaagagaattccctttgcaattttatgtttggatcaccactgtaagcacactttatttgcatttgatctgtatttgtatatgctgatgcaatgataaaaatcactgtaatacttcattgtgttgtactggatgcaaagctagaaaatattgcaataaatgagaccgatgaaagac

SEQ ID NO: 464026 - DNA, 5681 bp, Homo sapiens
ccatgcgcagggcatggatgaaagcaagctggagagggagagaggatgggaggcgaggaggcagcctgagggaaggaacaggagggaagagagatgaagggcaagaccggggccagccatgcctgtcctaacagcagccacccagcagtggcccagcctgctgagaactagaaaatcagaagaaaaaggagaatccaccaggagacccaggttcgcatgagcaggggcctttatctgaagttaatggaagctgagccaggtcctgacaatgtgccttctgatggggagatgagactttcctctgaaagctaaggtaactctgaagcgtgagctgccagaattcaaggccacctgcttaacagaagacaactagaaacctcatccatgagcagagtgcagaccatgaattacgtggggcagttagccggccaggtgtttgtcaccgtgaaggagctctacaaggggctgaatcccgccacactctcagggtgcattgacatcattgtcatccgccagcccaatggaaacctccaatgctcccctttccacgtccgctttgggaagatgggggtcctgcgctcccgagagaaagtggttgacatagaaatcaatggggaatctgtggatttgcatatgaaattgggagataatggagaagcattttttgttcaagaaacagataatgatcaggaagttatccctatgcacctggccacctcccccatcctgtcagaaggagcttcgagaatggaatgccagctgaaaaggggctctgtggacaggatgagaggcctggaccccagcacgccagcccaagtgatcgctcccagcgagacgccgtcaagcagctctgtagtaaagaagagaagaaaaaggaggagaaagtcacagctggacagcctgaagagagatgacaacatgaacacatctgaggatgaggacatgttccccatcgagatgagctcggatgaggccatggagctgctggagagcagcagaactcttcctaatgatatacctccattccaagatgatattcctgaggaaaacctctccctggctgtgatttaccctcagtcagcctcataccctaattcggatagagagtggtcacccactcccagtccttccggttcccgaccttcaacacctaaaagtgattcagaattggtcagcaagtccacggaaaggacagggcagaagaacccagaaatgctttggctgtggggagagctgccgcaggctgctaagtcttcttctccacacaagatgaaagagtccagcccattgagcagtagaaaaatttgtgataaaagtcactttcaggccattcacagcgaatcttcagacacttttagtgaccaatcgccaactctggtcggtggggcacttttggaccagaacaagcctcagacagaaatgcagtttgtgaatgaagaagacctggagaccttaggagcagcagcgccactcttgcccatgatcgaggagctcaaacccccctctgccagtgtagtccagacagcaaacaagacggattctccttccaggaaaagagataaacgaagccgacatcttggtgctgacggcgtctacttggatgacctcacagacatggatcctgaagtggcggccctgtattttcccaaaaacggagatccttccggactcgcaaaacatgcaagcgacaacggagcccggtcagccaaccagtccccgcagtcggtgggcagctcgggcgtggacagtggcgtggagagcacctcggacgggctgagggacctcccttccatcgccatctccctctgcgggggcctcagcgaccaccgggagatcacgaaagatgcattcctggagcaagctgtgtcatatcaacagtttgtggacaaccccgctattatcgatgaccccaatctcgtggtaaagattgggagtaaatattataactggacaacagcagcacccctcctcctggcaatgcaggccttccagaaacctttgccaaaggccactgtggaatctatcatgagggataaaatgcccaaaaagggaggaagatggtggttttcatggaggggaagaaacaccacaatcaaggaggaaagtaagccagagcagtgcttggctggcaaggcccatagcaccggagagcaaccgccgcagctcagcttggccaccagggtaaagcatgaatcatcctccagtgatgaggagcgcgcagctgccaagccatcaaacgcaggccacctccctcttctgcctaatgtcagctacaagaagactctccggctgacttccgagcagcttaaaagcttgaagttgaagaatggccccaacgacgtggttttcagtgtcaccacgcagtaccaaggcacgtgccgctgtgagggcaccatctatctgtggaactgggatgataaagtcatcatttctgatattgatgggacaattaccagatcagatactcttggccacattttgcccacccttgggaaggattggacccatcagggcatcgctaagctgtaccataaagtgagccagaatggatataaatttctctactgttctgcccgtgccatcgggatggcggacatgacgcggggctacctgcactgggtcaacgagaggggcacggtgctgccccaggggcccctgctgctgagtcccagcagcctcttctctgccctgcacagagaagtgattgaaaagaagccagaaaagtttaaagtccagtgtttgacagacatcaaaaacctgtttttccccaacacagaacccttttatgctgcttttggaaaccgaccagctgatgtgtattcatacaagcaagtaggagtgtctttgaatagaatatttaccgtcaaccctaaaggagagctggtacaggaacatgcaaagaccaacatctcttcgtatgtgagactctgtgaagtagtcgaccacgttttcccgttgctgaaaagaagccattcttcagactttccctgttcggataccttcagtaacttcaccttttggagagagccactgccaccttttgaaaaccaggacattcattctgcctcagcgtaaaatgtcccaagcagcctcttgccagcagtgcagagcctggttgtcacccattaaaggataggtctccccggagtgcacagctccacctgggagcctggcgcgtcatcattggcctgacagcagagagaattgagaagcatttctcccctgccccaccccggggctgacatttctaagcaagataggaagggagcactttctaggctaggagttgggtgcatttgtaccgtgaaaagcattcctcagttgtggcttaatgccagttacgacgctgcctttccggcctgctccagcaagtagctactggttcacgtgcagtttggggctgtgaaacctaggcagaaggcggctgtctgagggctgtccccgcctaggacagggtcaatcgaggaatgccagatgtgcacggtttttggcaaagtagggggcacatttccattatagcaatgttagtgccaccaccttctgaacacagtggggagggctgtgaaggctcatgtgacctggatctgaggtctctgatagaaatctggacgccaccgggtccaggcctggcctcagacttggccttgtggatgggccccttacagtatttgctgactagtctcatttttaggtgataagtttttctttaattcctttggttaaagatagtctatttcattggcatatctccccccagtttttgtggctcaaggctggaatatttatgccttaatatatctatggcagacatttaagaatgcgctttatctagctcatggtaactttgcaacgccttagattaaaatgacagtaaatattactaaggcagtattttgaatgagtttgacactgccggcttccttccatccagcgaggtggtgctgacagtgtggacttgagcacacttatgccaaatgataatgatactgacttctgttgggagctctccaaagaaactggttggttttaagaaaatagtttcaagaagttcaactatattcttttagatattatgtattgttttactctgattaggttactgtgataggcatttattcatattctttctataccactgtcattaatatattaaaaagatgtatgtgttagactatcgaaagggccttattctctctttctcatagactgaccttcttttggaatttctgagtcatttattttccttagctttttccactcaaattaagggcaagcgaaaaagtaataatttggcattctttaagcctacagaatgtgattctttcacttgtttattacactggctcgtggacagaacaatttgaaaagtgaaagaattattttggtaaaagattttgctttacttttcgaagcattatttttttaaagagtgttttactccaacgattgaaacattttcctatttaaatttcattgttagaatcacaggaggcaaaaaatggaacggttgaatgaaattttactctttctgtgaaagaaaatccacagagttgttgcctccgttgtagttggtgggccccgttagcattggatgcctttgccaaatggttcatgtggacacacaaaggcaaacagatctgccatcgatcgcagatttctgtagaaacacggatgtgcatgtgcagattcccttttgcaggtattaaaaataattaaaaatagtcctgcctgaggttgcagtgagccgagcttgcactactgcactccagcctgggtgacagagtaagactccatgtcaaaaaaaaaaaaaaaaaaaaaaagtcctgccttaactaactcctctgcgcttgttcactagtaacctaaagaggctatattcattctttatgcaatgagggtatttttgagtgaattttaactgctctgaactaagtataagctcatgggcctgcaaaggttcagacggtttctcctttgcacccaggaggaactttggctgcgagaatggggggatgtatccctcatgcagttggcatccaggcagccctctgcagcagcacaccctgcaggcggagttttcagaggatgcaattttggatcccgaattttgatgtaccttaaacttccacatcactgcaccctgaaacagagcatgctttccagaaagtcacactctcagatctgtgtcaagttcaatgtgagccctggcaaggctggcatattaacacctgccttctggcttctgaaagtgagatttgtatatgggctgcactcacgcatatacgagttggtttatctttgtgtacatgactataacccagtgatgctgaggtcatgtgctggaatgctgtatttggaccacacatttcaaagttgccctatggaaatgaatcctacttagtgacaagtcatcaaatgtttgtcacatgtgatgaagacaaatatgtatacctggcatagagaaaaatatatacctggtacattggagaaaaataattacactttcaaagagaattccctttgcaattttatgtttggatcaccactgtaagcacactttatttgcatttgatctgtatttgtatatgctgatgcaatgataaaaatcactgtaatacttcattgtgttgtactggatgcaaagctagaaaatattgcaataaatgagaccgatgaaagac

SEQ ID NO: 464027 - DNA, 5601 bp, Homo sapiens
ccatgcgcagggcatggatgaaagcaagctggagagggagagaggatgggaggcgaggaggcagcctgagggaaggaacaggagggaagagagatgaagggcaagaccggggccagccatgcctgtcctaacagcagccacccagcagtggcccagcctgctgagaactagaaaatcagaagaaaaaggagaatccaccaggagacccaggttcgcatgagcaggggcctttatctgaagttaatggaagctgagccaggtcctgacaatgtgccttctgatggggagatgagactttcctctgaaagctaaggtgcagaccatgaattacgtggggcagttagccggccaggtgtttgtcaccgtgaaggagctctacaaggggctgaatcccgccacactctcagggtgcattgacatcattgtcatccgccagcccaatggaaacctccaatgctcccctttccacgtccgctttgggaagatgggggtcctgcgctcccgagagaaagtggttgacatagaaatcaatggggaatctgtggatttgcatatgaaattgggagataatggagaagcattttttgttcaagaaacagataatgatcaggaagttatccctatgcacctggccacctcccccatcctgtcagaaggagcttcgagaatggaatgccagctgaaaaggggctctgtggacaggatgagaggcctggaccccagcacgccagcccaagtgatcgctcccagcgagacgccgtcaagcagctctgtagtaaagaagagaagaaaaaggaggagaaagtcacagctggacagcctgaagagagatgacaacatgaacacatctgaggatgaggacatgttccccatcgagatgagctcggatgaggccatggagctgctggagagcagcagaactcttcctaatgatatacctccattccaagatgatattcctgaggaaaacctctccctggctgtgatttaccctcagtcagcctcataccctaattcggatagagagtggtcacccactcccagtccttccggttcccgaccttcaacacctaaaagtgattcagaattggtcagcaagtccacggaaaggacagggcagaagaacccagaaatgctttggctgtggggagagctgccgcaggctgctaagtcttcttctccacacaagatgaaagagtccagcccattgagcagtagaaaaatttgtgataaaagtcactttcaggccattcacagcgaatcttcagacacttttagtgaccaatcgccaactctggtcggtggggcacttttggaccagaacaagcctcagacagaaatgcagtttgtgaatgaagaagacctggagaccttaggagcagcagcgccactcttgcccatgatcgaggagctcaaacccccctctgccagtgtagtccagacagcaaacaagacggattctccttccaggaaaagagataaacgaagccgacatcttggtgctgacggcgtctacttggatgacctcacagacatggatcctgaagtggcggccctgtattttcccaaaaacggagatccttccggactcgcaaaacatgcaagcgacaacggagcccggtcagccaaccagtccccgcagtcggtgggcagctcgggcgtggacagtggcgtggagagcacctcggacgggctgagggacctcccttccatcgccatctccctctgcgggggcctcagcgaccaccgggagatcacgaaagatgcattcctggagcaagctgtgtcatatcaacagtttgtggacaaccccgctattatcgatgaccccaatctcgtggtaaagattgggagtaaatattataactggacaacagcagcacccctcctcctggcaatgcaggccttccagaaacctttgccaaaggccactgtggaatctatcatgagggataaaatgcccaaaaagggaggaagatggtggttttcatggaggggaagaaacaccacaatcaaggaggaaagtaagccagagcagtgcttggctggcaaggcccatagcaccggagagcaaccgccgcagctcagcttggccaccagggtaaagcatgaatcatcctccagtgatgaggagcgcgcagctgccaagccatcaaacgcaggccacctccctcttctgcctaatgtcagctacaagaagactctccggctgacttccgagcagcttaaaagcttgaagttgaagaatggccccaacgacgtggttttcagtgtcaccacgcagtaccaaggcacgtgccgctgtgagggcaccatctatctgtggaactgggatgataaagtcatcatttctgatattgatgggacaattaccagatcagatactcttggccacattttgcccacccttgggaaggattggacccatcagggcatcgctaagctgtaccataaagtgagccagaatggatataaatttctctactgttctgcccgtgccatcgggatggcggacatgacgcggggctacctgcactgggtcaacgagaggggcacggtgctgccccaggggcccctgctgctgagtcccagcagcctcttctctgccctgcacagagaagtgattgaaaagaagccagaaaagtttaaagtccagtgtttgacagacatcaaaaacctgtttttccccaacacagaacccttttatgctgcttttggaaaccgaccagctgatgtgtattcatacaagcaagtaggagtgtctttgaatagaatatttaccgtcaaccctaaaggagagctggtacaggaacatgcaaagaccaacatctcttcgtatgtgagactctgtgaagtagtcgaccacgttttcccgttgctgaaaagaagccattcttcagactttccctgttcggataccttcagtaacttcaccttttggagagagccactgccaccttttgaaaaccaggacattcattctgcctcagcgtaaaatgtcccaagcagcctcttgccagcagtgcagagcctggttgtcacccattaaaggataggtctccccggagtgcacagctccacctgggagcctggcgcgtcatcattggcctgacagcagagagaattgagaagcatttctcccctgccccaccccggggctgacatttctaagcaagataggaagggagcactttctaggctaggagttgggtgcatttgtaccgtgaaaagcattcctcagttgtggcttaatgccagttacgacgctgcctttccggcctgctccagcaagtagctactggttcacgtgcagtttggggctgtgaaacctaggcagaaggcggctgtctgagggctgtccccgcctaggacagggtcaatcgaggaatgccagatgtgcacggtttttggcaaagtagggggcacatttccattatagcaatgttagtgccaccaccttctgaacacagtggggagggctgtgaaggctcatgtgacctggatctgaggtctctgatagaaatctggacgccaccgggtccaggcctggcctcagacttggccttgtggatgggccccttacagtatttgctgactagtctcatttttaggtgataagtttttctttaattcctttggttaaagatagtctatttcattggcatatctccccccagtttttgtggctcaaggctggaatatttatgccttaatatatctatggcagacatttaagaatgcgctttatctagctcatggtaactttgcaacgccttagattaaaatgacagtaaatattactaaggcagtattttgaatgagtttgacactgccggcttccttccatccagcgaggtggtgctgacagtgtggacttgagcacacttatgccaaatgataatgatactgacttctgttgggagctctccaaagaaactggttggttttaagaaaatagtttcaagaagttcaactatattcttttagatattatgtattgttttactctgattaggttactgtgataggcatttattcatattctttctataccactgtcattaatatattaaaaagatgtatgtgttagactatcgaaagggccttattctctctttctcatagactgaccttcttttggaatttctgagtcatttattttccttagctttttccactcaaattaagggcaagcgaaaaagtaataatttggcattctttaagcctacagaatgtgattctttcacttgtttattacactggctcgtggacagaacaatttgaaaagtgaaagaattattttggtaaaagattttgctttacttttcgaagcattatttttttaaagagtgttttactccaacgattgaaacattttcctatttaaatttcattgttagaatcacaggaggcaaaaaatggaacggttgaatgaaattttactctttctgtgaaagaaaatccacagagttgttgcctccgttgtagttggtgggccccgttagcattggatgcctttgccaaatggttcatgtggacacacaaaggcaaacagatctgccatcgatcgcagatttctgtagaaacacggatgtgcatgtgcagattcccttttgcaggtattaaaaataattaaaaatagtcctgcctgaggttgcagtgagccgagcttgcactactgcactccagcctgggtgacagagtaagactccatgtcaaaaaaaaaaaaaaaaaaaaaaagtcctgccttaactaactcctctgcgcttgttcactagtaacctaaagaggctatattcattctttatgcaatgagggtatttttgagtgaattttaactgctctgaactaagtataagctcatgggcctgcaaaggttcagacggtttctcctttgcacccaggaggaactttggctgcgagaatggggggatgtatccctcatgcagttggcatccaggcagccctctgcagcagcacaccctgcaggcggagttttcagaggatgcaattttggatcccgaattttgatgtaccttaaacttccacatcactgcaccctgaaacagagcatgctttccagaaagtcacactctcagatctgtgtcaagttcaatgtgagccctggcaaggctggcatattaacacctgccttctggcttctgaaagtgagatttgtatatgggctgcactcacgcatatacgagttggtttatctttgtgtacatgactataacccagtgatgctgaggtcatgtgctggaatgctgtatttggaccacacatttcaaagttgccctatggaaatgaatcctacttagtgacaagtcatcaaatgtttgtcacatgtgatgaagacaaatatgtatacctggcatagagaaaaatatatacctggtacattggagaaaaataattacactttcaaagagaattccctttgcaattttatgtttggatcaccactgtaagcacactttatttgcatttgatctgtatttgtatatgctgatgcaatgataaaaatcactgtaatacttcattgtgttgtactggatgcaaagctagaaaatattgcaataaatgagaccgatgaaagac

SEQ ID NO: 464028 - DNA, 5627 bp, Homo sapiens
ccatgcgcagggcatggatgaaagcaagctggagagggagagaggatgggaggcgaggaggcagcctgagggaaggaacaggagggaagagagatgaagggcaagaccggggccagccatgcctgtcctaacagcagccacccagcagtggcccagcctgctgagaactagaaaatcagaagaaaaaggagaatccaccaggagacccaggttcgcatgagcaggggcctttatctgaagttaatggaagctgagccaggtcctgacaatgtgccttctgatggggagatgagactttcctctgaaagctaaggtaactctgaagcgtgagctgccagaattcaaggccacctgcttaacagaagacaactagaaacctcatccatgagcagagtgcagaccatgaattacgtggggcagttagccggccaggtgtttgtcaccgtgaaggagctctacaaggggctgaatcccgccacactctcagggtgcattgacatcattgtcatccgccagcccaatggaaacctccaatgctcccctttccacgtccgctttgggaagatgggggtcctgcgctcccgagagaaagtggttgacatagaaatcaatggggaatctgtggatttgcatatgaaattgggagataatggagaagcattttttgttcaagaaacagataatgatcaggaagttatccctatgcacctggccacctcccccatcctgtcagaaggagcttcgagaatggaatgccagctgaaaaggggctctgtggacaggatgagaggcctggaccccagcacgccagcccaagtgatcgctcccagcgagacgccgtcaagcagctctgtagtaaagaagagaagaaaaaggaggagaaagtcacagctggacagcctgaagagagatgacaacatgaacacatctgaggatgaggacatgttccccatcgagatgagctcggatgaggccatggagctgctggagagcagcagaactcttcctaatgatatacctccattccaagatgatattcctgaggaaaacctctccctggctgtgatttaccctcagtcagcctcataccctaattcggatagagagtggtcacccactcccagtccttccggttcccgaccttcaacacctaaaagtgattcagaattggtcagcaagtccacggaaaggacagggcagaagaacccagaaatgctttggctgtggggagagctgccgcaggctgctaagtcttcttctccacacaagatgaaagagtccagcccattgagcagtagaaaaatttgtgataaaagtcactttcaggccattcacagcgaatcttcagacacttttagtgaccaatcgccaactctggtcggtggggcacttttggaccagaacaagcctcagacagaaatgcagtttgtgaatgaagaagacctggagaccttaggagcagcagcgccactcttgcccatgatcgaggagctcaaacccccctctgccagtgtagtccagacagcaaacaagacggattctccttccaggaaaagagataaacgaagccgacatcttggtgctgacggcgtctacttggatgacctcacagacatggatcctgaagtggcggccctgtattttcccaaaaacggagatccttccggactcgcaaaacatgcaagcgacaacggagcccggtcagccaaccagtccccgcagtcggtgggcagctcgggcgtggacagtggcgtggagagcacctcggacgggctgagggacctcccttccatcgccatctccctctgcgggggcctcagcgaccaccgggagatcacgaaagatgcattcctggagcaagctgtgtcatatcaacagtttgtggacaaccccgctattatcgatgaccccaatctcgtggtaaagattgggagtaaatattataactggacaacagcagcacccctcctcctggcaatgcaggccttccagaaacctttgccaaaggccactgtggaatctatcatgagggataaaatgcccaaagaaagtaagccagagcagtgcttggctggcaaggcccatagcaccggagagcaaccgccgcagctcagcttggccaccagggtaaagcatgaatcatcctccagtgatgaggagcgcgcagctgccaagccatcaaacgcaggccacctccctcttctgcctaatgtcagctacaagaagactctccggctgacttccgagcagcttaaaagcttgaagttgaagaatggccccaacgacgtggttttcagtgtcaccacgcagtaccaaggcacgtgccgctgtgagggcaccatctatctgtggaactgggatgataaagtcatcatttctgatattgatgggacaattaccagatcagatactcttggccacattttgcccacccttgggaaggattggacccatcagggcatcgctaagctgtaccataaagtgagccagaatggatataaatttctctactgttctgcccgtgccatcgggatggcggacatgacgcggggctacctgcactgggtcaacgagaggggcacggtgctgccccaggggcccctgctgctgagtcccagcagcctcttctctgccctgcacagagaagtgattgaaaagaagccagaaaagtttaaagtccagtgtttgacagacatcaaaaacctgtttttccccaacacagaacccttttatgctgcttttggaaaccgaccagctgatgtgtattcatacaagcaagtaggagtgtctttgaatagaatatttaccgtcaaccctaaaggagagctggtacaggaacatgcaaagaccaacatctcttcgtatgtgagactctgtgaagtagtcgaccacgttttcccgttgctgaaaagaagccattcttcagactttccctgttcggataccttcagtaacttcaccttttggagagagccactgccaccttttgaaaaccaggacattcattctgcctcagcgtaaaatgtcccaagcagcctcttgccagcagtgcagagcctggttgtcacccattaaaggataggtctccccggagtgcacagctccacctgggagcctggcgcgtcatcattggcctgacagcagagagaattgagaagcatttctcccctgccccaccccggggctgacatttctaagcaagataggaagggagcactttctaggctaggagttgggtgcatttgtaccgtgaaaagcattcctcagttgtggcttaatgccagttacgacgctgcctttccggcctgctccagcaagtagctactggttcacgtgcagtttggggctgtgaaacctaggcagaaggcggctgtctgagggctgtccccgcctaggacagggtcaatcgaggaatgccagatgtgcacggtttttggcaaagtagggggcacatttccattatagcaatgttagtgccaccaccttctgaacacagtggggagggctgtgaaggctcatgtgacctggatctgaggtctctgatagaaatctggacgccaccgggtccaggcctggcctcagacttggccttgtggatgggccccttacagtatttgctgactagtctcatttttaggtgataagtttttctttaattcctttggttaaagatagtctatttcattggcatatctccccccagtttttgtggctcaaggctggaatatttatgccttaatatatctatggcagacatttaagaatgcgctttatctagctcatggtaactttgcaacgccttagattaaaatgacagtaaatattactaaggcagtattttgaatgagtttgacactgccggcttccttccatccagcgaggtggtgctgacagtgtggacttgagcacacttatgccaaatgataatgatactgacttctgttgggagctctccaaagaaactggttggttttaagaaaatagtttcaagaagttcaactatattcttttagatattatgtattgttttactctgattaggttactgtgataggcatttattcatattctttctataccactgtcattaatatattaaaaagatgtatgtgttagactatcgaaagggccttattctctctttctcatagactgaccttcttttggaatttctgagtcatttattttccttagctttttccactcaaattaagggcaagcgaaaaagtaataatttggcattctttaagcctacagaatgtgattctttcacttgtttattacactggctcgtggacagaacaatttgaaaagtgaaagaattattttggtaaaagattttgctttacttttcgaagcattatttttttaaagagtgttttactccaacgattgaaacattttcctatttaaatttcattgttagaatcacaggaggcaaaaaatggaacggttgaatgaaattttactctttctgtgaaagaaaatccacagagttgttgcctccgttgtagttggtgggccccgttagcattggatgcctttgccaaatggttcatgtggacacacaaaggcaaacagatctgccatcgatcgcagatttctgtagaaacacggatgtgcatgtgcagattcccttttgcaggtattaaaaataattaaaaatagtcctgcctgaggttgcagtgagccgagcttgcactactgcactccagcctgggtgacagagtaagactccatgtcaaaaaaaaaaaaaaaaaaaaaaagtcctgccttaactaactcctctgcgcttgttcactagtaacctaaagaggctatattcattctttatgcaatgagggtatttttgagtgaattttaactgctctgaactaagtataagctcatgggcctgcaaaggttcagacggtttctcctttgcacccaggaggaactttggctgcgagaatggggggatgtatccctcatgcagttggcatccaggcagccctctgcagcagcacaccctgcaggcggagttttcagaggatgcaattttggatcccgaattttgatgtaccttaaacttccacatcactgcaccctgaaacagagcatgctttccagaaagtcacactctcagatctgtgtcaagttcaatgtgagccctggcaaggctggcatattaacacctgccttctggcttctgaaagtgagatttgtatatgggctgcactcacgcatatacgagttggtttatctttgtgtacatgactataacccagtgatgctgaggtcatgtgctggaatgctgtatttggaccacacatttcaaagttgccctatggaaatgaatcctacttagtgacaagtcatcaaatgtttgtcacatgtgatgaagacaaatatgtatacctggcatagagaaaaatatatacctggtacattggagaaaaataattacactttcaaagagaattccctttgcaattttatgtttggatcaccactgtaagcacactttatttgcatttgatctgtatttgtatatgctgatgcaatgataaaaatcactgtaatacttcattgtgttgtactggatgcaaagctagaaaatattgcaataaatgagaccgatgaaagac

SEQ ID NO: 464029 - DNA, 4953 bp, Homo sapiens
ctcctgtcagggctgcgcgcaataatcgctggacctgggaggtggaggttgcagggtagctgcgattcttgctgctgcactccagccctggtgccagagccatagcgtgtttacccacaccgaggagaacgagaacacgaatggcggagatcattcatcatctgctttcctcctgtgtagagatgacaacatgaacacatctgaggatgaggacatgttccccatcgagatgagctcggatgaggccatggagctgctggagagcagcagaactcttcctaatgatatacctccattccaagatgatattcctgaggaaaacctctccctggctgtgatttaccctcagtcagcctcataccctaattcggatagagagtggtcacccactcccagtccttccggttcccgaccttcaacacctaaaagtgattcagaattggtcagcaagtccacggaaaggacagggcagaagaacccagaaatgctttggctgtggggagagctgccgcaggctgctaagtcttcttctccacacaagatgaaagagtccagcccattgagcagtagaaaaatttgtgataaaagtcactttcaggccattcacagcgaatcttcagacacttttagtgaccaatcgccaactctggtcggtggggcacttttggaccagaacaagcctcagacagaaatgcagtttgtgaatgaagaagacctggagaccttaggagcagcagcgccactcttgcccatgatcgaggagctcaaacccccctctgccagtgtagtccagacagcaaacaagacggattctccttccaggaaaagagataaacgaagccgacatcttggtgctgacggcgtctacttggatgacctcacagacatggatcctgaagtggcggccctgtattttcccaaaaacggagatccttccggactcgcaaaacatgcaagcgacaacggagcccggtcagccaaccagtccccgcagtcggtgggcagctcgggcgtggacagtggcgtggagagcacctcggacgggctgagggacctcccttccatcgccatctccctctgcgggggcctcagcgaccaccgggagatcacgaaagatgcattcctggagcaagctgtgtcatatcaacagtttgtggacaaccccgctattatcgatgaccccaatctcgtggtaaagattgggagtaaatattataactggacaacagcagcacccctcctcctggcaatgcaggccttccagaaacctttgccaaaggccactgtggaatctatcatgagggataaaatgcccaaaaagggaggaagatggtggttttcatggaggggaagaaacaccacaatcaaggaggaaagtaagccagagcagtgcttggctggcaaggcccatagcaccggagagcaaccgccgcagctcagcttggccaccagggtaaagcatgaatcatcctccagtgatgaggagcgcgcagctgccaagccatcaaacgcaggccacctccctcttctgcctaatgtcagctacaagaagactctccggctgacttccgagcagcttaaaagcttgaagttgaagaatggccccaacgacgtggttttcagtgtcaccacgcagtaccaaggcacgtgccgctgtgagggcaccatctatctgtggaactgggatgataaagtcatcatttctgatattgatgggacaattaccagatcagatactcttggccacattttgcccacccttgggaaggattggacccatcagggcatcgctaagctgtaccataaagtgagccagaatggatataaatttctctactgttctgcccgtgccatcgggatggcggacatgacgcggggctacctgcactgggtcaacgagaggggcacggtgctgccccaggggcccctgctgctgagtcccagcagcctcttctctgccctgcacagagaagtgattgaaaagaagccagaaaagtttaaagtccagtgtttgacagacatcaaaaacctgtttttccccaacacagaacccttttatgctgcttttggaaaccgaccagctgatgtgtattcatacaagcaagtaggagtgtctttgaatagaatatttaccgtcaaccctaaaggagagctggtacaggaacatgcaaagaccaacatctcttcgtatgtgagactctgtgaagtagtcgaccacgttttcccgttgctgaaaagaagccattcttcagactttccctgttcggataccttcagtaacttcaccttttggagagagccactgccaccttttgaaaaccaggacattcattctgcctcagcgtaaaatgtcccaagcagcctcttgccagcagtgcagagcctggttgtcacccattaaaggataggtctccccggagtgcacagctccacctgggagcctggcgcgtcatcattggcctgacagcagagagaattgagaagcatttctcccctgccccaccccggggctgacatttctaagcaagataggaagggagcactttctaggctaggagttgggtgcatttgtaccgtgaaaagcattcctcagttgtggcttaatgccagttacgacgctgcctttccggcctgctccagcaagtagctactggttcacgtgcagtttggggctgtgaaacctaggcagaaggcggctgtctgagggctgtccccgcctaggacagggtcaatcgaggaatgccagatgtgcacggtttttggcaaagtagggggcacatttccattatagcaatgttagtgccaccaccttctgaacacagtggggagggctgtgaaggctcatgtgacctggatctgaggtctctgatagaaatctggacgccaccgggtccaggcctggcctcagacttggccttgtggatgggccccttacagtatttgctgactagtctcatttttaggtgataagtttttctttaattcctttggttaaagatagtctatttcattggcatatctccccccagtttttgtggctcaaggctggaatatttatgccttaatatatctatggcagacatttaagaatgcgctttatctagctcatggtaactttgcaacgccttagattaaaatgacagtaaatattactaaggcagtattttgaatgagtttgacactgccggcttccttccatccagcgaggtggtgctgacagtgtggacttgagcacacttatgccaaatgataatgatactgacttctgttgggagctctccaaagaaactggttggttttaagaaaatagtttcaagaagttcaactatattcttttagatattatgtattgttttactctgattaggttactgtgataggcatttattcatattctttctataccactgtcattaatatattaaaaagatgtatgtgttagactatcgaaagggccttattctctctttctcatagactgaccttcttttggaatttctgagtcatttattttccttagctttttccactcaaattaagggcaagcgaaaaagtaataatttggcattctttaagcctacagaatgtgattctttcacttgtttattacactggctcgtggacagaacaatttgaaaagtgaaagaattattttggtaaaagattttgctttacttttcgaagcattatttttttaaagagtgttttactccaacgattgaaacattttcctatttaaatttcattgttagaatcacaggaggcaaaaaatggaacggttgaatgaaattttactctttctgtgaaagaaaatccacagagttgttgcctccgttgtagttggtgggccccgttagcattggatgcctttgccaaatggttcatgtggacacacaaaggcaaacagatctgccatcgatcgcagatttctgtagaaacacggatgtgcatgtgcagattcccttttgcaggtattaaaaataattaaaaatagtcctgcctgaggttgcagtgagccgagcttgcactactgcactccagcctgggtgacagagtaagactccatgtcaaaaaaaaaaaaaaaaaaaaaaagtcctgccttaactaactcctctgcgcttgttcactagtaacctaaagaggctatattcattctttatgcaatgagggtatttttgagtgaattttaactgctctgaactaagtataagctcatgggcctgcaaaggttcagacggtttctcctttgcacccaggaggaactttggctgcgagaatggggggatgtatccctcatgcagttggcatccaggcagccctctgcagcagcacaccctgcaggcggagttttcagaggatgcaattttggatcccgaattttgatgtaccttaaacttccacatcactgcaccctgaaacagagcatgctttccagaaagtcacactctcagatctgtgtcaagttcaatgtgagccctggcaaggctggcatattaacacctgccttctggcttctgaaagtgagatttgtatatgggctgcactcacgcatatacgagttggtttatctttgtgtacatgactataacccagtgatgctgaggtcatgtgctggaatgctgtatttggaccacacatttcaaagttgccctatggaaatgaatcctacttagtgacaagtcatcaaatgtttgtcacatgtgatgaagacaaatatgtatacctggcatagagaaaaatatatacctggtacattggagaaaaataattacactttcaaagagaattccctttgcaattttatgtttggatcaccactgtaagcacactttatttgcatttgatctgtatttgtatatgctgatgcaatgataaaaatcactgtaatacttcattgtgttgtactggatgcaaagctagaaaatattgcaataaatgagaccgatgaaagac

SEQ ID NO: 464030 - DNA, 5683 bp, Homo sapiens
ccatgcgcagggcatggatgaaagcaagctggagagggagagaggatgggaggcgaggaggcagcctgagggaaggaacaggagggaagagagatgaagggcaagaccggggccagccatgcctgtcctaacagcagccacccagcagtggcccagcctgctgagaactagaaaatcagaagaaaaaggagaatccaccaggagacccaggttcgcatgagcaggggcctttatctgaagttaatggaagctgagccaggtcctgacaatgtgccttctgatggggagatgagactttcctctgaaagctaaggtaactctgaagcgtgagctgccagaattcaaggccacctgcttaacagaagacaactagaaacctcatccatgagcagagtgcagaccatgaattacgtggggcagttagccggccaggtgtttgtcaccgtgaaggagctctacaaggggctgaatcccgccacactctcagggtgcattgacatcattgtcatccgccagcccaatggaaacctccaatgctcccctttccacgtccgctttgggaagatgggggtcctgcgctcccgagagaaagtggttgacatagaaatcaatggggaatctgtggatttgcatatgaaattgggagataatggagaagcattttttgttcaagaaacagataatgatcaggaagttatccctatgcacctggccacctcccccatcctgtcagaaggagcttcgagaatggaatgccagctgaaaaggggctctgtggacaggatgagaggcctggaccccagcacgccagcccaagtgatcgctcccagcgagacgccgtcaagcagctctgtagtaaagaagagaagaaaaaggaggagaaagtcacagctggacagcctgaagagagatgacaacatgaacacatctgaggatgaggacatgttccccatcgagatgagctcggatgaggccatggagctgctggagagcagcagaactcttcctaatgatatacctccattccaagatgatattcctgaggaaaacctctccctggctgtgatttaccctcagtcagcctcataccctaattcggatagagagtggtcacccactcccagtccttccggttcccgaccttcaacacctaaaagtgattcagaattggtcagcaagtccacggaaaggacagggcagaagaacccagaaatgctttggctgtggggagagctgccgcaggctgctaagtcttcttctccacacaagatgaaagagtccagcccattgagcagtagaaaaatttgtgataaaagtcactttcaggccattcacagcgaatcttcagacacttttagtgaccaatcgccaactctggtcggtggggcacttttggaccagaacaagcctcagacagaaatgcagtttgtgaatgaagaagacctggagaccttaggagcagcagcgccactcttgcccatgatcgaggagctcaaacccccctctgccagtgtagtccagacagcaaacaagacggattctccttccaggaaaagagataaacgaagccgacatcttggtgctgacggcgtctacttggatgacctcacagacatggatcctgaagtggcggccctgtattttcccaaaaacggagatccttccggactcgcaaaacatgcaagcgacaacggagcccggtcagccaaccagtccccgcagtcggtgggcagctcgggcgtggacagtggcgtggagagcacctcggacgggctgagggacctcccttccatcgccatctccctctgcgggggcctcagcgaccaccgggagatcacgaaagatgcattcctggagcaagctgtgtcatatcaacagtttgtggacaaccccgctattatcgatgaccccaatctcgtggtaaagattgggagtaaatattataactggacaacagcagcacccctcctcctggcaatgcaggccttccagaaacctttgccaaaggccactgtggaatctatcatgagggataaaatgcccaaaaagggaggaagatggtggttttcatggaggggaagaaacaccacaatcaaggaggaaagtaagccagagcagtgcttggctggcaaggcccatagcaccggagagcaaccgccgcagctcagcttggccaccagggtaaagcatgaatcatcctccagtgatgaggagcgcgcagctgccaagccatcaaacgcaggccacctccctcttctgcctaatgtcagctacaagaagactctccggctgacttccgagcagcttaaaagcttgaagttgaagaatggccccaacgacgtggttttcagtgtcaccacgcagtaccaaggcacgtgccgctgtgagggcaccatctatctgtggaactgggatgataaagtcatcatttctgatattgatgggacaattaccagatcagatactcttggccacattttgcccacccttgggaaggattggacccatcagggcatcgctaagctgtaccataaagtgagccagaatggatataaatttctctactgttctgcccgtgccatcgggatggcggacatgacgcggggctacctgcactgggtcaacgagaggggcacggtgctgccccaggggcccctgctgctgagtcccagcagcctcttctctgccctgcacagagaagtgattgaaaagaagccagaaaagtttaaagtccagtgtttgacagacatcaaaaacctgtttttccccaacacagaacccttttatgctgcttttggaaaccgaccagctgatgtgtattcatacaagcaagtaggagtgtctttgaatagaatatttaccgtcaaccctaaaggagagctggtacaggaacatgcaaagaccaacatctcttcgtatgtgagactctgtgaagtagtcgaccacgttttcccgttgctgaaaagaagccattcttcagactttccctgttcggataccttcagtaacttcaccttttggagagagccactgccaccttttgaaaaccaggacattcattctgcctcagcgtaaaatgtcccaagcagcctcttgccagcagtgcagagcctggttgtcacccattaaaggataggtctccccggagtgcacagctccacctgggagcctggcgcgtcatcattggcctgacagcagagagaattgagaagcatttctcccctgccccaccccggggctgacatttctaagcaagataggaagggagcactttctaggctaggagttgggtgcatttgtaccgtgaaaagcattcctcagttgtggcttaatgccagttacgacgctgcctttccggcctgctccagcaagtagctactggttcacgtgcagtttggggctgtgaaacctaggcagaaggcggctgtctgagggctgtccccgcctaggacagggtcaatcgaggaatgccagatgtgcacggtttttggcaaagtagggggcacatttccattatagcaatgttagtgccaccaccttctgaacacagtggggagggctgtgaaggctcatgtgacctggatctgaggtctctgatagaaatctggacgccaccgggtccaggcctggcctcagacttggccttgtggatgggccccttacagtatttgctgactagtctcatttttaggtgataagtttttctttaattcctttggttaaagatagtctatttcattggcatatctccccccagtttttgtggctcaaggctggaatatttatgccttaatatatctatggcagacatttaagaatgcgctttatctagctcatggtaactttgcaacgccttagattaaaatgacagtaaatattactaaggcagtattttgaatgagtttgacactgccggcttccttccatccagcgaggtggtgctgacagtgtggacttgagcacacttatgccaaatgataatgatactgacttctgttgggagctctccaaagaaactggttggttttaagaaaatagtttcaagaagttcaactatattcttttagatattatgtattgttttactctgattaggttactgtgataggcatttattcatattctttctataccactgtcattaatatattaaaaagatgtatgtgttagactatcgaaagggccttattctctctttctcatagactgaccttcttttggaatttctgagtcatttattttccttagctttttccactcaaattaagggcaagcgaaaaagtaataatttggcattctttaagcctacagaatgtgattctttcacttgtttattacactggctcgtggacagaacaatttgaaaagtgaaagaattattttggtaaaagattttgctttacttttcgaagcattatttttttaaagagtgttttactccaacgattgaaacattttcctatttaaatttcattgttagaatcacaggaggcaaaaaatggaacggttgaatgaaattttactctttctgtgaaagaaaatccacagagttgttgcctccgttgtagttggtgggccccgttagcattggatgcctttgccaaatggttcatgtggacacacaaaggcaaacagatctgccatcgatcgcagatttctgtagaaacacggatgtgcatgtgcagattcccttttgcaggtattaaaaataattaaaaatagtcctgcctgaggttgcagtgagccgagcttgcactactgcactccagcctgggtgacagagtaagactccatgtcaaaaaaaaaaaaaaaaaaaaaaagtcctgccttaactaactcctctgcgcttgttcactagtaacctaaagaggctatattcattctttatgcaatgagggtatttttgagtgaattttaactgctctgaactaagtataagctcatgggcctgcaaaggttcagacggtttctcctttgcacccaggaggaactttggctgcgagaatggggggatgtatccctcatgcagttggcatccaggcagccctctgcagcagcacaccctgcaggcggagttttcagaggatgcaattttggatcccgaattttgatgtaccttaaacttccacatcactgcaccctgaaacagagcatgctttccagaaagtcacactctcagatctgtgtcaagttcaatgtgagccctggcaaggctggcatattaacacctgccttctggcttctgaaagtgagatttgtatatgggctgcactcacgcatatacgagttggtttatctttgtgtacatgactataacccagtgatgctgaggtcatgtgctggaatgctgtatttggaccacacatttcaaagttgccctatggaaatgaatcctacttagtgacaagtcatcaaatgtttgtcacatgtgatgaagacaaatatgtatacctggcatagagaaaaatatatacctggtacattggagaaaaataattacactttcaaagagaattccctttgcaattttatgtttggatcaccactgtaagcacactttatttgcatttgatctgtatttgtatatgctgatgcaatgataaaaatcactatagtaaaaaaataagttgtcctgggtgaaaaaataaaaaatctagcggtaaaagagaacgctgcaagaggg

SEQ ID NO: 464031 - DNA, 4144 bp, Homo sapiens
ccatgcgcagggcatggatgaaagcaagctggagagggagagaggatgggaggcgaggaggcagcctgagggaaggaacaggagggaagagagatgaagggcaagaccggggccagccatgcctgtcctaacagcagccacccagcagtggcccagcctgctgagaactagaaaatcagaagaaaaaggagaatccaccaggagacccaggttcgcatgagcaggggcctttatctgaagttaatggaagctgagccaggtcctgacaatgtgccttctgatggggagatgagactttcctctgaaagctaaggtaactctgaagcgtgagctgccagaattcaaggccacctgcttaacagaagacaactagaaacctcatccatgagcagagtgcagaccatgaattacgtggggcagttagccggccaggtgtttgtcaccgtgaaggagctctacaaggggctgaatcccgccacactctcagggtgcattgacatcattgtcatccgccagcccaatggaaacctccaatgctcccctttccacgtccgctttgggaagatgggggtcctgcgctcccgagagaaagtggttgacatagaaatcaatggggaatctgtggatttgcatatgaaattgggagataatggagaagcattttttgttcaagaaacagataatgatcaggaagttatccctatgcacctggccacctcccccatcctgtcagaaggagcttcgagaatggaatgccagctgaaaaggggctctgtggacaggatgagaggcctggaccccagcacgccagcccaagtgatcgctcccagcgagacgccgtcaagcagctctgtagtaaagaagagaagaaaaaggaggagaaagtcacagctggacagcctgaagagagatgacaacatgaacacatctgaggatgaggacatgttccccatcgagatgagctcggatgaggccatggagctgctggagagcagcagaactcttcctaatgatatacctccattccaagatgatattcctgaggaaaacctctccctggctgtgatttaccctcagtcagcctcataccctaattcggatagagagtggtcacccactcccagtccttccggttcccgaccttcaacacctaaaagtgattcagaattggtcagcaagtccacggaaaggacagggcagaagaacccagaaatgctttggctgtggggagagctgccgcaggctgctaagtcttcttctccacacaagatgaaagagtccagcccattgagcagtagaaaaatttgtgataaaagtcactttcaggccattcacagcgaatcttcagacacttttagtgaccaatcgccaactctggtcggtggggcacttttggaccagaacaagcctcagacagaaatgcagtttgtgaatgaagaagacctggagaccttaggagcagcagcgccactcttgcccatgatcgaggagctcaaacccccctctgccagtgtagtccagacagcaaacaagacggattctccttccaggaaaagagataaacgaagccgacatcttggtgctgacggcgtctacttggatgacctcacagacatggatcctgaagtggcggccctgtattttcccaaaaacggagatccttccggactcgcaaaacatgcaagcgacaacggagcccggtcagccaaccagtccccgcagtcggtgggcagctcgggcgtggacagtggcgtggagagcacctcggacgggctgagggacctcccttccatcgccatctccctctgcgggggcctcagcgaccaccgggagatcacgaaagatgcattcctggagcaagctgtgtcatatcaacagtttgtggacaaccccgctattatcgatgaccccaatctcgtggtaaagattgggagtaaatattataactggacaacagcagcacccctcctcctggcaatgcaggccttccagaaacctttgccaaaggccactgtggaatctatcatgagggataaaatgcccaaaaagggaggaagatggtggttttcatggaggggaagaaacaccacaatcaaggaggaaagtaagccagagcagtgcttggctggcaaggcccatagcaccggagagcaaccgccgcagctcagcttggccaccagggtaaagcatgaatcatcctccagtgatgaggagcgcgcagctgccaagccatcaaacgcaggccacctccctcttctgcctaatgtcagctacaagaagactctccggctgacttccgagcagcttaaaagcttgaagttgaagaatggccccaacgacgtggttttcagtgtcaccacgcagtaccaaggcacgtgccgctgtgagggcaccatctatctgtggaactgggatgataaagtcatcatttctgatattgatgggacaattaccagatcagatactcttggccacattttgcccacccttgggaaggattggacccatcagggcatcgctaagctgtaccataaagtgagccagaatggatataaatttctctactgttctgcccgtgccatcgggatggcggacatgacgcggggctacctgcactgggtcaacgagaggggcacggtgctgccccaggggcccctgctgctgagtcccagcagcctcttctctgccctgcacagagaagtgattgaaaagaagccagaaaagtttaaagtccagtgtttgacagacatcaaaaacctgtttttccccaacacagaacccttttatgctgcttttggaaaccgaccagctgatgtgtattcatacaagcaagtaggagtgtctttgaatagaatatttaccgtcaaccctaaaggagagctggtacaggaacatgcaaagaccaacatctcttcgtatgtgagactctgtgaagtagtcgaccacgttttcccgttgctgaaaagaagccattcttcagactttccctgttcggataccttcagtaacttcaccttttggagagagccactgccaccttttgaaaaccaggacattcattctgcctcagcgtaaaatgtcccaagcagcctcttgccagcagtgcagagcctggttgtcacccattaaaggataggtctccccggagtgcacagctccacctgggagcctggcgcgtcatcattggcctgacagcagagagaattgagaagcatttctcccctgccccaccccggggctgacatttctaagcaagataggaagggagcactttctaggctaggagttgggtgcatttgtaccgtgaaaagcattcctcagttgtggcttaatgccagttacgacgctgcctttccggcctgctccagcaagtagctactggttcacgtgcagtttggggctgtgaaacctaggcagaaggcggctgtctgagggctgtccccgcctaggacagggtcaatcgaggaatgccagatgtgcacggtttttggcaaagtagggggcacatttccattatagcaatgttagtgccaccaccttctgaacacagtggggagggctgtgaaggctcatgtgacctggatctgaggtctctgatagaaatctggacgccaccgggtccaggcctggcctcagacttggccttgtggatgggccccttacagtatttgctgactagtctcatttttaggtgataagtttttctttaattcctttggttaaagatagtctatttcattggcatatctccccccagtttttgtggctcaaggctggaatatttatgccttaatatatctatggcagacatttaagaatgcgctttatctagctcatggtaactttgcaacgccttagattaaaatgacagtaaatattactaaggcagtattttgaatgagtttgacactgccggcttccttccatccagcgaggtggtgctgacagtgtggacttgagcacacttatgccaaatgataatgatactgacttctgttgggagctctccaaagaaactggttggttttaagaaaatagtttcaagaagttcaactatattcttttagatattatgtattgttttactctgattaggttactgtgataggcatttattcagagtaaaaaaaaacatttgcggccg

SEQ ID NO: 464032 - DNA, 2812 bp, Homo sapiens
ccatgcgcagggcatggatgaaagcaagctggagagggagagaggatgggaggcgaggaggcagcctgagggaaggaacaggagggaagagagatgaagggcaagaccggggccagccatgcctgtcctaacagcagccacccagcagtggcccagcctgctgagaactagaaaatcagaagaaaaaggagaatccaccaggagacccaggttcgcatgagcaggggcctttatctgaagttaatggaagctgagccaggtcctgacaatgtgccttctgatggggagatgagactttcctctgaaagctaaggtaactctgaagcgtgagctgccagaattcaaggccacctgcttaacagaagacaactagaaacctcatccatgagcagagtgcagaccatgaattacgtggggcagttagccggccaggtgtttgtcaccgtgaaggagctctacaaggggctgaatcccgccacactctcagggtgcattgacatcattgtcatccgccagcccaatggaaacctccaatgctcccctttccacgtccgctttgggaagatgggggtcctgcgctcccgagagaaagtggttgacatagaaatcaatggggaatctgtggatttgcatatgaaattgggagataatggagaagcattttttgttcaagaaacagataatgatcaggaagttatccctatgcacctggccacctcccccatcctgtcagaaggagcttcgagaatggaatgccagctgaaaaggggctctgtggacaggatgagaggcctggaccccagcacgccagcccaagtgatcgctcccagcgagacgccgtcaagcagctctgtagtaaagaagagaagaaaaaggaggagaaagtcacagctggacagcctgaagagagatgacaacatgaacacatctgaggatgaggacatgttccccatcgagatgagctcggatgaggccatggagctgctggagagcagcagaactcttcctaatgatatacctccattccaagatgatattcctgaggaaaacctctccctggctgtgatttaccctcagtcagcctcataccctaattcggatagagagtggtcacccactcccagtccttccggttcccgaccttcaacacctaaaagtgattcagaattggtcagcaagtccacggaaaggacagggcagaagaacccagaaatgctttggctgtggggagagctgccgcaggctgctaagtcttcttctccacacaagatgaaagagtccagcccattgagcagtagaaaaatttgtgataaaagtcactttcaggccattcacagcgaatcttcagacacttttagtgaccaatcgccaactctggtcggtggggcacttttggaccagaacaagcctcagacagaaatgcagtttgtgaatgaagaagacctggagaccttaggagcagcagcgccactcttgcccatgatcgaggagctcaaacccccctctgccagtgtagtccagacagcaaacaagacggattctccttccaggaaaagagataaacgaagccgacatcttggtgctgacggcgtctacttggatgacctcacagacatggatcctgaagtggcggccctgtattttcccaaaaacggagatccttccggactcgcaaaacatgcaagcgacaacggagcccggtcagccaaccagtccccgcagtcggtgggcagctcgggcgtggacagtggcgtggagagcacctcggacgggctgagggacctcccttccatcgccatctccctctgcgggggcctcagcgaccaccgggagatcacgaaagatgcattcctggagcaagctgtgtcatatcaacagtttgtggacaaccccgctattatcgatgaccccaatctcgtggtaaagattgggagtaaatattataactggacaacagcagcacccctcctcctggcaatgcaggccttccagaaacctttgccaaaggccactgtggaatctatcatgagggataaaatgcccaaaaagggaggaagatggtggttttcatggaggggaagaaacaccacaatcaaggaggaaagtaagccagagcagtgcttggctggcaaggcccatagcaccggagagcaaccgccgcagctcagcttggccaccagggtaaagcatgaatcatcctccagtgatgaggagcgcgcagctgccaagccatcaaacgcaggccacctccctcttctgcctaatgtcagctacaagaagactctccggctgacttccgagcagcttaaaagcttgaagttgaagaatggccccaacgacgtggttttcagtgtcaccacgcagtaccaaggcacgtgccgctgtgagggcaccatctatctgtggaactgggatgataaagtcatcatttctgatattgatgggacaattaccagatcagatactcttggccacattttgcccacccttgggaaggattggacccatcagggcatcgctaagctgtaccataaagtgagccattgctgagcatgaaattcgtaatatctcctgtgctgcccaggacccagaagacctctcaacatttgcctatatcacaaaagatttgaagtctaatcaccactactgtcatgtgtttactgcctttgatgtgattttagcctatgaaatcatcctaatcctggcacaggcattcgaagtcgcttaccagctagcactacaagcaagaataagggggacactcctccacagcttccagaaagctttgaaaacaaccgcttctaaccctatc

SEQ ID NO: 464033 - DNA, 610 bp, Homo sapiens
cctgcttctgctcacaccttgcacatgaattcagagggcagtatggccaagttgactatttccacttgtgttccagctgccatgccacaccacctcacctctgcccatccgcccccagatcttcggtggtggtataaaaatcagatagctcagcacttcgctccaaaggagctgaaggagagaggattccactgcgtgtatgttttctctttcacgtctcacttttgttctctgccatcaggaaatgcagtagacatttgtcaccagcagctctttggagacttcaatgttccttcctcccaggatccgaaaggggacttcagacacggagaatctaagacaccaggagctcagaagaatggagtctcaagacatcaggcaaataccgaagagatcagagccaagttctaaagggcagccatttcccaaatgtcaaccaagagcgaagccaagagaattatgatttcctggctatacaatcacaggaaaagcttgatcaaagctggagtgcaagttaaaaagtgtaaggtactcaagtgctagggtctgtgtccaagcccaatcaattgatcattagttgtttttaacttcaacgtttcttttgcaacag

SEQ ID NO: 464034 - DNA, 345 bp, Homo sapiens
cattatgagttgtcatagtataagaggtaggtttggaggattgatagtgttcttaacttcagggagaatctaagacaccaggagctcagaagaatggagtctcaagacatcaggcaaataccgaagagatcagagccaagttctaaagggcagccatttcccaaatgtcaaccaagagcgaagccaagagaattatgatttcctggctatacaatcacaggaaaagcttgatcaaagctggagtgcaagttaaaaagtgtaaggtactcaagtgctagggtctgtgtccaagcccaatcaattgatcattagttgtttttaacttcaacgtttcttttgcaacag

SEQ ID NO: 464035 - DNA, 2227 bp, Homo sapiens
ccggcgggccgcgccgcgagccagtatctcagagagcgcggggtccggacagccgcgcgctgagggtctcggggcgggcgccgcgggacctctccgggccatggcagcccctgtcaaagggaacaggaagcagtccacggagggtgacgccctagacccacctgcatcccccaaacctgctggcaagcagaacggaatccagaaccccatctcgctggaggactcccccgaggcaggcggggagcgggaggaggagcaggagcgggaggaggagcaggccttcctggtcagcctctacaagttcatgaaggagcgacacacgcccatcgagagggtgccccatctcggcttcaagcagattaacctgtggaagatctacaaagcagtggagaagctgggggcctatgagctggtgaccgggcgccgcctctggaagaacgtgtacgacgagctggggggcagcccaggcagcaccagcgcggccacgtgcacgcgccgccactacgagaggctggtcctgccatacgtgcggcacctgaagggggaggatgacaagccgctgcccacctccaagcccaggaaacagtacaagatggctaaggagaacaggggggatgatggggccaccgagaggccgaagaaggccaaggaggagcggcgcatggaccagatgatgccaggaaagaccaaagcagatgctgctgacccagcaccacttcccagccaggagccccccaggaacagcacagaacagcagggcctggcctctgggtcttctgtgtcctttgtgggtgccagcggctgtcctgaggcctacaagcggctcctatccagcttctactgcaaggggacacacggcatcatgtcaccactggccaaaaagaagctcctggcccaggtgagcaaggtggaggccttgcagtgccaggaggagggctgccgccatggggcagagccccaggcgtccccagctgttcacctcccagagagtccccagagccccaaagggctgactgagaactccaggcaccggctgacccctcaggagggattgcaggccccaggtggcagcctcagagaggaggcgcaggcaggcccctgcccggcagcccccatcttcaagggctgcttctacacccaccccaccgaggtgctgaagcctgtcagccagcaccccagggacttcttctctagacttaaagatggggtgctattggggcctcctggcaaagaggggctgtcagtgaaagagccccagctggtgtggggcggagacgctaaccgcccttctgcgttccataaaggtggctccagaaagggcatcctctaccccaagcccaaagcctgctgggtgtcccccatggccaaggtcccagccgagagccccacgctcccgcccaccttccccagtagcccaggcctgggcagcaagcgcagcctggaggaagagggtgctgcccacagtgggaagagactgcgggccgtgtctccctttcttaaggaggcggatgccaagaagtgtggggccaaacctgcagggtccggcctggtctcctgccttctgggcccagccctggggcctgtgcccccagaggcctacaggggcaccatgctgcactgcccgctgaacttcactggcaccccgggccccttgaagggccaggctgcactccccttcagccccctggtcatcccggccttcccggcccacttcctggccaccgcaggcccctcgcccatggccgctggcctgatgcacttccccccaacgtccttcgacagtgccctccgccacagactttgcccggcctcatctgcctggcacgcaccaccagtcacaacctatgcagcgccccacttcttccacctcaacaccaagctgtaggccagcccatggtgttgtgtacactgtggagtcgacaggggcctacaacaggcaggtactgctgccagggggctctgaactagtgcctgctacccaggacacccgggccatgcccctggctgggcagcctggcacaagtgaagaagaaggcagtgggaaaactgggtttatctcaaggcagcagcctgagcccaggagcagaggacccagttgttataaggcgctgggagaggatgggcagctcccactgccccagagcggagctcgaagcacccaggttgcccacggaaaatccaataaaaagacaccagtgtgaatccacgtagccctgaggtgtgtgtg

SEQ ID NO: 464036 - DNA, 2419 bp, Homo sapiens
ccggcgggccgcgccgcgagccagtatctcagagagcgcggggtccggacagccgcgcgctgagggtctcggggcgggcgccgcgggacctctccgggccatggcagcccctgtcaaagggaacaggaagcagtccacggagggtgacgccctagacccacctgcatcccccaaacctgctggcaagcagaacggaatccagaaccccatctcgctggaggactcccccgaggcaggcggggagcgggaggaggagcaggagcgggaggaggagcaggccttcctggtcagcctctacaagttcatgaaggagcgacacacgcccatcgagagggtgccccatctcggcttcaagcagattaacctgtggaagatctacaaagcagtggagaagctgggggcctatgagctggtgaccgggcgccgcctctggaagaacgtgtacgacgagctggggggcagcccaggcagcaccagcgcggccacgtgcacgcgccgccactacgagaggctggtcctgccatacgtgcggcacctgaagggggaggatgacaagccgctgcccacctccaagcccaggaaacagtacaagatggctaaggagaacaggggggatgatggggccaccgagaggccgaagaaggccaaggaggagcggcgcatggaccagatgatgccaggaaagaccaaagcagatgctgctgacccagcaccacttcccagccaggagccccccaggaacagcacagaacagcagggcctggcctctgggtcttctgtgtcctttgtgggtgccagcggctgtcctgaggcctacaagcggctcctatccagcttctactgcaaggggacacacggcatcatgtcaccactggccaaaaagaagctcctggcccaggtgagcaaggtggaggccttgcagtgccaggaggagggctgccgccatggggcagagccccaggcgtccccagctgttcacctcccagagagtccccagagccccaaagggctgactgagaactccaggcaccggctgacccctcaggagggattgcaggccccaggtggcagcctcagagaggaggcgcaggcaggcccctgcccggcagcccccatcttcaagggctgcttctacacccaccccaccgaggtgctgaagcctgtcagccagcaccccagggacttcttctctagacttaaagatggggtgctattggggcctcctggcaaagaggggctgtcagtgaaagagccccagctggtgtggggcggagacgctaaccgcccttctgcgttccataaaggtggctccagaaagggcatcctctaccccaagcccaaagcctgctgggtgtcccccatggccaaggtcccagccgagagccccacgctcccgcccaccttccccagtagcccaggcctgggcagcaagcgcagcctggaggaagagggtgctgcccacagtgggaagagactgcgggccgtgtctccctttcttaaggaggcggatgccaagaagtgtggggccaaacctgcagggtccggcctggtctcctgccttctgggcccagccctggggcctgtgcccccagaggcctacaggggcaccatgctgcactgcccgctgaacttcactggcaccccgggccccttgaagggccaggctgcactccccttcagccccctggtcatcccggccttcccggcccacttcctggccaccgcaggcccctcgcccatggccgctggcctgatgcacttccccccaacgtccttcgacagtgccctccgccacagactttgcccggcctcatctgcctggcacgcaccaccagtcacaacctatgcagcgccccacttcttccacctcaacaccaagctgtaggccagcccatggtgttgtgtacactgtggagtcgacaggggcctacaacaggcaggtactgctgccagggggctctgaactagtgcctgctacccaggacacccgggccatgcccctggctgggcagcctggcacaagtgaagaagaaggcagtgggaaaactgggtttatctcaaggcagcagcctgagcccaggagcagaggacccagttgttataaggcgctgggagaggatgggcagctcccactgccccagagcggagctcgaagcacccaggttgcccacggaaaatccaataaaaagacaccagtgtgaatccacgtagccctgaggtgtgtgtggagcagcctgtggaggagagctcaggcaccttccaagcgaggcctgtgacgggtggaggggcaaagagtggtgctccctgctgttgagagcactcaggctctgcaggggcatctcccaaccttccacctctttccttctgagagatgccaagatgtcagcctgagcacctggagtgaccagccctgagctcc

SEQ ID NO: 464037 - DNA, 2445 bp, Homo sapiens
gctggtctggtcggaagttgttggatgccgcgcgctgagggtctcggggcgggcgccgcgggacctctccgggccatggcagcccctgtcaaagggaacaggaagcagtccacggagggtgacgccctagacccacctgcatcccccaaacctgctggcaagcagaacggaatccagaaccccatctcgctggagttaacctgtggaagatctacaaagcagtggagaagctgggggcctatgagctggtaaggaaggcacctcccagtccttgccaaactgcatatccctggggtgagcctgcagcgctgtccttgcctctggacagaggaagagccaggatccccagtcctacccctgcgtccctgcctccctgccttccccgctggtactctgctgctcaaagcagcttttcagccttccccatctgttctgcccgccccgtgttgggaaaactgcttgggccagcagtccatggccctaggagagagaatcggctggccgctgctggagccgcagagcagctgccaaactgcagtccttcgagtccctgcgagggcggccggagctgcaaggaccccgccgccagggggcgcccgccggccgcgccctcacgaggtgcccttgcaggtgaccgggcgccgcctctggaagaacgtgtacgacgagctggggggcagcccaggcagcaccagcgcggccacgtgcacgcgccgccactacgagaggctggtcctgccatacgtgcggcacctgaagggggaggatgacaagccgctgcccacctccaagcccaggaaacagtacaagatggctaaggagaacaggggggatgatggggccaccgagaggccgaagaaggccaaggaggagcggcgcatggaccagatgatgccaggaaagaccaaagcagatgctgctgacccagcaccacttcccagccaggagccccccaggaacagcacagaacagcagggcctggcctctgggtcttctgtgtcctttgtgggtgccagcggctgtcctgaggcctacaagcggctcctatccagcttctactgcaaggggacacacggcatcatgtcaccactggccaaaaagaagctcctggcccaggtgagcaaggtggaggccttgcagtgccaggaggagggctgccgccatggggcagagccccaggcgtccccagctgttcacctcccagagagtccccagagccccaaagggctgactgagaactccaggcaccggctgacccctcaggagggattgcaggccccaggtggcagcctcagagaggaggcgcaggcaggcccctgcccggcagcccccatcttcaagggctgcttctacacccaccccaccgaggtgctgaagcctgtcagccagcaccccagggacttcttctctagacttaaagatggggtgctattggggcctcctggcaaagaggggctgtcagtgaaagagccccagctggtgtggggcggagacgctaaccgcccttctgcgttccataaaggtggctccagaaagggcatcctctaccccaagcccaaagcctgctgggtgtcccccatggccaaggtcccagccgagagccccacgctcccgcccaccttccccagtagcccaggcctgggcagcaagcgcagcctggaggaagagggtgctgcccacagtgggaagagactgcgggccgtgtctccctttcttaaggaggcggatgccaagaagtgtggggccaaacctgcagggtccggcctggtctcctgccttctgggcccagccctggggcctgtgcccccagaggcctacaggggcaccatgctgcactgcccgctgaacttcactggcaccccgggccccttgaagggccaggctgcactccccttcagccccctggtcatcccggccttcccggcccacttcctggccaccgcaggcccctcgcccatggccgctggcctgatgcacttccccccaacgtccttcgacagtgccctccgccacagactttgcccggcctcatctgcctggcacgcaccaccagtcacaacctatgcagcgccccacttcttccacctcaacaccaagctgtaggccagcccatggtgttgtgtacactgtggagtcgacaggggcctacaacaggcaggtactgctgccagggggctctgaactagtgcctgctacccaggacacccgggccatgcccctggctgggcagcctggcacaagtgaagaagaaggcagtgggaaaactgggtttatctcaaggcagcagcctgagcccaggagcagaggacccagttgttataaggcgctgggagaggatgggcagctcccactgccccagagcggagctcgaagcacccaggttgcccacggaaaatccaataaaaagacaccagtgtgaatccacgtagccctgaggtgtgtgtg

SEQ ID NO: 464038 - DNA, 2063 bp, Homo sapiens
gctggtctggtcggaagttgttggatgccgcgcgctgagggtctcggggcgggcgccgcgggacctctccgggccatggcagcccctgtcaaagggaacaggaagcagtccacggagggtgacgccctagacccacctgcatcccccaaacctgctggcaagcagaacggaatccagaaccccatctcgctggagttaacctgtggaagatctacaaagcagtggagaagctgggggcctatgagctggtgaccgggcgccgcctctggaagaacgtgtacgacgagctggggggcagcccaggcagcaccagcgcggccacgtgcacgcgccgccactacgagaggctggtcctgccatacgtgcggcacctgaagggggaggatgacaagccgctgcccacctccaagcccaggaaacagtacaagatggctaaggagaacaggggggatgatggggccaccgagaggccgaagaaggccaaggaggagcggcgcatggaccagatgatgccaggaaagaccaaagcagatgctgctgacccagcaccacttcccagccaggagccccccaggaacagcacagaacagcagggcctggcctctgggtcttctgtgtcctttgtgggtgccagcggctgtcctgaggcctacaagcggctcctatccagcttctactgcaaggggacacacggcatcatgtcaccactggccaaaaagaagctcctggcccaggtgagcaaggtggaggccttgcagtgccaggaggagggctgccgccatggggcagagccccaggcgtccccagctgttcacctcccagagagtccccagagccccaaagggctgactgagaactccaggcaccggctgacccctcaggagggattgcaggccccaggtggcagcctcagagaggaggcgcaggcaggcccctgcccggcagcccccatcttcaagggctgcttctacacccaccccaccgaggtgctgaagcctgtcagccagcaccccagggacttcttctctagacttaaagatggggtgctattggggcctcctggcaaagaggggctgtcagtgaaagagccccagctggtgtggggcggagacgctaaccgcccttctgcgttccataaaggtggctccagaaagggcatcctctaccccaagcccaaagcctgctgggtgtcccccatggccaaggtcccagccgagagccccacgctcccgcccaccttccccagtagcccaggcctgggcagcaagcgcagcctggaggaagagggtgctgcccacagtgggaagagactgcgggccgtgtctccctttcttaaggaggcggatgccaagaagtgtggggccaaacctgcagggtccggcctggtctcctgccttctgggcccagccctggggcctgtgcccccagaggcctacaggggcaccatgctgcactgcccgctgaacttcactggcaccccgggccccttgaagggccaggctgcactccccttcagccccctggtcatcccggccttcccggcccacttcctggccaccgcaggcccctcgcccatggccgctggcctgatgcacttccccccaacgtccttcgacagtgccctccgccacagactttgcccggcctcatctgcctggcacgcaccaccagtcacaacctatgcagcgccccacttcttccacctcaacaccaagctgtaggccagcccatggtgttgtgtacactgtggagtcgacaggggcctacaacaggcaggtactgctgccagggggctctgaactagtgcctgctacccaggacacccgggccatgcccctggctgggcagcctggcacaagtgaagaagaaggcagtgggaaaactgggtttatctcaaggcagcagcctgagcccaggagcagaggacccagttgttataaggcgctgggagaggatgggcagctcccactgccccagagcggagctcgaagcacccaggttgcccacggaaaatccaataaaaagacaccagtgtgaatccacgtagccctgaggtgtgtgtg

SEQ ID NO: 464039 - DNA, 2223 bp, Homo sapiens
  misc_feature (23)..(23): n is a, c, g, or t
  misc_feature (26)..(26): n is a, c, g, or t
  misc_feature (32)..(32): n is a, c, g, or t
  misc_feature (53)..(53): n is a, c, g, or t
aagccctaattatggctgacacntanttgaanacccagcgtgttgtttttaanaacacagctgtcgtcggattcggatgacagcgcgcgctaggttcgggcggcgcgggactctcggcatgcagcctgtcaaggacagagcagtcaggaggtgagcctaaccactgcatccccaactgctgcagcagacggaatcagaacccatctcgctggaggagactcccccgaggcaggcggggagcgggaggaggagcaggagcgggaggaggagcaggccttcctggtcagcctctacaagttcatgaaggagcgacacacgcccatcgagagggtgccccatctcggcttcaagcagattaacctgtggaagatctacaaagcagtggagaagctgggggcctatgagctggtgaccgggcgccgcctctggaagaacgtgtacgacgagctggggggcagcccaggcagcaccagcgcggccacgtgcacgcgccgccactacgagaggctggtcctgccatacgtgcggcacctgaagggggaggatgacaagccgctgcccacctccaagcccaggaaacagtacaagatggctaaggagaacaggggggatgatggggccaccgagaggccgaagaaggccaaggaggagcggcgcatggaccagatgatgccaggaaagaccaaagcagatgctgctgacccagcaccacttcccagccaggagccccccaggaacagcacagaacagcagggcctggcctctgggtcttctgtgtcctttgtgggtgccagcggctgtcctgaggcctacaagcggctcctatccagcttctactgcaaggggacacacggcatcatgtcaccactggccaaaaagaagctcctggcccaggtgagcaaggtggaggccttgcagtgccaggaggagggctgccgccatggggcagagccccaggcgtccccagctgttcacctcccagagagtccccagagccccaaagggctgactgagaactccaggcaccggctgacccctcaggagggattgcaggccccaggtggcagcctcagagaggaggcgcaggcaggcccctgcccggcagcccccatcttcaagggctgcttctacacccaccccaccgaggtgctgaagcctgtcagccagcaccccagggacttcttctctagacttaaagatggggtgctattggggcctcctggcaaagaggggctgtcagtgaaagagccccagctggtgtggggcggagacgctaaccgcccttctgcgttccataaaggtggctccagaaagggcatcctctaccccaagcccaaagcctgctgggtgtcccccatggccaaggtcccagccgagagccccacgctcccgcccaccttccccagtagcccaggcctgggcagcaagcgcagcctggaggaagagggtgctgcccacagtgggaagagactgcgggccgtgtctccctttcttaaggaggcggatgccaagaagtgtggggccaaacctgcagggtccggcctggtctcctgccttctgggcccagccctggggcctgtgcccccagaggcctacaggggcaccatgctgcactgcccgctgaacttcactggcaccccgggccccttgaagggccaggctgcactccccttcagccccctggtcatcccggccttcccggcccacttcctggccaccgcaggcccctcgcccatggccgctggcctgatgcacttccccccaacgtccttcgacagtgccctccgccacagactttgcccggcctcatctgcctggcacgcaccaccagtcacaacctatgcagcgccccacttcttccacctcaacaccaagctgtaggccagcccatggtgttgtgtacactgtggagtcgacaggggcctacaacaggcaggtactgctgccagggggctctgaactagtgcctgctacccaggacacccgggccatgcccctggctgggcagcctggcacaagtgaagaagaaggcagtgggaaaactgggtttatctcaaggcagcagcctgagcccaggagcagaggacccagttgttataaggcgctgggagaggatgggcagctcccactgccccagagcggagctcgaagcacccaggttgcccacggaaaatccaataaaaagacaccagtgtgaatccacgtagccctgaggtgtgtgtg

SEQ ID NO: 464040 - DNA, 2016 bp, Homo sapiens
ccggcgggccgcgccgcgagccagtatctcagagagcgcggggtccggacagccgcgcgctgagggtctcggggcgggcgccgcgggacctctccgggccatggcagcccctgtcaaagggaacaggaagcagtccacggagggtgacgccctagacccacctgcatcccccaaacctgctggcaagcagaacggaatccagaaccccatctcgctggaggactcccccgaggcaggcggggagcgggaggaggagcaggagcgggaggaggagcaggccttcctggtcagcctctacaagttcatgaaggagcgacacacgcccatcgagagggtgccccatctcggcttcaagcagattaacctgtggaagatctacaaagcagtggagaagctgggggcctatgagctggtgaccgggcgccgcctctggaagaacgtgtacgacgagctggggggcagcccaggcagcaccagcgcggccacgtgcacgcgccgccactacgagaggctggtcctgccatacgtgcggcacctgaagggggaggatgacaagccgctgcccacctccaagcccaggaaacagtacaagatggctaaggagaacaggggggatgatggggccaccgagaggccgaagaaggccaaggaggagcggcgcatggaccagatgatgccaggaaagaccaaagcagatgctgctgacccagcaccacttcccagccaggagccccccaggaacagcacagaacagcagggcctggcctctgggtcttctgtgtcctttgtgggtgccagcggctgtcctgaggcctacaagcggctcctatccagcttctactgcaaggggacacacggcatcatgtcaccactggccaaaaagaagctcctggcccaggtgagcaaggtggaggccttgcagtgccaggaggagggctgccgccatggggcagagccccaggcgtccccagctgttcacctcccagagagtccccagagccccaaagggctgactgagaactccaggcaccggctgacccctcaggagggattgcaggccccaggtggcagcctcagagaggaggcgcaggcaggcccctgcccggcagcccccatcttcaagggctgcttctacacccaccccaccgaggtgctgaagcctgtcagccagcaccccagggacttcttctctagacttaaagatggggtgctattggggcctcctggcaaagaggggctgtcagtgaaagagccccagctggtgtggggcggagacgctaaccgcccttctgcgttccataaaggtggctccagaaagggcatcctctaccccaagcccaaagcctgctgggtgtcccccatggccaaggtcccagccgagagccccacgctcccgcccaccttccccagtagcccaggcctgggcagcaagcgcagcctggaggaagagggtgctgcccacagtgggaagagactgcgggccgtgtctccctttcttaaggaggcggatgccaagaagtgtggggccaaacctgcagggtccggcctggtctcctgccttctgggcccagccctggggcctgtgcccccagaggcctacaggggcaccatgctgcactgcccgctgaacttcactggcaccccgggccccttgaagggccaggctgcactccccttcacccatggtgttgtgtacactgtggagtcgacaggggcctacaacaggcaggtactgctgccagggggctctgaactagtgcctgctacccaggacacccgggccatgcccctggctgggcagcctggcacaagtgaagaagaaggcagtgggaaaactgggtttatctcaaggcagcagcctgagcccaggagcagaggacccagttgttataaggcgctgggagaggatgggcagctcccactgccccagagcggagctcgaagcacccaggttgcccacggaaaatccaataaaaagacaccagtgtgaatccacgtagccctgaggtgtgtgtg

SEQ ID NO: 464041 - DNA, 2225 bp, Homo sapiens
tggggcggagaggggcccggggtgggtttcggggcgcgggccaaggggagcgagcccggcccgcggcttcagcgctccccggccggcgcggaaggggtgaggctgggcgtccgcgcgagcttcgagaaaaggaaagacaaaaagttttggcggccaggggcttcccgggcgtttatctcgaaactcttttcgccgtctcttgcctgaaatatgccgagcccggtacggctctgtcgtcccacttcctgctgcggtttccacctcgagctgggctcagctaatttgttgtgacagctgtcggcagccgcccctccgccccgtgacatcccgcaggtttcagaaccgcggcgccgccgggcacagactccgggtccagagcgcgcggccctttcctctgcggccgccgtttcctgaaaggggctgcgcgggtgtgaagaacttgctcaatgcgctttgtaggatccactgttcctctttcggccgcgggctgcgccgatggtccggggagcccggcttctcgccccctgccccttccttctcttcccttctctcttttcctctcctgtctctccgcccacccgccgcagccccacaggagaggggtcgcttccctggttgctctcctctcctgtcccttgtgtgtccccttgtcttccctcggtctgcagaagggacggggtggcggctggggagcgtcaggggaagagggcaagagcgtgggctacgagcttgcaggcgatgcccggcttcgcgctcggcgggagctgcgggccaacccgggcccgcgctccgtccctccgcggtgtctaggggtcgcccgggctggggtcgcgtcaccctccgcccagcgccggcgtggtggggcttgcgcggtgcaggacccccgagggcccagggggtcccaaggcgctgcgggtccagtgtccctttgtttgcagagtcttgggccagtaaggagtgctccgcgggccccaggggaggacaacaggtgcctcttgccccacccgggctcctctggtgggagcccacacgcacggtggcgtcactgcgcctacaggcaacgctagagcacaggaggggtgggaggtcggggctcgagggcttcaccccgcagcagagctcagagcccaatccaggccttagggacccgcctggggcctagaacttggtgtggcagaggtagaaagggcctccgataatctgcttctacagttgagagacgtcaactggcacctctgagcctctgccccgtaggtgaaatgggaacacacgaaaccatctgaggagctctcactgtccgtcaccaccaaatgtggcccagactccgtggggagggacagtcccatcctggaactggggcttttaggacatcccagagcccgcagcccctgtcaaagggaacaggaagcagtccacggagggtgacgccctagacccacctgcatcccccaaacctgctggcaagcagaacggaatccagaaccccatctcgctggaggactcccccgaggcaggcggggagcgggaggaggagcaggagcgggaggaggagcaggccttcctggtcagcctctacaagttcatgaaggagcgacacacgcccatcgagagggtgccccatctcggcttcaagcagattaacctgtggaagatctacaaagcagtggagaagctgggggcctatgagctggtaaggaaggcacctcccagtccttgccaaactgcatatccctggggtgagcctgcagcgctgtccttgcctctggacagaggaagagccaggatccccagtcctacccctgcgtccctcatctgcctggcacgcaccaccagtcacaacctatgcagcgccccacttcttccacctcaacaccaagctgtaggccagcccatggtgttgtgtacactgtggagtcgacaggggcctacaacaggcaggtactgctgccagggggctctgaactagtgcctgctacccaggacacccgggccatgcccctggctgggcagcctggcacaagtgaagaagaaggcagtgggaaaactgggtttatctcaaggcagcagcctgagcccaggagcagaggacccagttgttataaggcgctgggagaggatgggcagctcccactgccccagagcggagctcgaagcacccaggttgcccacggaaaatccaataaaaagacaccagtgtgaatccacgtagccctgaggtgtgtgtg

SEQ ID NO: 464042 - DNA, 395 bp, Homo sapiens
ttaataatagagacggggtctcactacgttgcccagacaggtcttgaactcctgacctcaggtcatcgcctgcctgggcctcccaaagtgctgggatcacaggagtgagcccctgcactggcgccctctggcaactccaattgggagtagggagagtgctcctgttcctccctgcttgcatctcatatgctctctccccaccccttcctccttactccttccctctctccttgcagcagcccctgtcaaagggaacaggaagcagtccacggagggtgacgccctagacccacctgcatcccccaaacctgctggcaagcagaacggaatccagaaccccatctcgctggaggtgagttgactccctctgctgactccctgggcactcttccctg

SEQ ID NO: 464043 - DNA, 491 bp, Homo sapiens
ctccacagatggttgtgcaagtggactctgaactccagcctgcgcccacccaccaggcacctgaggctgtgtccactcagaggacagggcacctttggaaaattctgtacagaggactgcaggggctggcgggggacctgggcaggcctgaaagtgccacctcttgctcctcaggtcaggatgtggggctgaggcagtcctgaggcaagactttctctcattccagatgatgccaggaaagaccaaagcagatgctgctgacccagcaccacttcccagccaggagccccccaggaacagcacagaacagcagggcctggcctctgggtcttctgtgtcctttgtgggtgccagcggctgtcctgaggcctacaagcggctcctatccagcttctactgcaaggggacacacggcatcatgtcaccactggccaaaaagaagctcctggcccaggtgagcaaggtggaggccttgcagtgccaggaggagg

SEQ ID NO: 464044 - DNA, 2088 bp, Homo sapiens
ccggcgggccgcgccgcgagccagtatctcagagagcgcggggtccggacagccgcgcgctgagggtctcggggcgggcgccgcgggacctctccgggccatggcagcccctgtcaaagggaacaggaagcagtccacggagggtgacgccctagacccacctgcatcccccaaacctgctggcaagcagaacggaatccagaaccccatctcgctggagttaacctgtggaagatctacaaagcagtggagaagctgggggcctatgagctggtgaccgggcgccgcctctggaagaacgtgtacgacgagctggggggcagcccaggcagcaccagcgcggccacgtgcacgcgccgccactacgagaggctggtcctgccatacgtgcggcacctgaagggggaggatgacaagccgctgcccacctccaagcccaggaaacagtacaagatggctaaggagaacaggggggatgatggggccaccgagaggccgaagaaggccaaggaggagcggcgcatggaccagatgatgccaggaaagaccaaagcagatgctgctgacccagcaccacttcccagccaggagccccccaggaacagcacagaacagcagggcctggcctctgggtcttctgtgtcctttgtgggtgccagcggctgtcctgaggcctacaagcggctcctatccagcttctactgcaaggggacacacggcatcatgtcaccactggccaaaaagaagctcctggcccaggtgagcaaggtggaggccttgcagtgccaggaggagggctgccgccatggggcagagccccaggcgtccccagctgttcacctcccagagagtccccagagccccaaagggctgactgagaactccaggcaccggctgacccctcaggagggattgcaggccccaggtggcagcctcagagaggaggcgcaggcaggcccctgcccggcagcccccatcttcaagggctgcttctacacccaccccaccgaggtgctgaagcctgtcagccagcaccccagggacttcttctctagacttaaagatggggtgctattggggcctcctggcaaagaggggctgtcagtgaaagagccccagctggtgtggggcggagacgctaaccgcccttctgcgttccataaaggtggctccagaaagggcatcctctaccccaagcccaaagcctgctgggtgtcccccatggccaaggtcccagccgagagccccacgctcccgcccaccttccccagtagcccaggcctgggcagcaagcgcagcctggaggaagagggtgctgcccacagtgggaagagactgcgggccgtgtctccctttcttaaggaggcggatgccaagaagtgtggggccaaacctgcagggtccggcctggtctcctgccttctgggcccagccctggggcctgtgcccccagaggcctacaggggcaccatgctgcactgcccgctgaacttcactggcaccccgggccccttgaagggccaggctgcactccccttcagccccctggtcatcccggccttcccggcccacttcctggccaccgcaggcccctcgcccatggccgctggcctgatgcacttccccccaacgtccttcgacagtgccctccgccacagactttgcccggcctcatctgcctggcacgcaccaccagtcacaacctatgcagcgccccacttcttccacctcaacaccaagctgtaggccagcccatggtgttgtgtacactgtggagtcgacaggggcctacaacaggcaggtactgctgccagggggctctgaactagtgcctgctacccaggacacccgggccatgcccctggctgggcagcctggcacaagtgaagaagaaggcagtgggaaaactgggtttatctcaaggcagcagcctgagcccaggagcagaggacccagttgttataaggcgctgggagaggatgggcagctcccactgccccagagcggagctcgaagcacccaggttgcccacggaaaatccaataaaaagacaccagtgtgaatccacgtagccctgaggtgtgtgtg

SEQ ID NO: 464045 - DNA, 3887 bp, Homo sapiens
tggggcggagaggggcccggggtgggtttcggggcgcgggccaaggggagcgagcccggcccgcggcttcagcgctccccggccggcgcggaaggggtgaggctgggcgtccgcgcgagcttcgagaaaaggaaagacaaaaagttttggcggccaggggcttcccgggcgtttatctcgaaactcttttcgccgtctcttgcctgaaatatgccgagcccggtacggctctgtcgtcccacttcctgctgcggtttccacctcgagctgggctcagctaatttgttgtgacagctgtcggcagccgcccctccgccccgtgacatcccgcaggtttcagaaccgcggcgccgccgggcacagactccgggtccagagcgcgcggccctttcctctgcggccgccgtttcctgaaaggggctgcgcgggtgtgaagaacttgctcaatgcgctttgtaggatccactgttcctctttcggccgcgggctgcgccgatggtccggggagcccggcttctcgccccctgccccttccttctcttcccttctctcttttcctctcctgtctctccgcccacccgccgcagccccacaggagaggggtcgcttccctggttgctctcctctcctgtcccttgtgtgtccccttgtcttccctcggtctgcagaagggacggggtggcggctggggagcgtcaggggaagagggcaagagcgtgggctacgagcttgcaggcgatgcccggcttcgcgctcggcgggagctgcgggccaacccgggcccgcgctccgtccctccgcggtgtctaggggtcgcccgggctggggtcgcgtcaccctccgcccagcgccggcgtggtggggcttgcgcggtgcaggacccccgagggcccagggggtcccaaggcgctgcgggtccagtgtccctttgtttgcagagtcttgggccagtaaggagtgctccgcgggccccaggggaggacaacaggtgcctcttgccccacccgggctcctctggtgggagcccacacgcacggtggcgtcactgcgcctacaggcaacgctagagcacaggaggggtgggaggtcggggctcgagggcttcaccccgcagcagagctcagagcccaatccaggccttagggacccgcctggggcctagaacttggtgtggcagaggtagaaagggcctccgataatctgcttctacagttgagagacgtcaactggcacctctgagcctctgccccgtaggtgaaatgggaacacacgaaaccatctgaggagctctcactgtccgtcaccaccaaatgtggcccagactccgtggggagggacagtcccatcctggaactggggcttttaggacatcccagagcccgcagcccctgtcaaagggaacaggaagcagtccacggagggtgacgccctagacccacctgcatcccccaaacctgctggcaagcagaacggaatccagaaccccatctcgctggaggactcccccgaggcaggcggggagcgggaggaggagcaggagcgggaggaggagcaggccttcctggtcagcctctacaagttcatgaaggagcgacacacgcccatcgagagggtgccccatctcggcttcaagcagattaacctgtggaagatctacaaagcagtggagaagctgggggcctatgagctggtaaggaaggcacctcccagtccttgccaaactgcatatccctggggtgagcctgcagcgctgtccttgcctctggacagaggaagagccaggatccccagtcctacccctgcgtccctgcctccctgccttccccgctggtactctgctgctcaaagcagcttttcagccttccccatctgttctgcccgccccgtgttgggaaaactgcttgggccagcagtccatggccctaggagagagaatcggctggccgctgctggagccgcagagcagctgccaaactgcagtccttcgagtccctgcgagggcggccggagctgcaaggaccccgccgccagggggcgcccgccggccgcgccctcacgaggtgcccttgcaggtgaccgggcgccgcctctggaagaacgtgtacgacgagctggggggcagcccaggcagcaccagcgcggccacgtgcacgcgccgccactacgagaggctggtcctgccatacgtgcggcacctgaagggggaggatgacaagccgctgcccacctccaagcccaggaaacagtacaagatggctaaggagaacaggggggatgatggggccaccgagaggccgaagaaggccaaggaggagcggcgcatggaccagatgatgccaggaaagaccaaagcagatgctgctgacccagcaccacttcccagccaggagccccccaggaacagcacagaacagcagggcctggcctctgggtcttctgtgtcctttgtgggtgccagcggctgtcctgaggcctacaagcggctcctatccagcttctactgcaaggggacacacggcatcatgtcaccactggccaaaaagaagctcctggcccaggtgagcaaggtggaggccttgcagtgccaggaggagggctgccgccatggggcagagccccaggcgtccccagctgttcacctcccagagagtccccagagccccaaagggctgactgagaactccaggcaccggctgacccctcaggagggattgcaggccccaggtggcagcctcagagaggaggcgcaggcaggcccctgcccggcagcccccatcttcaagggctgcttctacacccaccccaccgaggtgctgaagcctgtcagccagcaccccagggacttcttctctagacttaaagatggggtgctattggggcctcctggcaaagaggggctgtcagtgaaagagccccagctggtgtggggcggagacgctaaccgcccttctgcgttccataaaggtggctccagaaagggcatcctctaccccaagcccaaagcctgctgggtgtcccccatggccaaggtcccagccgagagccccacgctcccgcccaccttccccagtagcccaggcctgggcagcaagcgcagcctggaggaagagggtgctgcccacagtgggaagagactgcgggccgtgtctccctttcttaaggaggcggatgccaagaagtgtggggccaaacctgcagggtccggcctggtctcctgccttctgggcccagccctggggcctgtgcccccagaggcctacaggggcaccatgctgcactgcccgctgaacttcactggcaccccgggccccttgaagggccaggctgcactccccttcagccccctggtcatcccggccttcccggcccacttcctggccaccgcaggcccctcgcccatggccgctggcctgatgcacttccccccaacgtccttcgacagtgccctccgccacagactttgcccggcctcatctgcctggcacgcaccaccagtcacaacctatgcagcgccccacttcttccacctcaacaccaagctgtaggccagcccatggtgttgtgtacactgtggagtcgacaggggcctacaacaggcaggtactgctgccagggggctctgaactagtgcctgctacccaggacacccgggccatgcccctggctgggcagcctggcacaagtgaagaagaaggcagtgggaaaactgggtttatctcaaggcagcagcctgagcccaggagcagaggacccagttgttataaggcgctgggagaggatgggcagctcccactgccccagagcggagctcgaagcacccaggttgcccacggaaaatccaataaaaagacaccagtgtgaatccacgtagccctgaggtgtgtgtg

SEQ ID NO: 464046 - DNA, 2609 bp, Homo sapiens
ccggcgggccgcgccgcgagccagtatctcagagagcgcggggtccggacagccgcgcgctgagggtctcggggcgggcgccgcgggacctctccgggccatggcagcccctgtcaaagggaacaggaagcagtccacggagggtgacgccctagacccacctgcatcccccaaacctgctggcaagcagaacggaatccagaaccccatctcgctggaggactcccccgaggcaggcggggagcgggaggaggagcaggagcgggaggaggagcaggccttcctggtcagcctctacaagttcatgaaggagcgacacacgcccatcgagagggtgccccatctcggcttcaagcagattaacctgtggaagatctacaaagcagtggagaagctgggggcctatgagctggtaaggaaggcacctcccagtccttgccaaactgcatatccctggggtgagcctgcagcgctgtccttgcctctggacagaggaagagccaggatccccagtcctacccctgcgtccctgcctccctgccttccccgctggtactctgctgctcaaagcagcttttcagccttccccatctgttctgcccgccccgtgttgggaaaactgcttgggccagcagtccatggccctaggagagagaatcggctggccgctgctggagccgcagagcagctgccaaactgcagtccttcgagtccctgcgagggcggccggagctgcaaggaccccgccgccagggggcgcccgccggccgcgccctcacgaggtgcccttgcaggtgaccgggcgccgcctctggaagaacgtgtacgacgagctggggggcagcccaggcagcaccagcgcggccacgtgcacgcgccgccactacgagaggctggtcctgccatacgtgcggcacctgaagggggaggatgacaagccgctgcccacctccaagcccaggaaacagtacaagatggctaaggagaacaggggggatgatggggccaccgagaggccgaagaaggccaaggaggagcggcgcatggaccagatgatgccaggaaagaccaaagcagatgctgctgacccagcaccacttcccagccaggagccccccaggaacagcacagaacagcagggcctggcctctgggtcttctgtgtcctttgtgggtgccagcggctgtcctgaggcctacaagcggctcctatccagcttctactgcaaggggacacacggcatcatgtcaccactggccaaaaagaagctcctggcccaggtgagcaaggtggaggccttgcagtgccaggaggagggctgccgccatggggcagagccccaggcgtccccagctgttcacctcccagagagtccccagagccccaaagggctgactgagaactccaggcaccggctgacccctcaggagggattgcaggccccaggtggcagcctcagagaggaggcgcaggcaggcccctgcccggcagcccccatcttcaagggctgcttctacacccaccccaccgaggtgctgaagcctgtcagccagcaccccagggacttcttctctagacttaaagatggggtgctattggggcctcctggcaaagaggggctgtcagtgaaagagccccagctggtgtggggcggagacgctaaccgcccttctgcgttccataaaggtggctccagaaagggcatcctctaccccaagcccaaagcctgctgggtgtcccccatggccaaggtcccagccgagagccccacgctcccgcccaccttccccagtagcccaggcctgggcagcaagcgcagcctggaggaagagggtgctgcccacagtgggaagagactgcgggccgtgtctccctttcttaaggaggcggatgccaagaagtgtggggccaaacctgcagggtccggcctggtctcctgccttctgggcccagccctggggcctgtgcccccagaggcctacaggggcaccatgctgcactgcccgctgaacttcactggcaccccgggccccttgaagggccaggctgcactccccttcagccccctggtcatcccggccttcccggcccacttcctggccaccgcaggcccctcgcccatggccgctggcctgatgcacttccccccaacgtccttcgacagtgccctccgccacagactttgcccggcctcatctgcctggcacgcaccaccagtcacaacctatgcagcgccccacttcttccacctcaacaccaagctgtaggccagcccatggtgttgtgtacactgtggagtcgacaggggcctacaacaggcaggtactgctgccagggggctctgaactagtgcctgctacccaggacacccgggccatgcccctggctgggcagcctggcacaagtgaagaagaaggcagtgggaaaactgggtttatctcaaggcagcagcctgagcccaggagcagaggacccagttgttataaggcgctgggagaggatgggcagctcccactgccccagagcggagctcgaagcacccaggttgcccacggaaaatccaataaaaagacaccagtgtgaatccacgtagccctgaggtgtgtgtg

SEQ ID NO: 464047 - DNA, 1528 bp, Homo sapiens
ccggcgggccgcgccgcgagccagtatctcagagagcgcggggtccggacagccgcgcgctgagggtctcggggcgggcgccgcgggacctctccgggccatggcagcccctgtcaaagggaacaggaagcagtccacggagggtgacgccctagacccacctgcatcccccaaacctgctggcaagcagaacggaatccagaaccccatctcgctggaggactcccccgaggcaggcggggagcgggaggaggagcaggagcgggaggaggagcaggccttcctggtcagcctctacaagttcatgaaggagcgacacacgcccatcgagagggtgccccatctcggcttcaagcagattaacctgtggaagatctacaaagcagtggagaagctgggggcctatgagctggtgaccgggcgccgcctctggaagaacgtgtacgacgagctggggggcagcccaggcagcaccagcgcggccacgtgcacgcgccgccactacgagaggctggtcctgccatacgtgcggcacctgaagggggaggatgacaagccgctgcccacctccaagcccaggaaacagtacaagatggctaaggagaacaggggggatgatggggccaccgagaggccgaagaaggccaaggaggagcggcgcatggaccagatgatgccaggaaagaccaaagcagatgctgctgacccagcaccacttcccagccaggagccccccaggaacagcacagaacagcagggcctggcctctgggtcttctgtgtcctttgtgggtgccagcggctgtcctgaggcctacaagcggctcctatccagcttctactgcaaggggacacacggcatcatgtcaccactggccaaaaagaagctcctggcccaggtgagcaaggtggaggccttgcagtgccaggaggagggctgccgccatggggcagagccccaggcgtccccagctgttcacctcccagagagtccccagagccccaaagggctgactgagaactccaggcaccggctgacccctcaggagggattgcaggccccaggtggcagcctcagagaggaggcgcaggcaggcccctgcccggcagcccccatcttcaagggctgcttctacacccaccccaccgaggtgctgaagcctgtcagccagcaccccagggacttcttctctagacttaaagatggggtgctattggggcctcctggcaaagaggggctgtcagtgaaagagccccagctggtgtggggcggagacgctaaccgcccttctgcgttccataaaggtggctccagaaagggcatcctctaccccaagcccaaagcctgctgggtgtcccccatggccaaggtcccagccgagagccccacgctcccgcccaccttccccagtagcccaggcctgggcactcccactgccccagagcggagctcgaagcacccaggttgcccacggaaaatccaataaaaagacaccagtgtgaatccacgtagccctgaggtgtgtgtg

SEQ ID NO: 464048 - DNA, 2887 bp, Homo sapiens
gtttgttcgcggggcggggcgaggcaggatatcacgtgaccctgcgagtggctcagatccgaactggccgcctttctccccttcccccaccccaggtacgcgcggccacgccctctccagcgccattgttatttaggctggggggtctctgggctcctggcggccggggtcgggggaaattcctttactattctttgggggaagatcaaaataacttgtgtttttttgtttgttttttgtgcccagcccttgtgggagcggcgaggttccctaaccccaatcctggcatctcggctaaggggctttattagagggaacttgtctagcacgagagaacctcctcccacaaaatggccctggggttgggtaggtcggtaaaggctgctaaatcgcatttaccccaaggaggaagaaaggaccctccctattccaaaagccgcctttaggcgcctgacaataagaagtcgcttctgttaagagtttacgtggttttggtagggggcggggaaggccaaatcctaaaatagtgtctgccttttattcagaatttcccttcgctctttactgtactaaacgctttacaggaattatcccattgaattcttacactcgagtctttcattctgaaactaacttgttaatcgtctgttccctacattcgaattttagctccccttggtggtcctcaccgctgtaaatctatgtctagcccagtgcctggcagccaagtcttcagttctagttgtagatgttttataggtaaagaatttgagacacaagagattgagtaacttgtccgagatcacggctgtgtggtgcagaagctggattctgatctgcggcgggttggctccagaacgtgagttgttgaacacaattctggtgaaagacaacccaagatgttcgttaccctccacgggggacctactgaagatgtgctgctttagttgaatcccacaccacattcagtctctggcgaggcttcagccaccaccccctccccagcctccgccaaaaaaattgttttgataatttagtggaagaatattaaattgattttccttcagaataaaggctacttttcagtttgcagtttacaatgtatagctctgttgtaagggcgagaatattgtctttgaagtgtaccgggttaaggtatcttatgggcgtacagattcagaagcttctccaagactttttcaatggaaaagaactgaataagagcatcagccctaatgaagctgttgcttatggtgcagctgtccaagcagccattctgtctggcaacaaatctgaaaatgctcaagatttgttgcttttcagacagaccttcactacctactctgacaggcagcctgatgtgcttattcaggtttatgaaggtgagcatgtcatgaccaaggatagcaacctgcttggcaagtttcaactcacaggcatacctttggcactccaaggtgttcctcacattgaagtcacatttgatattgatgccaatggcatcttcagtgtctctgctgtgcacaagaagttggccttgagtttggaatgtgtgaaaatagacattccaggtgaagggaacctaggtggctccctctccagcaaaggcatggaggcagatgagcgctcttggagaaatgagaatggggagaaatcgtccatgaacatggagattggacatccccacgaaggaaaggatgatttaggagacaagagggtcatcatgggaacaaaatttcccatggagttggggatcagagtaggattaggaaaagaagattcccgatgcggggagagccctgtggttagtaataagtgtgagggaaggatggcaccaccagaaacaaaatttccattgagcaaggggcttgaaatgggattagaaagacagaatatttctaggactgtcatgcagaggggtagtttaggagtcgacagtgtctcagcttcacagggaacaaaaccttctctgttgccaggaagaatggggttagaaaatgagagtcttcttgcaggatatacccatgaacggataatacagcctcctttgggcagggtgtgtggaagttcacaggctgcagggagcaggagagctcctttggctagtggccctgaaggggtagaggaattagtgggaaagcctgctttcgttatggaaccaagacaggaaatggaaaaagagtctacctgtgttttaatgaaacccaacacagagattaagcttcctgtggaggtggacattggactaacccaagccgaggggccagatgagactaagaatacagagccccaaatgggcttggtgatagaacctccccaatgccagtttgcccaacaacatgaacagagaaaggaggctggaaacattgaatcaggagtggaacctccagatcgcatcagacccatatactctgggaagttttttgatcggaccccttgctggccaagttctgtgagttatttgttctttcagcaaagacttgtggtagccattgtgccagaatactctgctaaagatgtggtgaatccaccaaaatcctatgaagaagtatttaaagaaggaaatgaaggacatgatttgtatgttgtttctcacaatgattattatgcaggtaagtgtcctccgatgcaaaatgggcctgaggatatgggactctcggatttgtgaagaggaataaaggaaattggtacataaagttaaatgcctgccatgtaatagatggtgttgatgcttgtagatgttccttggtgtctggcattgaacagttaggtatttattgtagtcctcactgtctgtgcttatttgtacccattcatcttggaaatgctttccagatatttgaaaggacttgtgtgttgtgatctaagctgtatctgctttaggggg

SEQ ID NO: 464049 - DNA, 2223 bp, Homo sapiens
gtttgttcgcggggcggggcgaggcaggatatcacgtgaccctgcgagtggctcagatccgaactggccgcctttctccccttcccccaccccaggtaaagaatttgagacacaagagattgagtaacttgtccgagatcacggctgtgtggtgcagaagctggattctgatctgcggcgggttggctccagaacgtgagttgttgaacacaattctggtgaaagacaacccaagatgttcgttaccctccacgggggacctactgaagatgtgctgctttagttgaatcccacaccacattcagtctctggcgaggcttcagccaccaccccctccccagcctccgccaaaaaaattgttttgataatttagtggaagaatattaaattgattttccttcagaataaaggctacttttcagtttgcagtttacaatgtatagctctgttgtaagggcgagaatattgtctttgaagtgtaccgggttaaggtatcttatgggcgtacagattcagaagcttctccaagactttttcaatggaaaagaactgaataagagcatcagccctaatgaagctgttgcttatggtgcagctgtccaagcagccattctgtctggcaacaaatctgaaaatgctcaagatttgttgcttttcagacagaccttcactacctactctgacaggcagcctgatgtgcttattcaggtttatgaaggtgagcatgtcatgaccaaggatagcaacctgcttggcaagtttcaactcacaggcatacctttggcactccaaggtgttcctcacattgaagtcacatttgatattgatgccaatggcatcttcagtgtctctgctgtgcacaagaagttggccttgagtttggaatgtgtgaaaatagacattccaggtgaagggaacctaggtggctccctctccagcaaaggcatggaggcagatgagcgctcttggagaaatgagaatggggagaaatcgtccatgaacatggagattggacatccccacgaaggaaaggatgatttaggagacaagagggtcatcatgggaacaaaatttcccatggagttggggatcagagtaggattaggaaaagaagattcccgatgcggggagagccctgtggttagtaataagtgtgagggaaggatggcaccaccagaaacaaaatttccattgagcaaggggcttgaaatgggattagaaagacagaatatttctaggactgtcatgcagaggggtagtttaggagtcgacagtgtctcagcttcacagggaacaaaaccttctctgttgccaggaagaatggggttagaaaatgagagtcttcttgcaggatatacccatgaacggataatacagcctcctttgggcagggtgtgtggaagttcacaggctgcagggagcaggagagctcctttggctagtggccctgaaggggtagaggaattagtgggaaagcctgctttcgttatggaaccaagacaggaaatggaaaaagagtctacctgtgttttaatgaaacccaacacagagattaagcttcctgtggaggtggacattggactaacccaagccgaggggccagatgagactaagaatacagagccccaaatgggcttggtgatagaacctccccaatgccagtttgcccaacaacatgaacagagaaaggaggctggaaacattgaatcaggagtggaacctccagatcgcatcagacccatatactctgggaagttttttgatcggaccccttgctggccaagttctgtgagttatttgttctttcagcaaagacttgtggtagccattgtgccagaatactctgctaaagatgtggtgaatccaccaaaatcctatgaagaagtatttaaagaaggaaatgaaggacatgatttgtatgttgtttctcacaatgattattatgcaggtaagtgtcctccgatgcaaaatgggcctgaggatatgggactctcggatttgtgaagaggaataaaggaaattggtacataaagttaaatgcctgccatgtaatagatggtgttgatgcttgtagatgttccttggtgtctggcattgaacagttaggtatttattgtagtcctcactgtctgtgcttatttgtacccattcatcttggaaatgctttccagatatttgaaaggacttgtgtgttgtgatctaagctgtatctgctttaggggg

SEQ ID NO: 464050 - DNA, 2116 bp, Homo sapiens
cacaggaaccaccaaatccacagcctgtatgaaagctgcttcttccaacctcagcagtgtcaaaagactggacaccagctggatttgaggtcccatcagcttttggggacctctccagcccaccggcatcaacactattattattttcattttaccataatggaaatggaagtgtagaaaaaacaagaaaattgtgtacctaactctccatggtaacctctctcactttttattattcaattattcaataaatattgattgagcatttatatatgtgtgggactgcgggaggaaagagaggagcagcagtacagcagaggcactggcacatctgtatgccagagaaggaatgggtggacaaaaactgcccttatatttggagcctgggaaatagccatccagaggcccattcatttccagagcagaaaataaataaggaagatggacaactgagagctgagcatggcagcagctctacacccatcttgtttcaccctgagcagctccctgttggtatttgtttgactattacgacgttgactaaaccattcaatgaacaaaaagcaataactctgaagacccgaccaagtcctagtgtcctgctgaatgatgatgagcatactgcttgcaggctaaacctggaggagcaaggccagagtcactgggacctggaatcaaagctggggcagcttctgctttttcctcctccttctaagcttccgtaagcctctcttcacttgtgccctccctcagctgtccttcaggatggtattttctgggcaccagtctcatactggctgccacttcatgtgtacaggaattagagtaaaagtaaaagagaaagcaaagaggatgaaaagggagcttctttattttcctagtttcttgtggtggaatatcagattacagatttgagacttttcttgagttctaatttaagcatttaatgctgtatattttcatctcaacattgttctatctgatggctcatgttttgatatgttgtattttcattttcaagtagttccaagtacatgtatttgtgccttatttggagtatattgtttaatttccaggtgtttagcgattttgctattgacttcctgttatttatttctagtttgagtctgctatcattaaaatatatatttgaaatgtgtttaaaaatttaaaaaatgtgttaggtgttgttttatgatgcaggatatggaacaacttaatgtatgtcccaaaggcacttgaaatttttatgtattctggttttgagtggaatatactgtatatgtcagttagaatgtgttcgttgattgtgttgtccagtgctgtcagttcttgcatcattcatttcgaagttccaacttttcgtgtgtacatatttaagattgtaatgtattgttggtggcttgattctttatcatgatataatggtaatctttgtctagtaattttgcttgctataaagtccactttgccatgtgttaacaaagccactcttatttttaaaatagtttttattagtgtatgcttggtagtttttttccatcttttaacttttaatctagcttctttattgaattttaaattgtttcttgcgcattgcaaattgttgagtcatattgctttatgctctctgctaatctatgtcttgtgattggtgtatttagaatatttacatttaagataattattatgatgacacttgtctgcctctttaatatttgactattagtttttttttaattatactttaagttttagggtacatgtgcacaacgtgcaggtttgttacatgtatatacatgtcccatgttggtgtgctatacccattaactcgtcatttaacattagacttctattagttttgtttgctcattcggtagattttatttgaaatgtttattatcaaaatgtataaattttaaataataatgtcttgataagttccactgcaaggaaaatgtttccaaagtgcttttgtagtgtttgatactctcttttcacaaattttttatgtgaatatctattatattaccataatgtacatctttaaacacttactgtctgtcttcataattagttaaaatattttaaaacatcattcttctaaactgagtct

SEQ ID NO: 464051 - DNA, 4045 bp, Homo sapiens
  misc_feature (1)..(3): n is a, c, g, or t
  misc_feature (6)..(9): n is a, c, g, or t
nnnagnnnnagatggggctggggcaagagctaagtcatattttcctcttgtcagctgttggtggaggtttctatggtggcatttccttgggtgctctgagtatgaccagttatatctctgtggaaagggacttccacaacaaaagaagtctgggagatgctgtatcagcggcagggaaggaggctttgccatcttggctgcactgggactcacagagccacaccctggagggcctcccccttgacactgataagggtgtgcattacatttcagtgagcgctacacggctgggggccaacgggagccacatcccccagacctccagtgtgttctccatcgaggtctaccctgaagaccacagtgagctgcagtcggtgaggacagcctccccagaccctggtgaggtggtatcatctgcctgtgctgcggatgaacctgtgactgttttgacggtgattttggatgccgacctcaccaagatgaccccaaagcaaaggattgacctcctgcacaggatgcggagcttctcagaagtagagcttcacaacatgaaattagtgccggtggtgaataacagactatttgacatgtcggccttcatggctggcccgggaaatgcaaaaaagaacagtgtgcctgacattcatggtgtagaggcccctgccagggagggcgcaatgtctgctcagcttggctaccctgtggtgggttggcacatcgccaataagaagccccctcttcccaaacgcgtccggaggcagatccatgctacacccacacctgtcactgccattgggcccccaaccacggctatccaggagcccccatccaggatcgtgccaacccccacatctccagccattgctcctccaacaaaaaccatggctcctccagtcagggatcctgttcctgggaaacccacggtcaccatccggactcgaggcgccattattcaaaccccaaccctaggccccatccagcctactcgggtgtcagaagctggcaccacagttcctggccagattcgcccaacgatgaccattcctggctatgtggagcctactgcagttgctacccctcccacaaccaccaccaagaagccacgagtatccacaccaaaaccagcaacgccttcaactgactccaccaccaccacgactcgcaggccaaccaagaaaccacggacaccccggccagtgccccgggtcaccaccaaagtttccatcaccagattggaaactgcctcaccgcctactcgtattcgcaccaccaccagtggagtgccccgtggcggagaacccaaccagcgcccagagctcaagaaccatattgacagggtagatgcctgggttggcacctactttgaggtgaagatcccgtcagacactttctatgaccatgaggacaccaccactgacaagctgaagctgaccctgaaactgcgggagcagcagctggtgggcgagaagtcctgggtacagttcaacagcaacagccagctcatgtatggccttcccgacagcagccacgtgggcaaacacgagtatttcatgcatgccacagacaaggggggcctgtcggctgtggatgccttcgagatccacgtccacaggcgcccccaaggggatagggctcctgcaaggttcaaggccaagtttgtgggtgacccggcactggtgttgaatgacatccacaagaagattgccttggtaaagaaactggccttcgcctttggagaccgaaactgtagcaccatcaccctgcagaatatcacccggggctccatcgtggtggaatggaccaacaacacactgcccttggagccctgccccaaggagcagatcgctgggctgagccgccggatcgctgaggatgatggaaaacctcggcctgccttctccaacgccctagagcctgactttaaggccacaagcatcactgtgacgggctctggcagttgtcggcacctacagtttatccctgtggtaccacccaggagagtgccctcagaggcgccgcccacagaagtgcctgacagggaccctgagaagagcagtgaggatgatgtctacctgcacacagtcattccggccgtggtggtcgcagccatcctgctcattgctggcatcattgccatgatctgctaccgcaagaagcggaagggcaagcttacccttgaggaccaggccaccttcatcaagaagggggtgcctatcatctttgcagacgaactggacgactccaagcccccaccctcctccagcatgccactcattctgcaggaggagaaggctcccctaccccctcctgagtaccccaaccagagtgtgcccgagaccactcctctgaaccaggacaccatgggagagtacacgcccctgcgggatgaggatcccaatgcgcctccctaccagcccccaccgcccttcacagcacccatggagggcaagggctcccgtcccaagaacatgaccccataccggcagtgccgggcggccccctggctctctgcgttttgcctttaacactaactgtactgttttttctattcacgtgtgtctagctgcaggatgtaacatggaaaacagtaactaaagattaaattcaaaggactttcagaagttaaggttaagtttttacgtttaatctgctgtgttactgaacttgtatgtataatttttgggtggctaagacaagtctcctacatcctcagttcctcctctgtaaggggtgggggatagcagagaaaccagtgagactggctgggaaggaggatggtgggaaagtgtcacgggttttctgccccagagtgtgtcagcccctgtacctcctgggtagggttccttcaggccaggtctctgtgaagatggggacctagggatacctctggctgcagctctaccccacctcctgcctgcattatcttgtgggcttgggactggctagtctcccaggtagtctcaaggcaggtttgtgttggccttggggtgggaacaatggtttctggccaggctgctctgccttggttggcctgtaggttctgggggttggggggtgaccttcagtccctggcttgggatggacagtccagctgggtaggctgatcatgactcagtgcccaggaaggggcagatgggttgtcctaggacactgctcggagtgtgggcggcaggagatgcagcagctgtgtttcaaggggcaaaggggcagaatcgagtgattggtcacagaacaactggtgcctcttctgggctcaactctgccatccctggctccttaccatgacccctgctcctctgctcaaagacccacagaggctggtccgatattgcagataagagctgattcccagggtgggggggttgttgaaggtccaacaactacttggagttaggacctgaatgtgcaccatgctaagtgccaggaaaggctgtccccagcacacacttcactccctaggcctagcagcaggggcccaggaaatgaccccgtcgttattctcttgacctcaggaacttttgcttaacatctaacctgaagccactgggtaatgagtggactcactgttctgaattcaagtaagggaatacttggtcttggcagagaacattaaggccagaaggacctctggcctcagctctgccctgcctcttttgggggatggggtagtatccgctgtttagcccagcagacccttgacccctggcactcctgccagatccctgttccttgatttggatgaggactgctcaggtcttttaagctggggttagagggtcgtagacaggagagtaggaaagaaggaacatcagacctacaggaatctgccttcccacattcctctgacttggaatgactctggcctggcttggagacagtgctggtctctagaaaatgctagaggaatctgcattttctcttgtcataaaggcactgccttaggcctagatctttgagctagtcttgggataagggctgttagctggaaaatcttgtggtgtgtctaggccagcctggcctctagaatactaccaccagtttggga

SEQ ID NO: 464052 - DNA, 1984 bp, Homo sapiens
gccctctttcctacgatggctgtacccaggaagccggccgcaggttccctaagccgaggcagcgctggctgtagtttctctgggctcctgggctggtgcacctgcccctgccttcagaacgggcccctgtgcatggctggcatctgtgattgggggaggaagccctcaagccccatgtcggtgaccctggggcagctcagtgtttcctgcctcagcagctctgcccacctccagtccgtcagcagattctcccttgctggtctggcctttcgctccagcagtggcaggcacagctgcccacgtatctactcctggtcagggcctgattggacacagtcaccaaagggctccccgagggagcttcgtgaaaaatgcctgattgtcacatggtcacagaacaacataagccataatgctatcgtaccatataccactcatttcatgtactaatttcctattttgtcgtatggaaaatatttgacaatgcctctaggggaacattcgagtgtgcactgggggtggtgctgaagtaaccacggttaataacttggtgtatagtgttcttccatgcaaataggaatctttaaagatatatagagatatctatacacatgtgactttttattgatacaaaatgagcacatataagcatatatgtcacagcaacttttgtaaaggtcaaagactggaaataccaaacacgtccctcaaaagggattcagtggaatagattatgatgcagacatttaatagaattattgtttggtcattaaaaaaaagaggcagctctctgtacagatatgagaactccttacaacacattgttaaataaaacattgtatgcacatcatcaacccacttaattttccatcacagcttcacagagaggcagatgccacacaggccacccacccagatgcagagccagattccctgcgtggactggacgggagtttcccagctggagttctctcggccaagctgcctgtgacatggggttggaggtgctccagagagtcatggccacccctggaggaagtgacttgtggctgactgctcaaggggaagtcctgtggcagtggagtcgtcagcattaattcaaataagatctctccctgcacacaatctgctttcgtgttcctgatggattgaatcaagagtgaatgagctcctacttcgcgaaagcaaaacaaactaaacgcatcaaccacgaccgcagagcccccatctctcccaggagggtgagcccatgttgtgttttcatttgtcagaaatctatcttaggaagccattcctgagatctgttctaatttaggccatttttaaaaaaaataatgcagttgattcttttcccgtgatctttcttttctccatgacttaaatttccccaggaactattcaaatgccgcatctggggttttgtttttgttttttgatgaagtcatgactttctttaaacagtaattattaaacaaaccaaagggaaaccttctgtgaggatgctgtttacaaatatcaccacttttacaatcagtaatggaggttgcaaagtgcaggattctgagttccaggtgaaatatgatcctgtggactttctgaattgggatcccgggaagtgttcctcatgggtgccctgttaatagcacctctgctgacactggagtgtgacagccaccgtttgaaggcacagcggcctcttcccctgggttagagatgtaccgtgactccccagtctctgttgaaggccacgtgttacacacattcttctcctggtgggttcctggaccccagtcagctctggccaggatcagattcccaggccttgctctctaaccaggctggcccatcctcgcctggagccactgcccagagacccagcatggcccgtggatgaaccccagggatgtaagccttattggactgagataggagagccaggagtaggaacagaggaggatgtgtccagagcctgctggaaagagcc

SEQ ID NO: 464053 - DNA, 1021 bp, Homo sapiens
caatttacctaacacccgcgaacctcagtttcctaacctgaagaagaggaaatgggatcaattatcattcaccagtgccacactgtccaagctggcttcacagaagcctcagttgagtcagtgccagccctactctcctccctggtacttaatggtctgtcaacagcagtgatgcagaagcaagggtgctggaatggagacaggagtcctagtgctgactgccactggctgtatgactctggggagtgtggaggctttaatgcaggaaggaacatggaacttctgggatctgagggaagaccagtggggctggttagtgaggtggacatggacaggaaacagctggagaggcagggggcagaagtgactcagaaggtggattttcctccacagatgtctctgaccatggattgggacatgaatgggagcagagctccattccagagtccccagagaggaggcacttttgctcgagcttcactcagctgtgtcctctggatgctgggatatgagggtggcatgtggtacttcagaggttacaatgatgatcaagaactgatacccctcttcactgaaggcttatgtacatatatatccaaggcaaagcaaattgcaagaaacacagaaatggaaaaaccaaatgccgcaggaagaagataggaattccagcctgggaactctgagaagactggttgaaggaagtggctttcagtctaggtcttgggggagatgaaatttcatcctgcagacatgaggacagggccagaggaggaaaatgccatgtggagacagacacacagggagaagaactccatgtgacgcagaggcagagcgtggagagatgcaggcggaaggagtgccaaggattgctggccaccaccagaggctgggaagatgcaaggaaggattctacccagagtctcagacagagcatgtccctgtggaaaccttgatttcagacttctggcccccagaactgtgagagaataaatttctgttgtttaagccatccagtgtgtgg

SEQ ID NO: 464054 - DNA, 1360 bp, Homo sapiens
acctagttaacacctactcatcatcaagcatcacttccccagggatgcctcgctgacctccctgactgatgtcaatctcatggcatctgccttgcatagtactgttcacaggaaggactgacacaaaacagaagatgagagaatgggtggctgtatgcacagtacccaggacaaatctctccacttggaaggagatcccaatccttctgcagccccaacatccacctgcgcacctaggaaaatgcccaaaaggatttcaatatccaaacaactggcttcagtgaaagctctgaggaagtgctcagatctggaaaaagctattgccaccactgctctgattttcagaaattcttctgactctgatggtaaacttgaaaaagctattgccaaagatctgctgcaaacccaatttaggaatttcgcagagggacaagaaaccaagccaaaatacagagagatcctttctgaacttgatgagcacacagaaaataagctagattttgaagacttcatgatcttgctcttaagcatcactgtcatgtcagatctgctacaaaatatacggaatgtaaaaattatgaaatgaacagttttaaatatgctgtataaaataatggcaaaagacagtgttattaaaatgtttccatcttatttttgattaattgaatatatctatcatgcatctgaaattgcctaggatggttctgattgctggtattcagatccaatgtaactccaaatatttacccatacacttcaagaatgtttgaatgataaggtctctgtgtgctttacaataggatagatttgataccactgaataataaatggcttttgctgagtcagtagcgacctagagcactctacttatagtcattgagtcactcatttattcactaaacatttgttgagcatctacttgatggaactgctgaggatacagtaatgaattggccaggcaattccttccttcagacatgtttgcagaagtctagcagaagagatagacattgaacaatttttaaataattgcatacacagtataattagaattgaaataagggctataggatgctaaaagagattatcacctgatcggagttcaaaggtcagaaaagctttactgacattctataaaaagcaaaaaaaaaaaaattggtccatggatgccagggatatggggggctggaaatggtctccattttgattgtgaggtggtggctacaagattgcatgcatttgtcaaactcatagaactgcacactgaaaagagtgaattgtactgtatgtcaattatacctaaataaatctgacttaacaaaaaaataaaacccagtattcttgtaatctctgaacacaa
